United States Patent Application Publication US 2018/0126003 A1 - sequence listing, part 188

SEQ ID NO: 336034 - DNA, 9960 bp, Artificial Sequence
  derived and/or modified sequence
atgggcagacacgtggccaccagctgccacgtggcctggctgctggtgctgatcagcggctgctggggccaggtgaacagactgcccttcttcaccaaccacttcttcgacacctacctgctgatcagcgaggacacccccgtgggcagcagcgtgacccagctgctggcccaggacatggacaacgaccccctggtgttcggcgtgagcggcgaggaggccagcagattcttcgccgtggagcccgacaccggcgtggtgtggctgagacagcccctggacagagagaccaagagcgagttcaccgtggagttcagcgtgagcgaccaccagggcgtgatcaccagaaaggtgaacatccaggtgggcgacgtgaacgacaacgcccccaccttccacaaccagccctacagcgtgagaatccccgagaacacccccgtgggcacccccatcttcatcgtgaacgccaccgaccccgacctgggcgccggcggcagcgtgctgtacagcttccagccccccagccagttcttcgccatcgacagcgccagaggcatcgtgaccgtgatcagagagctggactacgagaccacccaggcctaccagctgaccgtgaacgccaccgaccaggacaagaccagacccctgagcaccctggccaacctggccatcatcatcaccgacgtgcaggacatggaccccatcttcatcaacctgccctacagcaccaacatctacgagcacagcccccccggcaccaccgtgagaatcatcaccgccatcgaccaggacaagggcagacccagaggcatcggctacaccatcgtgagcggcaacaccaacagcatcttcgccctggactacatcagcggcgtgctgaccctgaacggcctgctggacagagagaaccccctgtacagccacggcttcatcctgaccgtgaagggcaccgagctgaacgacgacagaacccccagcgacgccaccgtgaccaccaccttcaacatcctggtgatcgacatcaacgacaacgcccccgagttcaacagcagcgagtacagcgtggccatcaccgagctggcccaggtgggcttcgccctgcccctgttcatccaggtggtggacaaggacgagacccagggcctgaacagcatgttcgaggtgtacctggtgggcaacaacagccaccacttcatcatcagccccaccagcgtgcagggcaaggccgacatcagaatcagagtggccatccccctggactacgagaccgtggacagatacgacttcgacctgttcgccaacgagagcgtgcccgaccacgtgggctacgccaaggtgaagatcaccctgatcaacgagaacgacaacagacccatcttcagccagcccctgtacaacatcagcctgtacgagaacgtgaccgtgggcaccagcgtgctgaccgtgctggccaccgacaacgacgccggcaccttcggcgaggtgagctacttcttcagcgacgaccccgacagattcagcctggacaaggacaccggcctgatcatgctgatcgccagactggactacgagctgatccagagattcaccctgaccatcatcgccagagacggcggcggcgaggagaccaccggcagagtgagaatcaacgtgctggacgtgaacgacaacgtgcccaccttccagaaggacgcctacgtgggcgccctgagagagaacgagcccagcgtgacccagctggtgagactgagagccaccgacgaggacagcccccccaacaaccagatcacctacagcatcgtgagcgccagcgccttcggcagctacttcgacatcagcctgtacgagggctacggcgtgatcagcgtgagcagacccctggactacgagcagatcagcaacggcctgatctacctgaccgtgatggccatggacgccggcaacccccccctgaacagcaccgtgcccgtgaccatcgaggtgttcgacgagaacgacaacccccccaccttcagcaagcccgcctacttcgtgagcgtggtggagaacatcatggccggcgccaccgtgctgttcctgaacgccaccgacctggacagaagcagagagtacggccaggagagcatcatctacagcctggagggcagcacccagttcagaatcaacgccagaagcggcgagatcaccaccaccagcctgctggacagagagaccaagagcgagtacatcctgatcgtgagagccgtggacggcggcgtgggccacaaccagaagaccggcatcgccaccgtgaacatcaccctgctggacatcaacgacaaccaccccacctggaaggacgccccctactacatcaacctggtggagatgaccccccccgacagcgacgtgaccaccgtggtggccgtggaccccgacctgggcgagaacggcaccctggtgtacagcatccagccccccaacaagttctacagcctgaacagcaccaccggcaagatcagaaccacccacgccatgctggacagagagaaccccgacccccacgaggccgagctgatgagaaagatcgtggtgagcgtgaccgactgcggcagaccccccctgaaggccaccagcagcgccaccgtgttcgtgaacctgctggacctgaacgacaacgaccccaccttccagaacctgcccttcgtggccgaggtgctggagggcatccccgccggcgtgagcatctaccaggtggtggccatcgacctggacgagggcctgaacggcctggtgagctacagaatgcccgtgggcatgcccagaatggacttcctgatcaacagcagcagcggcgtggtggtgaccaccaccgagctggacagagagagaatcgccgagtaccagctgagagtggtggccagcgacgccggcacccccaccaagagcagcaccagcaccctgaccatccacgtgctggacgtgaacgacgagacccccaccttcttccccgccgtgtacaacgtgagcgtgagcgaggacgtgcccagagagttcagagtggtgtggctgaactgcaccgacaacgacgtgggcctgaacgccgagctgagctacttcatcaccggcggcaacgtggacggcaagttcagcgtgggctacagagacgccgtggtgagaaccgtggtgggcctggacagagagaccaccgccgcctacatgctgatcctggaggccatcgacaacggccccgtgggcaagagacacaccggcaccgccaccgtgttcgtgaccgtgctggacgtgaacgacaacagacccatcttcctgcagagcagctacgaggccagcgtgcccgaggacatccccgagggccacagcatcctgcagctgaaggccaccgacgccgacgagggcgagttcggcagagtgtggtacagaatcctgcacggcaaccacggcaacaacttcagaatccacgtgagcaacggcctgctgatgagaggccccagacccctggacagagagagaaacagcagccacgtgctgatcgtggaggcctacaaccacgacctgggccccatgagaagcagcgtgagagtgatcgtgtacgtggaggacatcaacgacgaggcccccgtgttcacccagcagcagtacagcagactgggcctgagagagaccgccggcatcggcaccagcgtgatcgtggtgcaggccaccgacagagacagcggcgacggcggcctggtgaactacagaatcctgagcggcgccgagggcaagttcgagatcgacgagagcaccggcctgatcatcaccgtgaactacctggactacgagaccaagaccagctacatgatgaacgtgagcgccaccgaccaggccccccccttcaaccagggcttctgcagcgtgtacatcaccctgctgaacgagctggacgaggccgtgcagttcagcaacgccagctacgaggccgccatcctggagaacctggccctgggcaccgagatcgtgagagtgcaggcctacagcatcgacaacctgaaccagatcacctacagattcaacgcctacaccagcacccaggccaaggccctgttcaagatcgacgccatcaccggcgtgatcaccgtgcagggcctggtggacagagagaagggcgacttctacaccctgaccgtggtggccgacgacggcggccccaaggtggacagcaccgtgcaggtgtacatcaccgtgctggacgagaacgacaacagccccagattcgacttcaccagcgacagcgccgtgagcatccccgaggactgccccgtgggccagagagtggccaccgtgaaggcctgggaccccgacgccggcagcaacggccaggtggtgttcagcctggccagcggcaacatcgccggcgccttcgagatcgtgaccaccaacgacagcatcggcgaggtgttcgtggccagacccctggacagagaggagctggaccactacatcctgcaggtggtggccagcgacagaggcaccccccccagaaagaaggaccacatcctgcaggtgaccatcctggacatcaacgacaacccccccgtgatcgagagccccttcggctacaacgtgagcgtgaacgagaacgtgggcggcggcaccgccgtggtgcaggtgagagccaccgacagagacatcggcatcaacagcgtgctgagctactacatcaccgagggcaacaaggacatggccttcagaatggacagaatcagcggcgagatcgccaccagacccgccccccccgacagagagagacagagcttctaccacctggtggccaccgtggaggacgagggcacccccaccctgagcgccaccacccacgtgtacgtgaccatcgtggacgagaacgacaacgcccccatgttccagcagccccactacgaggtgctgctggacgagggccccgacaccctgaacaccagcctgatcaccatccaggccctggacctggacgagggccccaacggcaccgtgacctacgccatcgtggccggcaacatcgtgaacaccttcagaatcgacagacacatgggcgtgatcaccgccgccaaggagctggactacgagatcagccacggcagatacaccctgatcgtgaccgccaccgaccagtgccccatcctgagccacagactgaccagcaccaccaccgtgctggtgaacgtgaacgacatcaacgacaacgtgcccaccttccccagagactacgagggccccttcgaggtgaccgagggccagcccggccccagagtgtggaccttcctggcccacgacagagacagcggccccaacggccaggtggagtacagcatcatggacggcgaccccctgggcgagttcgtgatcagccccgtggagggcgtgctgagagtgagaaaggacgtggagctggacagagagaccatcgccttctacaacctgaccatctgcgccagagacagaggcatgccccccctgagcagcaccatgctggtgggcatcagagtgctggacatcaacgacaacgaccccgtgctgctgaacctgcccatgaacatcaccatcagcgagaacagccccgtgagcagcttcgtggcccacgtgctggccagcgacgccgacagcggctgcaacgccagactgaccttcaacatcaccgccggcaacagagagagagccttcttcatcaacgccaccaccggcatcgtgaccgtgaacagacccctggacagagagagaatccccgagtacaagctgaccatcagcgtgaaggacaaccccgagaaccccagaatcgccagaagagactacgacctgctgctgatcttcctgagcgacgagaacgacaaccaccccctgttcaccaagagcacctaccaggccgaggtgatggagaacagccccgccggcacccccctgaccgtgctgaacggccccatcctggccctggacgccgaccaggacatctacgccgtggtgacctaccagctgctgggcgcccagagcggcctgttcgacatcaacagcagcaccggcgtggtgaccgtgagaagcggcgtgatcatcgacagagaggccttcagcccccccatcctggagctgctgctgctggccgaggacatcggcctgctgaacagcaccgcccacctgctgatcaccatcctggacgacaacgacaacagacccaccttcagccccgccaccctgaccgtgcacctgctggagaactgcccccccggcttcagcgtgctgcaggtgaccgccaccgacgaggacagcggcctgaacggcgagctggtgtacagaatcgaggccggcgcccaggacagattcctgatccacctggtgaccggcgtgatcagagtgggcaacgccaccatcgacagagaggagcaggagagctacagactgaccgtggtggccaccgacagaggcaccgtgcccctgagcggcaccgccatcgtgaccatcctgatcgacgacatcaacgacagcagacccgagttcctgaaccccatccagaccgtgagcgtgctggagagcgccgagcccggcaccgtgatcgccaacatcaccgccatcgaccacgacctgaaccccaagctggagtaccacatcgtgggcatcgtggccaaggacgacaccgacagactggtgcccaaccaggaggacgccttcgccgtgaacatcaacaccggcagcgtgatggtgaagagccccatgaacagagagctggtggccacctacgaggtgaccctgagcgtgatcgacaacgccagcgacctgcccgagagaagcgtgagcgtgcccaacgccaagctgaccgtgaacgtgctggacgtgaacgacaacaccccccagttcaagcccttcggcatcacctactacatggagagaatcctggagggcgccacccccggcaccaccctgatcgccgtggccgccgtggaccccgacaagggcctgaacggcctggtgacctacaccctgctggacctggtgccccccggctacgtgcagctggaggacagcagcgccggcaaggtgatcgccaacagaaccgtggactacgaggaggtgcactggctgaacttcaccgtgagagccagcgacaacggcagcccccccagagccgccgagatccccgtgtacctggagatcgtggacatcaacgacaacaaccccatcttcgaccagcccagctaccaggaggccgtgttcgaggacgtgcccgtgggcaccatcatcctgaccgtgaccgccaccgacgccgacagcggcaacttcgccctgatcgagtacagcctgggcgacggcgagagcaagttcgccatcaaccccaccaccggcgacatctacgtgctgagcagcctggacagagagaagaaggaccactacatcctgaccgccctggccaaggacaaccccggcgacgtggccagcaacagaagagagaacagcgtgcaggtggtgatccaggtgctggacgtgaacgactgcagaccccagttcagcaagccccagttcagcaccagcgtgtacgagaacgagcccgccggcaccagcgtgatcaccatgatggccaccgaccaggacgagggccccaacggcgagctgacctacagcctggagggccccggcgtggaggccttccacgtggacatggacagcggcctggtgaccacccagagacccctgcagagctacgagaagttcagcctgaccgtggtggccaccgacggcggcgagccccccctgtggggcaccaccatgctgctggtggaggtgatcgacgtgaacgacaacagacccgtgttcgtgagaccccccaacggcaccatcctgcacatcagagaggagatccccctgagaagcaacgtgtacgaggtgtacgccaccgacaaggacgagggcctgaacggcgccgtgagatacagcttcctgaagaccgccggcaacagagactgggagttcttcatcatcgaccccatcagcggcctgatccagaccgcccagagactggacagagagagccaggccgtgtacagcctgatcctggtggccagcgacctgggccagcccgtgccctacgagaccatgcagcccctgcaggtggccctggaggacatcgacgacaacgagcccctgttcgtgagaccccccaagggcagcccccagtaccagctgctgaccgtgcccgagcacagccccagaggcaccctggtgggcaacgtgaccggcgccgtggacgccgacgagggccccaacgccatcgtgtactacttcatcgccgccggcaacgaggagaagaacttccacctgcagcccgacggctgcctgctggtgctgagagacctggacagagagagagaggccatcttcagcttcatcgtgaaggccagcagcaacagaagctggaccccccccagaggccccagccccaccctggacctggtggccgacctgaccctgcaggaggtgagagtggtgctggaggacatcaacgaccagccccccagattcaccaaggccgagtacaccgccggcgtggccaccgacgccaaggtgggcagcgagctgatccaggtgctggccctggacgccgacatcggcaacaacagcctggtgttctacagcatcctggccatccactacttcagagccctggccaacgacagcgaggacgtgggccaggtgttcaccatgggcagcatggacggcatcctgagaaccttcgacctgttcatggcctacagccccggctacttcgtggtggacatcgtggccagagacctggccggccacaacgacaccgccatcatcggcatctacatcctgagagacgaccagagagtgaagatcgtgatcaacgagatccccgacagagtgagaggcttcgaggaggagttcatccacctgctgagcaacatcaccggcgccatcgtgaacaccgacaacgtgcagttccacgtggacaagaagggcagagtgaacttcgcccagaccgagctgctgatccacgtggtgaacagagacaccaacagaatcctggacgtggacagagtgatccagatgatcgacgagaacaaggagcagctgagaaacctgttcagaaactacaacgtgctggacgtgcagcccgccatcagcgtgagactgcccgacgacatgagcgccctgcagatggccatcatcgtgctggccatcctgctgttcctggccgccatgctgttcgtgctgatgaactggtactacagaaccgtgcacaagagaaagctgaaggccatcgtggccggcagcgccggcaacagaggcttcatcgacatcatggacatgcccaacaccaacaagtacagcttcgacggcgccaaccccgtgtggctggaccccttctgcagaaacctggagctggccgcccaggccgagcacgaggacgacctgcccgagaacctgagcgagatcgccgacctgtggaacagccccaccagaacccacggcaccttcggcagagagcccgccgccgtgaagcccgacgacgacagatacctgagagccgccatccaggagtacgacaacatcgccaagctgggccagatcatcagagagggccccatcaagctgatccagaccgagctggacgaggagcccggcgaccacagccccggccagggcagcctgagattcagacacaagccccccgtggagctgaagggccccgacggcatccacgtggtgcacggcagcaccggcaccctgctggccaccgacctgaacagcctgcccgaggaggaccagaagggcctgggcagaagcctggagaccctgaccgccgccgaggccaccgccttcgagagaaacgccagaaccgagagcgccaagagcacccccctgcacaagctgagagacgtgatcatggagacccccctggagatcaccgagctgtag

SEQ ID NO: 336035 - protein, 1114 aa, Artificial Sequence
  derived and/or modified sequence
MVKSPMNRELVATYEVTLSVIDNASDLPERSVSVPNAKLTVNVLDVNDNTPQFKPFGITYYMERILEGATPGTTLIAVAAVDPDKGLNGLVTYTLLDLVPPGYVQLEDSSAGKVIANRTVDYEEVHWLNFTVRASDNGSPPRAAEIPVYLEIVDINDNNPIFDQPSYQEAVFEDVPVGTIILTVTATDADSGNFALIEYSLGDGESKFAINPTTGDIYVLSSLDREKKDHYILTALAKDNPGDVASNRRENSVQVVIQVLDVNDCRPQFSKPQFSTSVYENEPAGTSVITMMATDQDEGPNGELTYSLEGPGVEAFHVDMDSGLVTTQRPLQSYEKFSLTVVATDGGEPPLWGTTMLLVEVIDVNDNRPVFVRPPNGTILHIREEIPLRSNVYEVYATDKDEGLNGAVRYSFLKTAGNRDWEFFIIDPISGLIQTAQRLDRESQAVYSLILVASDLGQPVPYETMQPLQVALEDIDDNEPLFVRPPKGSPQYQLLTVPEHSPRGTLVGNVTGAVDADEGPNAIVYYFIAAGNEEKNFHLQPDGCLLVLRDLDREREAIFSFIVKASSNRSWTPPRGPSPTLDLVADLTLQEVRVVLEDINDQPPRFTKAEYTAGVATDAKVGSELIQVLALDADIGNNSLVFYSILAIHYFRALANDSEDVGQVFTMGSMDGILRTFDLFMAYSPGYFVVDIVARDLAGHNDTAIIGIYILRDDQRVKIVINEIPDRVRGFEEEFIHLLSNITGAIVNTDNVQFHVDKKGRVNFAQTELLIHVVNRDTNRILDVDRVIQMIDENKEQLRNLFRNYNVLDVQPAISVRLPDDMSALQMAIIVLAILLFLAAMLFVLMNWYYRTVHKRKLKAIVAGSAGNRGFIDIMDMPNTNKYSFDGANPVWLDPFCRNLELAAQAEHEDDLPENLSEIADLWNSPTRTHGTFGREPAAVKPDDDRYLRAAIQEYDNIAKLGQIIREGPIKGSLLKVVLEDYLRLKKLFAQRMVQKASSCHSSISELIQTELDEEPGDHSPGQGSLRFRHKPPVELKGPDGIHVVHGSTGTLLATDLNSLPEEDQKGLGRSLETLTAAEATAFERNARTESAKSTPLHKLRDVIMETPLEITEL

SEQ ID NO: 336036 - DNA, 1368 bp, Artificial Sequence
  derived and/or modified sequence
atgagggcttccctcggcgtgtgcggaaccgcttcatcaatggttattgtatatgttgaagacatcaacgatgaggcaccagtgtttacccaacagcaatactctcgcctgggactgcgggagaccgctggaatcggcacgagtgtgatcgttgtccaggccacagaccgcgactcaggagacggcggactggtaaattataggattttgagcggcgccgagggaaagtttgagattgacgagtctacagggctgatcattaccgtgaactacctggactatgaaacaaaaacctcttatatgatgaacgtgtctgcgaccgatcaggctccccccttcaatcaggggttttgctccgtatacatcactttattgaatgagttagatgaagcagtacagttcagtaacgcctcttacgaagccgcgatcctggagaacctcgccttaggaacggaaatagtgagagtccaagcttattcaatcgacaatctgaaccaaattacctaccggtttaatgcctatacctccactcaggcaaaagcactctttaagatcgacgccattaccggcgtcataacagtccaaggccttgtcgatagagaaaagggcgacttctacaccctcacggttgtcgctgacgacggaggaccaaaggttgatagcacggttgtttacattacagtcctggacgaaaacgacaattcacctcgcttcgattttacttctgactcagccgtgtctataccagaagattgtcccgtgggtcagcgggtcgccaccgtcaaagcatgggacccagacgctggctccaatggccaagtcgtgttttctctggctagcgggaacatagcaggcgccttcgaaatagtgactactaatgattctatcggggaggtgttcgtggcgcggcctctagatcgtgaagagcttgatcactatatactacaggttgttgcatctgatcgcggcacccccccaaggaagaaagaccacatattacaggtcactatcctagacatcaacgataaccctccagtaatagagagccccttcggttacaacgtgtccgtcaatgaaaatgtgggaggcggtactgccgtagttcaggtgagggcaacagaccgtgatattggcatcaactctgtgctttcatattacatcaccgagggcaacaaagatatggcctttcgcatggatcggatttcgggcgagatcgccacccggcctgctccaccagatagggagcgacagtctttctaccatttagtggctaccgtagaggatgagggaaccccgacactctccgtttccgatgggggtggccatcgcgaggagagagttggacaggggtcctccgcttctgaatag

SEQ ID NO: 336037 - DNA, 1368 bp, Artificial Sequence
  derived and/or modified sequence
atgagggccagcctgggcgtgtgtggcacagccagctccatggtgattgtgtatgtggaggacatcaatgatgaggcccctgtgttcacccagcagcagtacagccggctgggcctgcgggagacagctggcatcggcaccagcgtcatcgtggtgcaggccacagaccgggacagcggagatggcggcctggtgaactaccgcatcctgtctggagctgagggcaagtttgaaattgatgagagcacaggcctcatcatcaccgtgaactacctggactatgagaccaagaccagctacatgatgaatgtgtctgccacagaccaggccccacccttcaaccagggcttctgcagcgtgtacatcaccctgctgaatgagctggatgaagctgtgcagttcagcaatgccagctatgaagctgccatcctggagaacctggccctgggcacagaaattgtgcgggtgcaggcctacagcattgacaacctgaaccagatcacctaccgcttcaatgcctacaccagcacccaggccaaggccctcttcaagattgatgccatcactggagtcatcaccgtgcagggcctggtggaccgggagaagggggacttctacaccctgactgtggtggctgatgatggcggccccaaggtggacagcacagtggtgtacatcaccgtgctggatgaaaatgacaacagccccaggtttgacttcaccagtgacagcgctgtgtccatccctgaggactgccctgtgggccagagggtggccaccgtgaaggcctgggaccctgatgctggcagcaatggccaggtggtgttcagcctggccagcggcaacattgctggggcctttgaaattgtgaccaccaatgacagcatcggggaggtgtttgtggcccggcccctggaccgggaggagctggaccactacatcctgcaggtggtggccagtgaccggggcaccccacccaggaagaaggaccacatcctgcaggtgaccatcctggacatcaatgacaacccccctgtgattgagagccccttcggctacaacgtgtctgtgaatgaaaatgtgggcggcggcacagctgtggtgcaggtgcgggccacagaccgggacatcggcatcaacagcgtgctgagctactacatcacagagggcaacaaggacatggccttcaggatggaccgcatcagcggggagatcgccaccaggcctgcccccccagaccgggagcggcagagcttctaccacctggtggccaccgtggaggatgagggcacccccaccctgtctgtgtctgatggcggcggccaccgggaggagcgggtgggccagggcagcagcgccagcgagtag

SEQ ID NO: 336038 - DNA, 1368 bp, Artificial Sequence
  derived and/or modified sequence
atgcgggccagcctgggcgtgtgcggcaccgccagcagcatggtgattgtgtatgtggaggacattaacgatgaagcacctgttttcacgcagcagcagtacagccgcttgggcctgagagagacagccggaattgggacatccgtaatcgtagtgcaggccactgatcgggattcaggagacggtgggctggtcaattacagaattctgagtggggccgaagggaaatttgaaatagatgaatccacaggcctcatcatcaccgtaaattatctagattacgagaccaagacgtcctatatgatgaacgtttcagccacggatcaggcccccccattcaaccagggattttgcagcgtatacattactcttcttaacgagcttgacgaggcagtgcagtttagtaacgccagctatgaggccgccatacttgagaatctggccttgggcacagaaatcgttcgggtgcaagcttactctattgacaatctcaatcagatcacataccgcttcaacgcatacacaagcacgcaggctaaagccctgttcaagatagacgccataactggggtaatcaccgttcaggggctagttgatcgcgagaaaggggatttttataccctgaccgtggtggccgacgatggcggtccaaaggtggatagcaccgttgtctacattactgttttggatgaaaatgataatagccctagatttgacttcacttccgactccgcagtgtcaatccctgaggactgtcccgtgggccaacgagtcgctacagtgaaggcttgggatcctgacgcgggcagtaacggccaggtggtgttctcactggcatccgggaatatcgccggggcctttgagatcgtcaccacaaatgatagcattggagaagtgttcgttgcgagaccgttggacagggaggagcttgaccactatattttgcaggttgttgcctctgacagaggaacccctccccgaaagaaagaccatattctgcaggtgactatcctcgacattaatgacaatccaccggtcattgaaagtccttttggctacaacgtgagcgttaacgaaaacgtcgggggaggcacagccgtggtgcaggttagagcgactgaccgcgacattggaatcaactctgtgctgtcctactatatcacggaaggtaacaaagacatggcctttagaatggaccggatttctggagagattgctacccggcctgcaccacctgatcgcgagaggcaatcattttaccacttagtggctacagttgaagacgaagggacacccaccctaagcgtgagcgatggtgggggccatcgcgaggagcgcgtgggtcaagggtcatccgcctctgaatag

SEQ ID NO: 336039 - DNA, 1368 bp, Artificial Sequence
  derived and/or modified sequence
atgagagcttctttgggcgtatgtggaaccgcatcatccatggtgattgtctatgttgaggatattaatgatgaagccccagtgtttactcagcagcagtatagtagactgggactacgggagaccgccggtatcgggacctccgtgatcgtagtacaggcaacggacagagattccggcgatggaggactcgttaactaccgaatcctgtcaggcgcagagggcaaatttgaaatcgatgagtctactggcctgatcattacagtgaattacctggattacgagacaaaaacgtcatatatgatgaacgtttctgcaaccgaccaggctccaccattcaatcaaggattctgcagcgtctacatcaccctcctgaacgaactggatgaggccgttcaattctctaatgctagctatgaggcagcgatactggagaatctggctctcggaacagaaattgttcgagtgcaggcctacagtattgacaacctgaaccagattacctatagattcaacgcctatacctcaacacaggcgaaagccttgttcaagattgacgctatcacaggggtaataactgtgcaaggcctggtagacagggagaaaggagacttctatactcttaccgtggtcgccgatgatggcggtccaaaagtcgatagcaccgtcgtttatataaccgtgcttgacgaaaatgataactccccaagattcgatttcacttctgattctgccgttagtatcccggaagattgtcccgtgggccagagggtggcaaccgtgaaagcgtgggaccccgacgccggtagcaatggccaggtagtgttctccttagctagtggtaatatcgcaggcgcttttgaaatcgttaccaccaacgactcaatcggggaagtattcgtagctcggccattggacagagaggagctggaccattacattttacaggtcgttgcatcagatagaggaacaccaccacgaaaaaaagatcatatcttgcaggtaactattttagacatcaatgataatccgccagtgattgaaagcccatttggatacaacgtaagcgtcaacgagaacgtcggtggcggtaccgccgtggtgcaggtccgggctacggacagggatattggcattaattctgtcttatcatactatattaccgagggaaacaaggacatggcgttcaggatggatcggatttccggagagatagctactcgaccggcaccacccgatagggagcgtcagtcattttaccacttggttgccactgttgaggatgagggcacgccaacactgtcggtgtcagatgggggaggccatagagaggagcgcgtggggcagggttcctccgcgtccgaatag

SEQ ID NO: 336040 - DNA, 1649 bp, Artificial Sequence
  derived and/or modified sequence
acaggaagtgtgcccctctctcaggcagctgctaacacctgtcttccttcaactcccacagacaacggccctgtagggaagcgacacacgggcacagccaccgtgttcgtcactgtcctggatgtgaatgacaaccggcccatctttctgcagagcagctatgaggccagcgtccctgaggacatccctgaaggccacagcatcttgcagctgaaagccacggacgcagatgagggcgagtttgggcgtgtgtggtaccgcatcctccatggtgattgtgtacgtggaggacatcaacgatgaggcccccgtgttcacacagcagcagtacagccgtctggggcttcgagagaccgcaggcattggaacgtcagtcatcgtggtccaagccacagaccgagactctggggatggtggcctggtgaactaccgcatcctgtcgggcgcagaggggaagtttgagattgacgagagcacagggcttatcatcaccgtgaattacctggactacgagaccaagaccagctacatgatgaatgtgtcggccactgaccaggccccgcccttcaaccagggcttctgcagcgtctacatcactctgctcaacgagctggacgaggccgtgcagttctccaatgcctcatacgaggctgccatcctggagaatctggcactgggtactgagattgtgcgggtccaggcctactccatcgacaacctcaaccaaatcacgtaccgcttcaacgcctacaccagcacccaggccaaagccctcttcaagatagacgccatcacgggtgtgatcacagtccagggcctggtggaccgtgagaagggcgacttctataccttgacagtggtggcagatgacggcggccccaaggtggactccaccgtggtctacatcactgtgctggacgagaatgacaacagcccccggtttgacttcacctccgactcggcggtcagcatacccgaggactgccctgtgggccagcgagtggctactgtcaaggcctgggaccctgatgctggcagcaatgggcaggtggtcttctccctggcctctggcaacatcgcgggggcctttgagatcgtcaccaccaatgactccattggcgaagtgtttgtggccaggcccctggacagagaagagctggatcactacatcctccaggttgtggcttctgaccgaggcacccctccacggaagaaggaccacatcctgcaggtgaccatcctggacatcaatgacaaccctccagtcatcgagagcccctttggatacaatgtcagtgtgaatgagaacgtgggtggaggtactgctgtggtccaggtgagagccactgaccgtgacatcgggatcaacagtgttctgtcctactacatcaccgagggcaacaaggacatggccttccgcatggaccgcatcagcggtgagatcgccacacggcctgccccgcctgaccgcgagcgccagagcttctaccacctggtggccactgtggaggacgagggcaccccaaccctgtcggtgagcgatgggggtggccacagggaggagcgggtgggccagggcagctccgcctccgagtgaggggaacaagatgggtgagaatggaattccacacagcaggcgaatccttgac

SEQ ID NO: 336041 - DNA, 1368 bp, Artificial Sequence
  derived and/or modified sequence
atgagagccagcctgggcgtgtgcggcaccgccagcagcatggtgatcgtgtacgtggaggacatcaacgacgaggcccccgtgttcacccagcagcagtacagcagactgggcctgagagagaccgccggcatcggcaccagcgtgatcgtggtgcaggccaccgacagagacagcggcgacggcggcctggtgaactacagaatcctgagcggcgccgagggcaagttcgagatcgacgagagcaccggcctgatcatcaccgtgaactacctggactacgagaccaagaccagctacatgatgaacgtgagcgccaccgaccaggccccccccttcaaccagggcttctgcagcgtgtacatcaccctgctgaacgagctggacgaggccgtgcagttcagcaacgccagctacgaggccgccatcctggagaacctggccctgggcaccgagatcgtgagagtgcaggcctacagcatcgacaacctgaaccagatcacctacagattcaacgcctacaccagcacccaggccaaggccctgttcaagatcgacgccatcaccggcgtgatcaccgtgcagggcctggtggacagagagaagggcgacttctacaccctgaccgtggtggccgacgacggcggccccaaggtggacagcaccgtggtgtacatcaccgtgctggacgagaacgacaacagccccagattcgacttcaccagcgacagcgccgtgagcatccccgaggactgccccgtgggccagagagtggccaccgtgaaggcctgggaccccgacgccggcagcaacggccaggtggtgttcagcctggccagcggcaacatcgccggcgccttcgagatcgtgaccaccaacgacagcatcggcgaggtgttcgtggccagacccctggacagagaggagctggaccactacatcctgcaggtggtggccagcgacagaggcaccccccccagaaagaaggaccacatcctgcaggtgaccatcctggacatcaacgacaacccccccgtgatcgagagccccttcggctacaacgtgagcgtgaacgagaacgtgggcggcggcaccgccgtggtgcaggtgagagccaccgacagagacatcggcatcaacagcgtgctgagctactacatcaccgagggcaacaaggacatggccttcagaatggacagaatcagcggcgagatcgccaccagacccgccccccccgacagagagagacagagcttctaccacctggtggccaccgtggaggacgagggcacccccaccctgagcgtgagcgacggcggcggccacagagaggagagagtgggccagggcagcagcgccagcgagtag

SEQ ID NO: 336042 - DNA, 3195 bp, Artificial Sequence
  derived and/or modified sequence
atgggcagacacgtcgcgactagctgtcacgtggcttggttacttgtcctgatcagcggttgctgggggcaggtgaacagattgccgttctttactaatcacttcttcgatacctatctgctgatatccgaagacacccctgtgggatcctctgttacgcagttgctggcccaagatatggataacgaccctctggtatttggcgtgagtggagaggaagcctcccgcttctttgccgtggagcccgatacaggagttgtctggcttcgtcagcctctagaccgcgagactaaaagtgagttcactgtcgagttctccgtgtcagaccaccagggcgtgatcaccaggaaagtgaatatccaagtgggtgacgtcaatgataacgccccaacctttcataaccagccatactctgtgagaatcccggaagtaggtgccaccggtaatactccggtggggacccctattttcattgtgaatgcaacagatccagaccttggcgcgggaggttctgtgttgtactcatttcagcctccttctcagttttttgcaatcgattccgctcggggaatagttaccgtgattagggaactggattatgaaactacccaggcatatcaactgactgtgaacgctaccgaccaggacaagacacggcctctctccactcttgcaaatctggcaattataattacagatgtacaagatatggacccgatcttcatcaatcttccttactcgaccaatatctacgagcactccccgcctgggacaacggttagaatcatcacggcaattgaccaggacaaaggtcggccacgtggcataggttacacaattgtgtcaggaaatacgaatagcatcttcgcgctggactatatcagcggcgtgctgaccctgaatggccttctggacagggaaaaccccctttactcccacggcttcatcctcacggttaaggggacagagctgaatgatgacagaactccctctgacgcgacagtgactaccacattcaatattttggtcatagatatcaacgacaacgcacctgaattcaactcttctgagtacagcgtggcaatcaccgagttagctcaagtgggatttgccctgcccttattcattcaggtagtcgacaaagatgaaggtctgaattcaatgttcgaagtctatctcgtaggcaacaactctcatcatttcatcatctcacctacttccgtccaaggtaaggccgacattagaattagggtcgctattccgctggattacgagacggttgaccggtacgattttgacttgttcgcgaatgagtcagtcccagaccacgtgggttacgctaaagtgaagatcacgttaatcaatgagaacgacaaccgcccaatttttagccagcccctgtacaacatttctctatacgagaacgtcactgtgggcacatcagtgttaacggtgcttgctacagataatgacgcggggactttcggcgaagtgtcctactttttcagtgacgatcctgaccgctttagcctcgataaggataccggcctgatcatgctgattgcaagactcgattacgagcttatccaacgcttcactctcacaattattgccagggacgggggaggtgaagagaccaccggtcgtgtgcggataaacgttctcgacgtcaatgacaacgttccaacattccagaaagacgcctatgtgggagctctgcgcgagaacgaaccttctgttacccaactggttcgcctcagagctacagacgaggatagccctccgaataaccagatcacatatagcattgtgtctgcatcagcatttggatcatattttgatatctccctctatgagggatacggggttatttcagtttcacggccgcttgactatgagcagatatcaaatggattgatctatttaaccgttatggctatggacgctggtaaccccccactgaatagtacggtacctgtgaccattgaggtttttgatgagaacgataacccaccaacgttttccaaacccgcctacttcgtatctgtggtagaaaacattatggccggcgctacggttctgtttctgaacgccacggatctggacagatccagggaatacggtcaggagtccataatctacagcctcgagggaagcacccagttcaggattaatgctcgatcaggcgaaataaccaccacttcattgttagacagggagacaaagtcagagtatatccttattgttcgagccgtcgatgggggggtgggacataaccagaagaccggtattgcaaccgtgaacatcactctgctggatatcaatgataaccacccgacatggaaagatgcgccatactatataaacctagtggaaatgacgcccccagactcagatgtgacgaccgttgtggcagtagatccggacctgggggagaacggaaccctggtgtactccatccagccccccaacaagttttactctctaaattcaactacaggcaaaatccggacgactcatgccatgctggaccgggagaatcccgaccctcacgaggccgagctgatgcgaaagatcgtggtttctgtaaccgattgcgggagaccgcctctgaaggccacatcaagcgccaccgtttttgttaaccttctagacttaaacgacaatgatcccaccttccaaaacctcccattcgtcgcggaggtattagagggcattcccgcaggggttagcatttatcaggtggttgcaatcgatctggacgaggggcttaacggtctggtgtcttacagaatgccggtgggaatgcctcggatggatttcctgattaatagcagttcaggagtcgttgtgacgaccacagaactggatagagagcggatcgcagagtaccagctcagggtcgttgccagcgatgcaggcacccctaccaagagcagtacctcgacccttaccatccacgtgcttgatgtgaatgatgaaacaccaacatttttccccgccgtgtacaacgtttctgtcagcgaggacgtcccacgggagtttagagtggtttggttaaactgcactgacaacgatgtgggcctcaacgccgaattgtcttatttcattacaggcgctgcgcccgcttccgcacacctgtgcaggccccctggcgcactccctcccccgctgcctgacggccagccggactag

SEQ ID NO: 336043 - DNA, 3195 bp, Artificial Sequence
  derived and/or modified sequence
atgggccgccacgtggccaccagctgccacgtggcctggctgctggtgctgatcagcggctgctggggccaggtgaaccggctgcccttcttcaccaaccacttctttgacacctacctgctgatcagcgaggacacccctgtgggcagctctgtgacccagctgctggcccaggacatggacaatgaccccctggtgtttggagtgtctggagaggaggccagccgcttctttgctgtggagccagacaccggggtggtgtggctgcggcagcccctggaccgggagaccaagtctgagttcaccgtggagttctctgtgtctgaccaccagggcgtcatcaccaggaaggtgaacatccaggtgggagatgtgaatgacaatgcccccaccttccacaaccagccctacagcgtgcgcatccctgaggtgggcgccactggaaacacccctgtgggcacccccatcttcatcgtgaatgccacagatcctgacctgggcgctgggggctctgtgctgtacagcttccagccccccagccagttctttgccattgattctgcccggggcatcgtgaccgtcatccgggagctggactatgagaccacccaggcctaccagctgactgtgaatgccacagaccaggacaagacccggcccctgagcaccctggccaacctggccatcatcatcacagatgtgcaggacatggaccccatcttcatcaacctgccctacagcaccaacatctatgagcacagccccccaggcaccaccgtgcgcatcatcacagccatcgaccaggacaagggccggccccggggcatcggctacaccatcgtgtctggcaacaccaacagcatctttgccctggactacatctctggagtgctgaccctgaatggcctgctggaccgggagaaccccctgtacagccacggcttcatcctgactgtgaagggcacagagctgaatgatgacaggacccccagtgatgccaccgtgaccaccaccttcaacatcctggtgattgacatcaatgacaatgcccctgagttcaacagcagcgagtacagcgtggccatcacagagctggcccaggtgggctttgccctgcccctcttcatccaggtggtggacaaggatgagggcctgaacagcatgtttgaggtgtacctggtgggcaacaacagccaccacttcatcatcagccccacctctgtgcagggcaaggctgacatccgcatccgggtggccatccccctggactatgagaccgtggacagatatgactttgacctgtttgccaatgaatctgtgcctgaccacgtgggctacgccaaggtgaagatcaccctcatcaatgaaaatgacaaccggcccatcttcagccagcccctgtacaacatcagcctgtatgaaaatgtgacagtgggcacctctgtgctgactgtgctggccacagacaatgatgctggcacctttggagaggtgtcctacttcttcagtgatgatcctgaccgcttcagcctggacaaggacaccggcctcatcatgctgattgcccggctggactatgagctgatccagcgcttcaccctgaccatcatcgccagagatggcggcggggaggagaccaccggccgggtgcgcatcaacgtgctggatgtgaatgacaacgtgcccaccttccagaaggatgcctacgtgggcgccctgagagaaaatgagcccagcgtgacccagctggtgcggctgcgggccacagatgaggacagcccccccaacaaccagatcacctacagcatcgtgtctgccagcgccttcggcagctactttgacatcagcctgtatgagggctatggagtcatctctgtgtcccggcccctggactatgagcagatcagcaatggcctcatctacctgactgtgatggccatggatgctggcaacccccccctgaacagcacagtgcctgtgaccatcgaggtgtttgatgaaaatgacaacccccccaccttcagcaagccagcctactttgtgtctgtggtggagaacatcatggccggggccaccgtgctcttcctgaatgccacagacctggacaggagccgggagtatggccaggagagcatcatctacagcctggagggcagcacccagttccgcatcaatgcccggagcggggagatcaccaccaccagcctgctggaccgggagaccaagtctgagtacatcctgattgtgcgggctgtggatggaggagtgggccacaaccagaagacaggcatcgccaccgtgaacatcaccctgctggacatcaatgacaaccaccccacctggaaggatgccccctactacatcaacctggtggagatgaccccaccagacagtgatgtgaccaccgtggtggccgtggaccctgacctgggggagaatggcaccctggtgtacagcatccagccccccaacaagttctacagcctgaacagcaccaccgggaagatccgcaccacccacgccatgctggaccgggagaacccagacccccatgaagctgagctgatgaggaagatcgtggtgtctgtgacagactgtggccggccccccctgaaggccaccagcagcgccaccgtgtttgtgaacctgctggacctgaatgacaatgaccccaccttccagaacctgccctttgtggccgaggtgctggagggcatcccagctggggtgtccatctaccaggtggtggccatcgacctggatgagggcctgaatggcctggtgtcctacaggatgcctgtgggcatgcccaggatggacttcctgatcaacagcagcagtggagtggtggtgaccaccacagagctggaccgggagagaattgctgagtaccagctgcgggtggtggccagtgatgctggcacccccaccaagagcagcaccagcaccctgaccatccacgtgctggatgtgaatgatgagacccccaccttcttccctgctgtgtacaacgtgtctgtgtctgaagatgtgccccgggagttccgggtggtgtggctgaactgcacagacaatgatgtgggcctgaatgctgagctgagctacttcatcaccggggccgccccagccagcgcccacctgtgccggcccccaggggccctgcccccacccctgcctgatggccagcctgactag

SEQ ID NO: 336044 - DNA, 3195 bp, Artificial Sequence
  derived and/or modified sequence
atgggccggcacgtggccaccagctgccacgtggcctggctgctggtgttgatatcagggtgttgggggcaggtcaataggttaccattcttcactaatcattttttcgatacctatcttctgattagtgaggacacacccgtaggttcgagtgtgacacaactgctggcccaggacatggataatgatccattggtgtttggagttagcggcgaggaggccagcagatttttcgcggtcgagccagacaccggagtcgtgtggcttcggcagcctctggatcgggagacaaaatcagaatttaccgtggaattcagtgtcagcgaccaccagggcgttatcaccagaaaggtgaacatccaggtgggtgacgtgaacgataacgcgcctacttttcacaaccagccgtactctgttagaatcccagaagtgggagccacaggaaacaccccggtcggtacaccaatctttatcgtgaatgctaccgatcccgatctaggagctggcggttcggtgctctacagctttcagccgcccagccaatttttcgcaattgatagcgcgagagggattgtaactgttatccgagaactggactatgagacaacccaggcctaccagcttaccgtcaatgccaccgatcaggataagacccgtcctctgagtaccctggcaaatctggccattatcatcaccgatgtgcaggatatggatccgatcttcattaacctgccatacagcacgaacatctacgaacactctcccccaggcactactgttcgaataatcacagccattgaccaggataagggcaggcctcgcggaatcgggtacacaatcgtatcggggaatacaaatagcattttcgctctggattatatctccggtgtgttaacgctgaatgggctactggatcgcgagaatcctctgtacagtcatggctttattctgacagtgaagggcaccgaattgaatgatgaccgcactccgtccgatgcgacagtgacaacaacctttaacattctggtgatagacattaacgataacgcccccgaatttaattctagtgagtattccgtggctatcactgaactggctcaggtcgggtttgcgctgcccctttttattcaggtagtagataaggacgaagggctaaattctatgtttgaggtctatctggtcggaaataatagtcaccactttatcatttcccctacgagtgtgcagggcaaggccgacattcgcatcagggtagccatccctcttgattacgaaaccgtggataggtacgacttcgacctcttcgccaatgagagcgtgccagaccacgtcggttacgccaaagtgaaaataaccttgatcaatgagaatgataacaggcctatcttctcacagcccttgtataacatttctctctacgagaatgtgaccgtgggtacctcggtcctgacggtgctggctacagacaacgacgctgggacattcggagaagtgtcttactttttcagcgacgacccggatagattctctttggataaggataccggactgatcatgctgattgctagactggactatgagctaattcagcgttttactctcacaattatcgctagagatggcggtggtgaggagacaaccggcagagtgagaattaacgtgcttgatgtgaacgataacgtgcctacatttcagaaggacgcttatgtgggagctctgagggagaacgagccctcagtcacccagctagtgagactgagagcgaccgatgaggattcgcctcccaacaatcagatcacatattcaatcgtgagcgccagtgcttttggatcgtactttgacatcagcctgtacgagggctatggagtgattagtgtttctcgccctctggattacgagcagattagcaacggactaatctacttgactgtgatggccatggacgccggaaacccaccactcaatagcaccgtgccggttacaatcgaggtctttgatgaaaacgacaatcctccaactttttccaagcccgcatatttcgtgtcggttgtcgaaaatatcatggcaggggcgaccgtgctatttttaaacgctacagacctggatcgctctcgggaatacggccaggaatctataatttatagccttgaaggatcaactcaatttaggattaacgcaaggagtggtgagattaccactacatccctgctggatagggaaactaagtccgagtatatactgattgtgagagcagttgacggtggggtaggccataatcaaaaaacaggaatcgccacggtaaacatcacgctgctagatatcaatgataaccatccaacttggaaggacgcgccttattacattaacctggtagaaatgactccaccagacagcgacgtaaccacagtggtcgcggttgatccagatcttggtgagaatgggacgctggtctattccatacagccccccaataagttctactcgctgaacagcacaaccgggaagatcaggactactcacgcaatgctcgaccgtgaaaaccccgatccacacgaggctgagctgatgcggaagatcgtggtgagcgttactgactgcggccgtcccccactgaaggccacaagttccgctaccgtttttgtaaatcttttggatctaaatgataacgatcctacatttcaaaacctgccctttgtcgcggaagtcctcgagggtattcccgccggtgtaagcatttaccaggtggttgctatcgacctggatgaaggtctcaacggactcgtctcttatagaatgccagtgggcatgcccaggatggatttcctaatcaactcatccagtggcgttgtcgtaactacaactgaactggatagagagagaatcgcggagtatcagttgagggtggtggcgagcgacgccggcacacctaccaagagctccacatctaccttgaccatacacgtgcttgatgtgaacgacgaaacaccgacattttttccggcagtctacaacgtgtccgtgtccgaagatgtgccccgggagtttagagtggtgtggctgaattgtaccgataacgacgtgggtctcaatgcggagctgagctacttcatcaccggcgccgcccccgcgtcagcccacctgtgtcgcccaccgggggcattgccccctcctctaccggacgggcagcccgattag

SEQ ID NO: 336045 - DNA, 3195 bp, Artificial Sequence
  derived and/or modified sequence
atgggacgtcacgtcgccacttcatgccacgtcgcctggctgttggtactgatcagtggctgttggggacaggtgaaccgtttgccattttttacaaaccactttttcgacacttatttactgatatccgaggacacgcctgtcggcagtagcgttacacagttacttgcccaggatatggacaacgaccccttagtttttggggtctccggcgaggaagcttcgcgcttttttgccgtagaaccagacaccggcgtggtatggttgcgccagcccttggaccgagagactaagagcgagttcaccgtggagttcagcgtgagtgaccatcagggagttatcacccgaaaagtgaacatccaggtcggggacgtgaacgacaatgcaccaaccttccataaccaaccttactctgtgcgaattcctgaagtgggcgcaactgggaacactcccgtgggcacccccatattcattgtcaacgctaccgaccctgacttaggagccggaggctctgtcctttacagtttccagccaccctcccagtttttcgccatcgattccgctcggggtatcgtgaccgtgatcagagaactggattacgaaacaacgcaggcctaccagctgacagtgaacgcaacagaccaagataaaacacgtcccctgtcaacactggctaacctcgccataatcataacagatgtgcaggatatggaccccatcttcatcaatctcccttacagcactaacatatacgagcacagtcctccaggcactacagtacgcatcatcactgctattgaccaggataaaggcagaccacgaggcatcggctatacaatcgtgtcagggaacaccaacagcattttcgcactcgactacataagcggagtgctgacattgaatgggctccttgatagagagaacccgctatattcacatgggttcatcttgaccgttaagggcacagagttgaacgacgatcgaacaccaagcgatgccacagtcacaacaacattcaacattctggtgatcgatatcaatgacaatgctccagaatttaacagcagtgagtattcagtagctataaccgaactcgcccaagtgggttttgctctccctctgtttattcaggtggtcgacaaggacgaggggctgaactcaatgttcgaagtatacttagtgggtaacaattcccaccactttatcattagtccgacttcggttcagggcaaagccgatatcaggatacgcgttgctatcccgttggactacgaaacagttgaccgctacgactttgacttatttgctaatgagagcgtgcctgaccacgtcggctacgcaaaggttaaaatcaccctgataaacgaaaacgataaccggcctattttctcgcagcctctctataacatttccctatacgaaaatgtcaccgtcggtacgtccgtgctcacagtgctcgcgacggataacgacgctggaaccttcggggaggtcagttactttttctccgatgatcctgacaggtttagtttagacaaagacacggggctcattatgttgattgccagactggattacgagttgatacagcgattcacactaacaattatagcaagggacgggggtggcgaggaaacaacagggcgtgttcggattaacgtcctcgacgtgaatgacaatgtccccactttccaaaaagatgcgtatgtaggcgcacttagggaaaacgagccttcggtcacccagcttgtgcggcttagggcgactgacgaggactctcctccaaataaccagatcacctactccattgtatctgcctcagccttcggcagttactttgatatctcactgtatgagggctatggcgtaatttctgtgtcccgacctttagattatgagcagatcagtaatgggctgatttacctcacagtcatggcgatggacgccggaaacccaccgttaaactccaccgttcctgtgaccatcgaggtttttgacgagaacgataaccccccaactttttctaagcccgcttacttcgttagcgtcgtagaaaatattatggcaggagccacagttctgttcctgaacgccaccgatttggaccgctctcgcgaatacggccaggagagcatcatttattccctagagggaagcacgcagtttcgcatcaacgcacgttccggcgagatcacgacgacgtctctcctggatcgcgaaacgaagtctgagtatattcttatcgtgagggctgtggatggaggggtgggacataaccagaaaacggggatcgctacagtaaacatcacactgctggatataaacgacaaccatccaacctggaaggatgccccatattatataaatctcgtcgagatgacacctccagacagcgacgtaactacagtggtggccgtcgaccccgacttgggcgagaacgggacgctggtttactcaatccagcctccaaacaaattctattcactgaactctaccacaggaaaaatacggacaacgcatgccatgctcgatagagaaaacccagatccgcatgaagccgaattgatgcgtaaaattgtggtgtctgtaacggactgcggccgacccccactgaaggccacgagcagcgctacggtattcgtgaatctcttagacttaaacgacaatgaccctacgttccaaaatcttccatttgtcgccgaggtgctggagggaatcccggcaggtgtgagtatataccaggtggtggccattgacttagatgaagggctgaatgggttggtcagctacaggatgccggtcggtatgccacgcatggacttcctcattaactcatcatcaggagttgtggtgaccacaactgagcttgaccgtgaacggatcgctgagtatcaactcagagtggtggcatctgacgctgggacccccactaaaagctcaacgtcaaccctcacaatccatgtgctggacgtgaatgacgaaactccgacattctttcccgctgtttataacgtctccgtgagtgaggatgtgccacgcgaatttcgggtagtgtggctaaattgtacagacaacgatgtcggactcaacgcagaactctcttatttcatcaccggcgctgcacccgctagcgcccacttatgtaggcccccaggtgcgctccccccacccctacccgatggacagcccgattag

SEQ ID NO: 336046 - DNA, 3963 bp, Artificial Sequence
  derived and/or modified sequence
gcggcggcggctcgggagagagggacgcgggctgcaggcgcgatgcttggctagaggacgcgtccgacggcggccggacgctgaggtggtcggggctagtcagcccggcctgggcatggagcgcggggtggcagagcctctggacgtttggggcgcgcccagtccgagcccccggcgcgcctgaagttgcgagcggcgagcggcgagcggcgagcggcccgcggagacccaggagctgccggcacgccgcggatgagccttcgcgccggcgggaagacgcggcggtggccagggccagagcaggcggcccgcgggggccgatccggcggagagcagagcccgaggcgaggcgaggcgcggcgccgctgcacacacgcacacggagccatggggcgccatgttgccaccagctgccacgtggcctggcttttggtgctgatctctggatgctggggccaggtgaaccggctgcccttcttcaccaaccacttctttgatacatacctgctgatcagcgaggacacgcctgtgggttcttctgtgacccagttgctggcccaagacatggacaatgaccccctggtgtttggcgtgtctggggaggaggcctctcgcttctttgcagtggagcctgacactggcgtggtgtggctccggcagccactggacagagagaccaagtcagagttcaccgtggagttctctgtcagcgaccaccagggggtgatcacacggaaggtgaacatccaggttggggatgtgaatgacaacgcgcccacatttcacaatcagccctacagcgtccgcatccctgaggtaggagccactgggaatacaccagtggggacgcccatcttcatcgtgaatgccacagaccccgacttgggggcagggggcagcgtcctctactccttccagcccccctcccaattcttcgccattgacagcgcccgcggtatcgtcacagtgatccgggagctggactacgagaccacacaggcctaccagctcacggtcaacgccacagatcaagacaagaccaggcctctgtccaccctggccaacttggccatcatcatcacagatgtccaggacatggaccccatcttcatcaacctgccttacagcaccaacatctacgagcattctcctccgggcacgacggtgcgcatcatcaccgccatagaccaggataaaggacgtccccggggcattggctacaccatcgtttcagggaataccaacagcatctttgccctggactacatcagcggagtgctgaccttgaatggcctgctggaccgggagaaccccctgtacagccatggcttcatcctgactgtgaagggcacggagctgaacgatgaccgcaccccatctgacgctacagtcaccacgaccttcaatatcctggttattgacatcaatgacaatgccccggagttcaacagctccgagtacagcgtggccatcactgagctggcacaggtcggctttgcccttccactcttcatccaggtggtggacaaggatgagggcctgaacagcatgtttgaggtgtacttggtggggaacaactcccaccacttcatcatctccccgacctccgtccaggggaaggcggacattcgtattcgggtggccatcccactggactacgagaccgtggaccgctacgactttgatctctttgccaatgagagtgtgcctgaccatgtgggctatgccaaggtgaagatcactctcatcaatgaaaatgacaaccggcccatcttcagccagccactgtacaacatcagcctgtacgagaacgtcaccgtggggacctctgtgctgacagtcctggcaactgacaatgatgcaggcacctttggggaagtcagctacttcttcagtgatgaccctgacaggttctcgctggacaaggacacgggactcatcatgctgattgccaggctggactatgagctcatccagcgcttcaccctgacgatcattgcccgggacgggggcggcgaggagaccacaggccgggtcaggatcaatgtgttggatgtcaacgacaacgtgcccaccttccagaaggatgcctacgtgggtgctctgcgggagaacgagccttctgtcacacagctggtgcggctccgggcaacagatgaagactcccctcccaacaaccagatcacctacagcattgtcagtgcatctgcctttggcagctacttcgacatcagcctgtacgagggctatggagtgatcagcgtcagtcgccccctggattatgaacagatatccaatgggctgatttatctgacggtcatggccatggatgctggcaacccccctctcaacagcaccgtccctgtcaccatcgaggtgtttgatgagaatgacaaccctcccaccttcagcaagcccgcctacttcgtctccgtggtggagaacatcatggcaggagccacggtgctgttcctgaatgccacagacctggaccgctcccgggagtacggccaggagtccatcatctactccttggaaggctccacccagtttcggatcaatgcccgctcaggggaaatcaccaccacgtctctgcttgaccgagagaccaagtctgaatacatcctcatcgttcgcgcagtggacgggggtgtgggccacaaccagaaaactggcatcgccaccgtaaacatcaccctcctggacatcaatgacaaccaccccacgtggaaggacgcaccctactacatcaacctggtggagatgacccctccagactctgatgtgaccacggtggtggctgttgacccagacctgggggagaatggcaccctggtgtacagcatccagccacccaacaagttctacagcctcaacagcaccacgggcaagatccgcaccacccacgccatgctggaccgggagaaccccgacccccatgaggccgagctgatgcgcaaaatcgtcgtctctgttactgactgtggcaggccccctctgaaagccaccagcagtgccacagtgtttgtgaacctcttggatctcaatgacaatgaccccacctttcagaacctgccttttgtggccgaggtgcttgaaggcatcccggcgggggtctccatctaccaagtggtggccatcgacctcgatgagggcctgaacggcctggtgtcctaccgcatgccggtgggcatgccccgcatggacttcctcatcaacagcagcagcggcgtggtggtcaccaccaccgagctggaccgcgagcgcatcgcggagtaccagctgcgggtggtggccagtgatgcaggcacgcccaccaagagctccaccagcacgctcaccatccatgtgctggatgtgaacgacgagacgcccaccttcttcccggccgtgtacaatgtgtctgtgtccgaggacgtgccacgcgagttccgggtggtctggctgaactgcacggacaacgacgtgggcctcaatgcagagctcagctacttcatcacaggtgctgccccggcctccgcccacctgtgcaggcctcctggggccctgcctccacccctcccagatggacagccagactaggtgggggcaggtgagggtggaaaagaggtcagggctctactgttgggctttagcctctggtggtgcctcccgaggatttgctcctggctcttcccaagggctttgcagctggatcactctggactggctccctggggacctcctgaacctgttggttgcagggacggggagcatctaccaaggttcattctagagggaggtaaggccccatgattcctagggaggagccctgagccccactccccgccccaagtctgggtgacagagcagtgacttggaggaatgtggcctcatccttccttggggacctgttgagaattcccacctgtttagaggcagatggttttgatctccctaaatgaaatggttttagctcaaaaa

SEQ ID NO: 336047 - DNA, 2684 bp, Artificial Sequence
  derived and/or modified sequence
gcggcggcggcggctcgggagagagggacgcgggctgcaggcgcgatgcttggctagaggacgcgtccgacggcggccggacgctgaggtggtcggggctagtcagcccggcctgggcatggagcgcggggtggcagagcctctggacgtttggggcgcgcccagtccgagcccccggcgcgcctgaagttgcgagcggcgagcggcgagcggcgagcggcccgcggagacccaggagctgccggcacgccgcggatgagccttcgcgccggcgggaagacgcggcggtggccagggccagagcaggcggcccgcgggggccgatccggcggagagcagagcccgaggcgaggcgaggcgcggcgccgctgcacacacgcacacggagccatggggcgccatgttgccaccagctgccacgtggcctggcttttggtgctgatctctggatgctggggccaggtgaaccggctgcccttcttcaccaaccacttctttgatacatacctgctgatcagcgaggacacgcctgtgggttcttctgtgacccagttgctggcccaagacatggacaatgaccccctggtgtttggcgtgtctggggaggaggcctctcgcttctttgcagtggagcctgacactggcgtggtgtggctccggcagccactggacagagagaccaagtcagagttcaccgtggagttctctgtcagcgaccaccagggggtgatcacacggaaggtgaacatccaggttggggatgtgaatgacaacgcgcccacatttcacaatcagccctacagcgtccgcatccctgagaatacaccagtggggacgcccatcttcatcgtgaatgccacagaccccgacttgggggcagggggcagcgtcctctactccttccagcccccctcccaattcttcgccattgacagcgcccgcggtatcgtcacagtgatccgggagctggactacgagaccacacaggcctaccagctcacggtcaacgccacagatcaagacaagaccaggcctctgtccaccctggccaacttggccatcatcatcacagatgtccaggacatggaccccatcttcatcaacctgccttacagcaccaacatctacgagcattctcctccgggcacgacggtgcgcatcatcaccgccatagaccaggataaaggacgtccccggggcattggctacaccatcgtttcagggaataccaacagcatctttgccctggactacatcagcggagtgctgaccttgaatggcctgctggaccgggagaaccccctgtacagccatggcttcatcctgactgtgaagggcacggagctgaacgatgaccgcaccccatctgacgctacagtcaccacgaccttcaatatcctggttattgacatcaatgacaatgccccggagttcaacagctccgagtacagcgtggccatcactgagctggcacaggtcggctttgcccttccactcttcatccaggtggtggacaaggatgagaatttgggcctgaacagcatgtttgaggtgtacttggtggggaacaactcccaccacttcatcatctccccgacctccgtccaggggaaggcggacattcgtattcgggtggccatcccactggactacgagaccgtggaccgctacgactttgatctctttgccaatgagagtgtgcctgaccatgtgggctatgccaaggtgaagatcactctcatcaatgaaaatgacaaccggcccatcttcagccagccactgtacaacatcagcctgtacgagaacgtcaccgtggggacctctgtgctgacagtcctggtgagtccccgcttcactgcagggccactgagctctccagggccgactgtggtgaggcacccagagggattttgtccaagggacctcagcaatcagggaaggaggcacccccaaatccctgagctgtgtttgttggtgtattaaataaagtttttggactcttcaggaaggggctcccttgacctaggttgcaatatggaaaaggagccaacctgaggggtgacgagactgagctgaggacactggttttctgcctttccccgagagagactcagtgagggtgggctgggagccctggaagccccctcaaatgggtgggaaggtgccagccatccttgagaagggcaaccctctccatgtgagcacaggcaccagagaggggcaggcgcctggagggtaccggggcacccccagctgcccatggctggacttgccctttgacaaggggccctcccagtgtcatttgtatctgtcagtactcttggttgcaagggacagaaacccttaagtagttcaagcaaaaaaggattggctcatgtaactcaaaagtataagtgatttcaggccgggctcggtggctcacgcctgtcatccaacaccttgagaaagccgaggtgggcggatcacttgaggtcgggagtttgagaccagcctggccaacatggcaaaaccccgtctctactaaaaatacaaaaattagccgggtgtggtggcacacgcctgtagtcccagctactagggaggctgaggcaggagaatcgcttgaacccaggaggcggaggttgcagtgagccgagattgtgtcactgccctccagcctgggcgacagagccagattctgtctc

SEQ ID NO: 336048 - DNA, 1983 bp, Artificial Sequence
  derived and/or modified sequence
gcggcggcggcggctcgggagagagggacgcgggctgcaggcgcgatgcttggctagaggacgcgtccgacggcggccggacgctgaggtggtcggggctagtcagcccggcctgggcatggagcgcggggtggcagagcctctggacgtttggggcgcgcccagtccgagcccccggcgcgcctgaagttgcgagcggcgagcggcgagcggcgagcggcccgcggagacccaggagctgccggcacgccgcggatgagccttcgcgccggcgggaagacgcggcggtggccagggccagagcaggcggcccgcgggggccgatccggcggagagcagagcccgaggcgaggcgaggcgcggcgccgctgcacacacgcacacggagccatggggcgccatgttgccaccagctgccacgtggcctggcttttggtgctgatctctggatgctggggccaggtgaaccggctgcccttcttcaccaaccacttctttgatacatacctgctgatcagcgaggacacgcctgtgggttcttctgtgacccagttgctggcccaagacatggacaatgaccccctggtgtttggcgtgtctggggaggaggcctctcgcttctttgcagtggagcctgacactggcgtggtgtggctccggcagccactggacagagagaccaagtcagagttcaccgtggagttctctgtcagcgaccaccagggggtgatcacacggaaggtgaacatccaggttggggatgtgaatgacaacgcgcccacatttcacaatcagccctacagcgtccgcatccctgagaatacaccagtggggacgcccatcttcatcgtgaatgccacagaccccgacttgggggcagggggcagcgtcctctactccttccagcccccctcccaattcttcgccattgacagcgcccgcggtatcgtcacagtgatccgggagctggactacgagaccacacaggcctaccagctcacggtcaacgccacagatcaagacaagaccaggcctctgtccaccctggccaacttggccatcatcatcacagatgtccaggacatggaccccatcttcatcaacctgccttacagcaccaacatctacgagcattctcctccgggcacgacggtgcgcatcatcaccgccatagaccaggataaaggacgtccccggggcattggctacaccatcgtttcagggaataccaacagcatctttgccctggactacatcagcggagtgctgaccttgaatggcctgctggaccgggagaaccccctgtacagccatggcttcatcctgactgtgaagggcacggagctgaacgatgaccgcaccccatctgacgctacagtcaccacgaccttcaatatcctggttattgacatcaatgacaatgccccggagttcaacagctccgagtacagcgtggccatcactgagctggcacaggtcggctttgcccttccactcttcatccaggtggtggacaaggatgagacatggggcctgaacagcatgtttgaggtgtacttggtggggaacaactcccaccacttcatcatctccccgacctccgtccaggggaaggcggacattcgtattcgggtggccatcccactggactacgagaccgtggaccgctacgactttgatctctttgccaatgagagtgtgcctgaccatgtgggctatgccaaggtgaagatcactctcatcaatgaaaatgacaaccggcccatcttcagccagccactgtacaacatcagcctgtacgagaacgtcaccgtggggacctctgtgctgacagtcctggtgagtccccgcttcactgcagggccactgagctctccagggccgactgtggtgaggcacccagagggattttgtccaagggacctcagcaatcagggaaggaggcacccccaaatccctgagctgtgtttgttggtgtattaa

SEQ ID NO: 336049 - DNA, 3195 bp, Artificial Sequence
  derived and/or modified sequence
atgggcagacacgtggccaccagctgccacgtggcctggctgctggtgctgatcagcggctgctggggccaggtgaacagactgcccttcttcaccaaccacttcttcgacacctacctgctgatcagcgaggacacccccgtgggcagcagcgtgacccagctgctggcccaggacatggacaacgaccccctggtgttcggcgtgagcggcgaggaggccagcagattcttcgccgtggagcccgacaccggcgtggtgtggctgagacagcccctggacagagagaccaagagcgagttcaccgtggagttcagcgtgagcgaccaccagggcgtgatcaccagaaaggtgaacatccaggtgggcgacgtgaacgacaacgcccccaccttccacaaccagccctacagcgtgagaatccccgaggtgggcgccaccggcaacacccccgtgggcacccccatcttcatcgtgaacgccaccgaccccgacctgggcgccggcggcagcgtgctgtacagcttccagccccccagccagttcttcgccatcgacagcgccagaggcatcgtgaccgtgatcagagagctggactacgagaccacccaggcctaccagctgaccgtgaacgccaccgaccaggacaagaccagacccctgagcaccctggccaacctggccatcatcatcaccgacgtgcaggacatggaccccatcttcatcaacctgccctacagcaccaacatctacgagcacagcccccccggcaccaccgtgagaatcatcaccgccatcgaccaggacaagggcagacccagaggcatcggctacaccatcgtgagcggcaacaccaacagcatcttcgccctggactacatcagcggcgtgctgaccctgaacggcctgctggacagagagaaccccctgtacagccacggcttcatcctgaccgtgaagggcaccgagctgaacgacgacagaacccccagcgacgccaccgtgaccaccaccttcaacatcctggtgatcgacatcaacgacaacgcccccgagttcaacagcagcgagtacagcgtggccatcaccgagctggcccaggtgggcttcgccctgcccctgttcatccaggtggtggacaaggacgagggcctgaacagcatgttcgaggtgtacctggtgggcaacaacagccaccacttcatcatcagccccaccagcgtgcagggcaaggccgacatcagaatcagagtggccatccccctggactacgagaccgtggacagatacgacttcgacctgttcgccaacgagagcgtgcccgaccacgtgggctacgccaaggtgaagatcaccctgatcaacgagaacgacaacagacccatcttcagccagcccctgtacaacatcagcctgtacgagaacgtgaccgtgggcaccagcgtgctgaccgtgctggccaccgacaacgacgccggcaccttcggcgaggtgagctacttcttcagcgacgaccccgacagattcagcctggacaaggacaccggcctgatcatgctgatcgccagactggactacgagctgatccagagattcaccctgaccatcatcgccagagacggcggcggcgaggagaccaccggcagagtgagaatcaacgtgctggacgtgaacgacaacgtgcccaccttccagaaggacgcctacgtgggcgccctgagagagaacgagcccagcgtgacccagctggtgagactgagagccaccgacgaggacagcccccccaacaaccagatcacctacagcatcgtgagcgccagcgccttcggcagctacttcgacatcagcctgtacgagggctacggcgtgatcagcgtgagcagacccctggactacgagcagatcagcaacggcctgatctacctgaccgtgatggccatggacgccggcaacccccccctgaacagcaccgtgcccgtgaccatcgaggtgttcgacgagaacgacaacccccccaccttcagcaagcccgcctacttcgtgagcgtggtggagaacatcatggccggcgccaccgtgctgttcctgaacgccaccgacctggacagaagcagagagtacggccaggagagcatcatctacagcctggagggcagcacccagttcagaatcaacgccagaagcggcgagatcaccaccaccagcctgctggacagagagaccaagagcgagtacatcctgatcgtgagagccgtggacggcggcgtgggccacaaccagaagaccggcatcgccaccgtgaacatcaccctgctggacatcaacgacaaccaccccacctggaaggacgccccctactacatcaacctggtggagatgaccccccccgacagcgacgtgaccaccgtggtggccgtggaccccgacctgggcgagaacggcaccctggtgtacagcatccagccccccaacaagttctacagcctgaacagcaccaccggcaagatcagaaccacccacgccatgctggacagagagaaccccgacccccacgaggccgagctgatgagaaagatcgtggtgagcgtgaccgactgcggcagaccccccctgaaggccaccagcagcgccaccgtgttcgtgaacctgctggacctgaacgacaacgaccccaccttccagaacctgcccttcgtggccgaggtgctggagggcatccccgccggcgtgagcatctaccaggtggtggccatcgacctggacgagggcctgaacggcctggtgagctacagaatgcccgtgggcatgcccagaatggacttcctgatcaacagcagcagcggcgtggtggtgaccaccaccgagctggacagagagagaatcgccgagtaccagctgagagtggtggccagcgacgccggcacccccaccaagagcagcaccagcaccctgaccatccacgtgctggacgtgaacgacgagacccccaccttcttccccgccgtgtacaacgtgagcgtgagcgaggacgtgcccagagagttcagagtggtgtggctgaactgcaccgacaacgacgtgggcctgaacgccgagctgagctacttcatcaccggcgccgcccccgccagcgcccacctgtgcagaccccccggcgccctgcccccccccctgcccgacggccagcccgactag

SEQ ID NO: 336050 - DNA, 417 bp, Artificial Sequence
  derived and/or modified sequence
atgaaactccccatttttatcgctgacgccttcactgctagggctttccgcgggaaccccgccgccgtgtgcctactggaaaatgagctggatgaggacatgcatcagaaaattgcgcgcgagatgaatctaagcgaaacagcttttattcgaaagctccatcccaccgataattttgctcaaaagaatatgaatagtactctcacctttgtgacgctgtccggcgagcttcgggcgcgccgagcggaggacgggattgtccttgacctgcccttatacccggcccacccccaggattttcatgaagtcgaggacctgattaagacagcaatcgggaacacactggtgcaggacatttgctactctcccgatacccagaaactcctggtgaggttgagcgatgtgtacaaccgctag

SEQ ID NO: 336051 - DNA, 417 bp, Artificial Sequence
  derived and/or modified sequence
atgaagctgcccatcttcatcgcagatgccttcaccgcccgggccttccggggcaacccagctgctgtgtgcctgctggagaatgagctggatgaggacatgcaccagaagatcgcccgggagatgaacctgtctgaaacagccttcatcaggaagctgcaccccacagacaactttgcccagaagaacatgaacagcaccctgacctttgtgaccctgagcggggagctgcgggcccggcgggcagaagatggcatcgtgctggacctgcccctgtacccagcccacccccaggacttccacgaggtggaggacctgatcaagacagccatcggcaacaccctggtgcaggacatctgctacagcccagacacccagaagctgctggtgcggctgagtgatgtgtacaacagatag

SEQ ID NO: 336052 - DNA, 417 bp, Artificial Sequence
  derived and/or modified sequence
atgaagctgcccatcttcatcgccgacgccttcaccgcccgggccttcaggggcaacccagccgcagtctgcctcctcgagaacgagctggacgaggacatgcaccagaagatcgctcgggaaatgaatttgtccgaaacagctttcatccgcaagctccatcctaccgataatttcgcccaaaaaaacatgaactctacacttaccttcgtgactctcagtggtgaattgagggctaggcgcgcagaggacggtatcgttctggacctgcccttgtaccctgcccacccacaggatttccatgaggtggaagacctcattaagaccgccattgggaacacattggtgcaagatatctgctacagcccggatacccagaaattgctcgttcgcctttctgacgtctacaacagatag

SEQ ID NO: 336053 - DNA, 2352 bp, Artificial Sequence
  derived and/or modified sequence
attttgagaacttgcaaaaacagcttgcaaggaaaatgaagcttcctattttcatagcagatgcattcacagcaagagcatttcgtgggaatcctgctgctgtttgcctcctagaaaatgaattggatgaagacatgcatcagaaaattgcaagggagatgaacctctctgaaactgcttttatccgaaaactgcacccgacagacaactttgcacaaaaaaacatgaatagcacgctcacgtttgtcactctgagtggagaactaagggccagacgagcagaggatggcatcgtcctggacttgcctctttatccagcccacccccaggacttccatgaagtagaggacttgataaagactgccataggcaacacactggtccaggacatctgttattctccagatacccaaaagctcctcgtccgcctcagtgacgtttacaacaggtaagatttttggctgcatcagcactttggggagggctgagtacccagatttatagctcttccttagtctggctgtgctgtgtccagtcaaaccatgatttacgcagccagagtgtttctttccctgataggaagacattcccacttgttcttccttcccctcctgttaagctctttgagcaagctgcaccctggcctgcttcacagagtctgtgtggtgagtgggctgtgaaatgggtttgtcctaatccatcttgtttatgaacaaggtcgtttctggagaacctgaaagtgaacacggagaatctgctgcaagttgaaaacacagggaaggtgaaagggcttattcttacccttaaaggagagcctggtgggcagacccaagcatttgacttttactcaagatattttgcaccgtgggttggtgtggctgaagacccagtgacaggtactttttacttgagcccaggggagggttaaacaatggaagaggaggatcacaaatagttatttaagtgcacttcctgtgacctttcaggtggcttgagttttgagctgccttgttcctctatctttccccatccctgccatcccttcactgaagtcttccatgaaaaacataaaatagagcaggtggataacagggttaaacctgagtgtcagacagcctgggtttacattcctagcttcctagcttttgaccttgggcaagtgacttgacttttaaaagtctcagttccctcctctataaattgtatataatacctcatagggctataaaagcacaatgcatgttaagggcttaatacagtgcctggcacctagtaagtgcccaataactactagctattatattgtattattatatctttttgagacatagtctcacttcatcacccaggctagaacggagtggcatgatcccggctcactgcaacctcagcctcccaggttcaagtgattctcctgccttggcctccccagtagctggaactacaggcgtctgccactacacccggctaatttttgtatttttactagagataggatttcatcatgttggccaggatggtcccaaactcctgacctcaaatgatccctcctcggcctcccaaagtgctgggattacaggcatgagccactgcgcctagctaactactagctattttaataataacaacaaaactagctccttgagccaacacttctagattgtccaccacctgggagcagagggatgagtcaaaggtgggcagaaatgtcatgactcctactctccctctctttgggaacagtgggctgcactgcaaaggacgagaatgcttgatgtgggaggatggtgggtgggatggtgaaggggccacaggaggctgggcagacccttcagggctcctgttctggtcagatggcagggcctggatggctcagttactctctgagtaacaaaacacgtgaaattcaaaactcagcaaacaagcacttttaagactcaggaaaatgcccaaccatatccagagtgcagcttccccatggaagaaaagttccaagcagattgcacaagcacagctgcttcacaaagattttaattggcacagagtgcaagtttgtttgtttgtttgtttgtttgtttttccccgtaatgcttttctagagtataaaggcctttggactttgataaccaacatctgagtttgcttgggactgaagggtttctcagggctcagaactttcagtgctaaaaccagaacagtctcaggcaaaccaggcaggatggttggttgccttacttgaacatcccataacacttttttttttttttttttgcccaggctggagtgcaatggcacgttctcagctccctgcaacctctatctcccaagttcaagagattctcctgcctcagc

SEQ ID NO: 336054 - DNA, 417 bp, Artificial Sequence
  derived and/or modified sequence
atgaagctacctatcttcatcgccgatgctttcacagcacgcgcatttcgcggaaaccccgcagccgtgtgtcttctcgagaatgagctcgatgaggacatgcaccagaaaattgccagggaaatgaacctgtccgagaccgcattcattcggaagttacatccgactgacaattttgctcagaagaacatgaactcaacactcaccttcgttactttgagcggagagctccgggctcgtagagctgaggacggaatagtcctcgacttacccctgtatccagcacatcctcaggacttccacgaagtcgaagacctcattaagactgcaataggaaacaccttagttcaggatatttgttacagccccgacacccagaagctgttggtcagattgtcagatgtctataatcggtag

SEQ ID NO: 336055 - DNA, 417 bp, Artificial Sequence
  derived and/or modified sequence
atgaagctgcccatcttcatcgccgacgccttcaccgccagagccttcagaggcaaccccgccgccgtgtgcctgctggagaacgagctggacgaggacatgcaccagaagatcgccagagagatgaacctgagcgagaccgccttcatcagaaagctgcaccccaccgacaacttcgcccagaagaacatgaacagcaccctgaccttcgtgaccctgagcggcgagctgagagccagaagagccgaggacggcatcgtgctggacctgcccctgtaccccgcccacccccaggacttccacgaggtggaggacctgatcaagaccgccatcggcaacaccctggtgcaggacatctgctacagccccgacacccagaagctgctggtgagactgagcgacgtgtacaacagatag

SEQ ID NO: 336056 - protein, 932 aa, Artificial Sequence
  derived and/or modified sequence
MAAAAAVEAAAPMGALWGLVHDFVVGQQEGPADQVAADVKSGNYTVLQVVEALGSSLENPEPRTRARAIQLLSQVLLHCHTLLLEKEVVHLILFYENRLKDHHLVIPSVLQGLKALSLCVALPPGLAVSVLKAIFQEVHVQSLPQVDRHTVYNIITNFMRTREEELKSLGADFTFGFIQVMDGEKDPRNLLVAFRIVHDLISRDYSLGPFVEELFEVTSCYFPIDFTPPPNDPHGIQREDLILSLRAVLASTPRFAEFLLPLLIEKVDSEVLSAKLDSLQTLNACCAVYGQKELKDFLPSLWASIRRESSQRRTILEMLLGFLKLQQKWSYEDKDQRPLNGFKDQLCSLVFMALTDPSTQLQLVGIRTLTVLGAQPDLLSYEDLELAVGHLYRLSFLKEDSQSCRVAALEASGTLAALYPVAFSSHLVPKLAEELRVGESNLTNGDEPTQCSRHLCCLQALSAVSTHPSIVKETLPLLLQHLWQVNRGNMVAQSSDVIAVCQSLRQMAEKCQQDPESCWYFHQTAIPCLLALAVQASMPEKEPSVLRKVLLEDEVLAAMVSVIGTATTHLSPELAAQSVTHIVPLFLDGNVSFLPENSFPSRFQPFQDGSSGQRRLIALLMAFVCSLPRNVEIPQLNQLMRELLELSCCHSCPFSSTAAAKCFAGLLNKHPAGQQLDEFLQLAVDKVEAGLGSGPCRSQAFTLLLWVTKALVLRYHPLSSCLTARLMGLLSDPELGPAAADGFSLLMSDCTDVLTRAGHAEVRIMFRQRFFTDNVPALVQGFHAAPQDVKPNYLKGLSHVLNRLPKPVLLPELPTLLSLLLEALSCPDCVVQLSTLSCLQPLLLEAPQVMSLHVDTLVTKFLNLSSSPSMAVRIAALQCMHALTRLPTPVLLPYKPQVIRALAKPLDDKKRLVRKEAVSARGEWFLLGSPGS

SEQ ID NO: 336057 - DNA, 1092 bp, Artificial Sequence
  derived and/or modified sequence
atgctgctgggcttcctgaagctgcagcagaagtggagctacgaggacaaggaccagagacccctgaacggcttcaaggaccagctgtgcagcctggtgttcatggccctgaccgaccccagcacccagctgcagctggtgggcatcagaaccctgaccgtgctgggcgcccagcccgacctgctgagctacgaggacctggagctggccgtgggccacctgtacagactgagcttcctgaaggaggacagccagagctgcagagtggccgccctggaggccagcggcaccctggccgccctgtaccccgtggccttcagcagccacctggtgcccaagctggccgaggagctgagagtgggcgagagcaacctgaccaacggcgacgagcccacccagtgcagcagacacctgtgctgcctgcaggccctgagcgccgtgagcacccaccccagcatcgtgaaggagaccctgcccctgctgctgcagcacctgtggcaggtgaacagaggcaacatggtggcccagagcagcgacgtgatcgccgtgtgccagagcctgagacagatggccgagaagtgccagcaggaccccgagagctgctggtacttccaccagaccgccatcccctgcctgctggccctggccgtgcaggccagcatgcccgagaaggagcccagcgtgctgagaaaggtgctgctggaggacgaggtgctggccgccatggtgagcgtgatcggcaccgccaccacccacctgagccccgagctggccgcccagagcgtgacccacatcgtgcccctgttcctggacggcaacgtgagcttcctgcccgagaacagcttccccagcagattccagcccttccaggacggcagcagcggccagagaagactgatcgccctgctgatggccttcgtgtgcagcctgcccagaaacgtggagatcccccagctgaaccagctgatgagagagctgctggagctgagctgcaccgccgcccccttcctgccccccctgctgcccagcgccctgcaggacagcagcaccagcaccctgcagggcagcagctggatgaacagctacagctag

SEQ ID NO: 336058 - DNA, 1092 bp, Artificial Sequence
  derived and/or modified sequence
atgctgctgggttttctgaagctccagcagaaatggagttacgaggataaagaccagcgtcctctaaatggctttaaggatcagctgtgctccctggtcttcatggctttgacagatccgtccacacaactgcaacttgtgggtatacgcacattgaccgttttgggggcccagcccgacttgcttagttatgaagatctggagctggcagtgggccacctctatcggctctccttcttaaaagaggatagccagtcgtgtcgtgtcgcagccctagaggctagcggaaccctggctgccctgtatcctgtcgcgttctcgtcccatcttgtgccaaagctcgccgaagaactccgcgtcggggagagtaatcttacaaacggagatgagcctacccaatgtagcaggcacctttgctgtttgcaggctctatcagctgtgagcacacacccatccattgtgaaggaaaccctccctctgctgctacagcacctctggcaggtcaatagaggtaatatggtggcccagtctagcgacgtgattgccgtatgtcaaagcctgcgccagatggccgagaagtgccagcaggaccccgagagttgctggtacttccatcagactgctattccctgtctgctagctctagctgtgcaggcgtcgatgcctgaaaaggagccctctgtcctgaggaaagtgctgttggaggatgaggtcctggcggccatggtatcagtgatcggcaccgcaacgactcatctcagtcctgagttggctgcgcaatcggtaacccacatcgtgcctctgttcctggacggaaacgtgtctttcctgccagagaattcattcccgtcccgatttcagcctttccaagatgggtcatcaggtcaaagacggttgattgccctcctgatggctttcgtctgctccctcccaagaaacgtcgagatcccccagctcaaccagctcatgagggagctgcttgaattgagttgtactgctgcaccgttccttcccccgctcctgccatccgctctacaggattcgtctacttcaactcttcaaggttcatcgtggatgaatagttacagctag

SEQ ID NO: 336059 - DNA, 1092 bp, Artificial Sequence
  derived and/or modified sequence
atgctgctgggcttcctgaagctgcagcagaagtggagctatgaggacaaggaccagaggcccctgaatggcttcaaggaccagctgtgcagcctggtgttcatggccctgacagaccccagcacccagctgcagctggtgggcatccgcaccctgactgtgctgggcgcccagcctgacctgctgtcctatgaggacctggagctggccgtgggccacctgtaccgcctgtccttcctgaaggaggacagccagagctgccgggtggccgccctggaggccagcggcaccctggccgccctgtaccctgtggccttcagcagccacctggtgcccaagctggccgaggagctgcgggtgggggagagcaacctgaccaatggagatgagcccacccagtgcagccgccacctgtgctgcctgcaggccctgtctgctgtgtccacccaccccagcatcgtgaaggagaccctgcccctgctgctgcagcacctgtggcaggtgaacagaggcaacatggtggcccagagcagtgatgtgattgctgtgtgccagagcctgcggcagatggccgagaagtgccagcaggaccctgagagctgctggtacttccaccagacagccatcccctgcctgctggccctggccgtgcaggcctccatgcctgagaaggagcccagcgtgctgaggaaggtgctgctggaggatgaggtgctggccgccatggtgtctgtcatcggcacagccaccacccacctgagccctgagctggccgcccagagcgtgacccacatcgtgcccctcttcctggatggaaatgtgtccttcctgcctgaaaattccttccccagccgcttccagcccttccaggacggcagcagcggccagaggaggctcatcgccctgctgatggcctttgtgtgcagcctgcccagaaatgtggagatcccccagctgaaccagctgatgagggagctgctggagctgagctgcacagctgcccccttcctgccccccctgctgcccagcgccctgcaggacagcagcaccagcaccctgcagggcagctcctggatgaacagctacagctag

SEQ ID NO: 336060 - DNA, 1092 bp, Artificial Sequence
  derived and/or modified sequence
atgctgctgggcttcctgaagctgcagcagaagtggagctacgaggacaaggatcagcgccctctcaatgggtttaaggaccagttgtgttctctcgtgtttatggcactgactgacccaagcacccagttgcagctcgtaggcattcggacccttacagtcctcggcgcgcagcctgacctgctatcatacgaggacctggaactggctgtgggccatctgtatcggctctcatttttgaaggaagatagccagagctgtagggtggccgccttagaggcttctggcactctggctgccctttatcctgtggcattctcgagccatctggtgcccaagctcgcggaggagctgcgtgtgggtgaatctaacctgactaatggcgatgaaccaacgcagtgtagtaggcatctgtgttgtctgcaggcactatcagcagttagcactcacccaagcattgtgaaagaaacactgcctctactgctgcaacacttatggcaggttaatcggggaaatatggtcgcacaaagtagcgatgtgatcgcggtgtgtcagtccctgagacagatggcggagaaatgtcagcaggaccctgagtcctgctggtatttccaccagaccgctatcccttgcctgctcgctctcgccgttcaagcttcaatgccagagaaagagccctctgtgctaaggaaggtcttgttagaggacgaggtactggcagcaatggtttcagtaattggcacagccactacacacctctcaccagagctggccgctcagtctgtgacacacattgtccctttgtttctggacgggaacgtgagctttttgccagaaaacagttttccttcaaggtttcagccttttcaagatggatcctccggacagagacgtttgattgcactcttaatggcctttgtctgctccctacccagaaatgtggaaattccccagttaaatcagctgatgagggagctcctggaactgtcttgcaccgccgcgccttttttaccacctctcctcccctccgccttgcaggactcttctacttccacactgcagggaagctcctggatgaatagctattcctag

SEQ ID NO: 336061 - DNA, 1092 bp, Artificial Sequence
  derived and/or modified sequence
atgctcctgggattcctcaagcttcagcaaaaatggtcatacgaggacaaagaccagagacctctcaatggattcaaggaccaattgtgtagcctcgtgtttatggcactcacagacccttccactcagctgcagttagtaggaatccgtacactcactgttttgggagcccagccagatctgctctcctacgaagacctggagctcgcagtggggcacttatatcgcttgagcttcctgaaggaagattcacagtcttgtcgggtcgccgctctcgaagcttccggcacactagctgccctctatccagtcgcatttagcagccatttagtccctaaactggctgaggaattgcgggtcggcgagagcaatctgaccaacggcgatgagccgacacagtgttctcgccacctgtgctgcttacaggcactgtcagccgtctccacccacccatcaatcgtcaaggagaccttacctctcctcctgcaacacctctggcaggtgaacagagggaacatggtggctcagagcagcgacgttattgctgtgtgccaatcgctaagacagatggcggaaaagtgtcagcaggaccccgagtcatgctggtatttccaccaaacagccattccctgtcttctggctctggctgtgcaggcaagcatgccagagaaggagccaagcgtgctccggaaggtcttgttggaggacgaagtgctggccgctatggtgtctgtgattgggactgcaacaacgcatctgtcccctgagttggctgcgcagtcagtgacccacatagtgcccctgtttctggacggaaacgtatccttcttgcctgaaaattccttcccgagccgatttcagcccttccaggatggatcctccgggcagcgccgactgatcgcattactgatggcctttgtatgtagcctgcctagaaatgtcgagatccctcagctaaatcagctgatgcgagaacttttggaacttagctgtaccgcagccccttttttgccaccactattgccatctgcactgcaagactccagtacttccacactgcagggatcttcatggatgaactcttatagttag

SEQ ID NO: 336062 - protein, 327 aa, Artificial Sequence [sequence omitted]

SEQ ID NO: 336063 - DNA, 1954 bp, Artificial Sequence
  derived and/or modified sequence
cccacacccaagtgagcggcctgctcactcctcagctgcaggagccagacgtgtggagtcccagcagaggccaacctgtgtctcttcatctccctgggaaaggtgcccccgaggtgaaagagatggcctggtggaaatcctggattgaacaggagggtgtcacagtgaagagcagctcccacttcaacccagaccctgatgcagagaccctctaccaagccatgaaggggatcgggaccaacgagcaggctatcatcgatgtgctcaccaagagaagcaacacgcagcggcagcagatcgccaagtccttcaaggctcagttcggcaaggacctcactgagaccttgaagtctgagctcagtggcaagtttgagaggctcattgtggcccttatgtacccgccatacagatacgaagccaaggagctgcatgacgccatgaagggcttaggaaccaaggagggtgtcatcattgagatcctggcctctcggaccaagaaccagctgcgggagataatgaaggcgtatgaggaagactatgggtccagcctggaggaggacatccaagcagacacaagtggctacctggagaggatcctggtgtgcctcctgcagggcagcagggatgatgtgagcagctttgtggacccaggactggccctccaagacgcacaggatctgtatgcggcaggcgagaagattcgtgggactgatgagatgaaattcatcaccatcctgtgcacgcgcagtgccactcacctgctgagagtgtttgaagagtatgagaaaattgccaacaagagcattgaggacagcatcaagagtgagacccatggctcactggaggaggccatgctcactgtggtgaaatgcacccaaaacctccacagctactttgcagagagactctactatgccatgaagggagcagggacgcgtgatgggaccctgataagaaacatcgtttcaaggagcgagattgacttaaatcttatcaaatgtcacttcaagaagatgtacggcaagaccctcagcagcatgatcatggaagacaccagcggcgactacaagaacgccctgctgagcctggtgggcagcgacccctgaggcacagaagaacaagagcaaagaccatgaagccagagtctccaggactcctcactcaacctcggccatggacgcaggttgggtgtgaggggggtcccagcctttcagtcttctatttccctatttccagtgctttccagccgggtttctgacccagagggtggaaccggcctggactcctcttcccaacttcctccaggtcatttcccagtgtgagcacaatgccaaccttagtgtttctccagccagacagatgcctcagcatgaagggcttggggacttgtggatcattccttcctccctgcaggagcttcccaagctggtcacagagtctcctgggcacaggttatacagaccccagccccattcccatctactgaaacagggtctccacaagaggggccagggaatatgggtttttaacaagcgtcttacaaaacacttctctatcatgcagccggagagctggctgggagcccttttgttttagaacacacatccttcagcagctgagaaacgaacacgaatccatcccaaccgagatgccattaacattcatctaaaaatgttaggctctaaatggacgaaaaattctctcgccatcttaataacaaaataaactacaaattcctgacccaaggacactgtgttataagaggcgtgggctcccctggtggctgaccaggtcagctgccctggccttgcacccctctgcatgcagcacagaagggtgtgaccatgccctcagcaccactcttgtccccactgaacggcaactgagactgggtacctggagattctgaagtgcctttgctgtggttttcaaaataataaagatttgtattcaa

SEQ ID NO: 336064 - DNA, 1171 bp, Artificial Sequence
  derived and/or modified sequence
aggagccagacgtgtggagtcccagcagaggccaacctgtgtctcttcatctccctgggaaaggtgcccccgaggtgaaagagatggcctggtggaaatcctggattgaacaggagggtgtcacagtgaagagcagctcccacttcaacccagaccctgatgcagagaccctctaccaagccatgaaggggatcgggaccaacgagcaggctatcatcgatgtgctcaccaagagaagcaacacgcagcggcagcagatcgccaagtccttcaaggctcagttcggcaaggacctcactgagaccttgaagtctgagctcagtggcaagtttgagaggctcattgtggcccttatgtacccgccatacagatacgaagccaaggagctgcatgacgccatgaagggcttaggaaccaaggagggtgtcatcattgagatcctggcctctcggaccaagaaccagctgcgggagataatgaaggcgtatgaggaagggcagcagggatgatgtgagcagctttgtggacccaggactggccctccaagacgcacaggatctgtatgcggcaggcgagaagattcgtgggactgatgagatgaaattcatcaccatcctgtgcacgcgcagtgccactcacctgctgagagtgtttgaagagtatgagaaaattgccaacaagagcattgaggacagcatcaagagtgagacccatggctcactggaggaggccatgctcactgtggtgaaatgcacccaaaacctccacagctactttgcagagagactctactatgccatgaagggagcagggacgcgtgatgggaccctgataagaaacatcgtttcaaggagcgagattgacttaaatcttatcaaatgtcacttcaagaagatgtacggcaagaccctcagcagcatgatcatggaagacaccagcggcgactacaagaacgccctgctgagcctggtgggcagcgacccctgaggcacagaagaacaagagcaaagaccatgaagccagagtctccaggactcctcactcaacctcggccatggacgcaggtcatttcccagtgtgagcacaatgccaaccttagtgtttctccagccagacagatgcctcagcatgaagggcttggggacttgtggatcattccttcctccctgca

SEQ ID NO: 336065 - DNA, 1954 bp, Artificial Sequence
  derived and/or modified sequence
cccacacccaagtgagcggcctgctcactcctcagctgcaggagccagacgtgtggagtcccagcagaggccaacctgtgtctcttcatctccctgggaaaggtgcccccgaggtgaaagagatggcctggtggaaatcctggattgaacaggagggtgtcacagtgaagagcagctcccacttcaacccagaccctgatgcagagaccctctacaaagccatgaaggggatcgggaccaacgagcaggctatcatcgatgtgctcaccaagagaagcaacacgcagcggcagcagatcgccaagtccttcaaggctcagttcggcaaggacctcactgagaccttgaagtctgagctcagtggcaagtttgagaggctcattgtggcccttatgtacccgccatacagatacgaagccaaggagctgcatgacgccatgaagggcttaggaaccaaggagggtgtcatcattgagatcctggcctctcggaccaagaaccagctgcgggagataatgaaggcgtatgaggaagactatgggtccagcctggaggaggacatccaagcagacacaagtggctacctggagaggatcctggtgtgcctcctgcagggcagcagggatgatgtgagcagctttgtggacccaggactggccctccaagacgcacaggatctgtatgcggcaggcgagaagattcgtgggactgatgagatgaaattcatcaccatcctgtgcacgcgcagtgccactcacctgctgagagtgtttgaagagtatgagaaaattgccaacaagagcattgaggacagcatcaagagtgagacccatggctcactggaggaggccatgctcactgtggtgaaatgcacccaaaacctccacagctactttgcagagagactctactatgccatgaagggagcagggacgcgtgatgggaccctgataagaaacatcgtttcaaggagcgagattgacttaaatcttatcaaatgtcacttcaagaagatgtacggcaagaccctcagcagcatgatcatggaagacaccagcggtgactacaagaacgccctgctgagcctggtgggcagcgacccctgaggcacagaagaacaagagcaaagaccatgaagccagagtctccaggactcctcactcaacctcggccatggacgcaggttgggtgtgaggggggtcccagcctttcggtcttctatttccctatttccagtgctttccagccgggtttctgacccagagggtggaaccggcctggactcctcttcccaacttcctccaggtcatttcccagtgtgagcacaatgccaaccttagtgtttctccagccagacagatgcctcagcatgaagggcttggggacttgtggatcattccttcctccctgcaggagcttcccaagctggtcacagagtctcctgggcacaggttatacagaccccagccccattcccatctactgaaacagggtctccacaagaggggccagggaatatgggtttttaacaagcgtcttacaaaacacttctctatcatgcagccggagagctggctgggagcccttttgttttagaacacacatccttcagcagctgagaaacgaacacgaatccatcccaaccgagatgccattaacattcatctaaaaatgttaggctctaaatggacgaaaaattctctcgccatcttaataacaaaataaactacaaattcctgacccaaggacactgtgttataagaggcgtgggctcccctggtggctgaccaggtcagctgccctggccttgcacccctctgcatgcagcacagaagggtgtgaccatgccctcagcaccactcttgtccccactgaacggcaactgagactgggtacctggagattctgaagtgcctttgctgtggttttcaaaataataaagatttgtattcaa

SEQ ID NO: 336066 - DNA, 1171 bp, Artificial Sequence
  derived and/or modified sequence
aggagccagacgtgtggagtcccagcagaggccaacctgtgtctcttcatctccctgggaaaggtgcccccgaggtgaaagagatggcctggtggaaatcctggattgaacaggagggtgtcacagtgaagagcagctcccacttcaacccagaccctgatgcagagaccctctacaaagccatgaaggggatcgggaccaacgagcaggctatcatcgatgtgctcaccaagagaagcaacacgcagcggcagcagatcgccaagtccttcaaggctcagttcggcaaggacctcactgagaccttgaagtctgagctcagtggcaagtttgagaggctcattgtggcccttatgtacccgccatacagatacgaagccaaggagctgcatgacgccatgaagggcttaggaaccaaggagggtgtcatcattgagatcctggcctctcggaccaagaaccagctgcgggagataatgaaggcgtatgaggaagggcagcagggatgatgtgagcagctttgtggacccaggactggccctccaagacgcacaggatctgtatgcggcaggcgagaagattcgtgggactgatgagatgaaattcatcaccatcctgtgcacgcgcagtgccactcacctgctgagagtgtttgaagagtatgagaaaattgccaacaagagcattgaggacagcatcaagagtgagacccatggctcactggaggaggccatgctcactgtggtgaaatgcacccaaaacctccacagctactttgcagagagactctactatgccatgaagggagcagggacgcgtgatgggaccctgataagaaacatcgtttcaaggagcgagattgacttaaatcttatcaaatgtcacttcaagaagatgtacggcaagaccctcagcagcatgatcatggaagacaccagcggtgactacaagaacgccctgctgagcctggtgggcagcgacccctgaggcacagaagaacaagagcaaagaccatgaagccagagtctccaggactcctcactcaacctcggccatggacgcaggtcatttcccagtgtgagcacaatgccaaccttagtgtttctccagccagacagatgcctcagcatgaagggcttggggacttgtggatcattccttcctccctgca

SEQ ID NO: 336067 - DNA, 1171 bp, Artificial Sequence
  derived and/or modified sequence
aggagccagacgtgtggagtcccagcagaggccaacctgtgtctcttcatctccgtgagaaaggtgcccccgaagtgaaagagatggcctggtggaaagcctggattgaacaggagggtgtcacagtgaagagcagctcccacttcaacccagaccctgatgcagagaccctctacaaagccatgaaggggatcgggaccaacgagcaggctatcatcgatgtgctcaccaagagaagcaacacgcagcggcagcagatcgccaagtccttcaaggctcagttcggcaaggacctcactgagaccttgaagtctgagctcagtggcaagtttgagaggctcattgtggcccttatgtacccgccatacagatacgaagccaaggagctgcatgacgccatgaagggcttaggaaccaaggagggtgtcatcattgagatcctggcctctcggaccaagaaccagctgcgggagataatgaaggcgtatgaggaagggcagcagggatgatgtgagcagctttgtggacccggcactggccctccaagacgcacaggatctgtatgcggcaggcgagaatattcgtgggactgatgagatgaaattcatcaccatcctgtgcacgcgcagtgccactcacctgctgagagtgtttgaagagtatgagaaaattgccaacaagagcattgaggacagcatcaagagtgagacccatggctcactggaggaggccatgctcactgtggtgaaatgcacccaaaacctccacagctactttgcagagagactctactatgccatgaagggagcagggacgcgtgatgggaccctgataagaaacatcgtttcaaggagcgagattgacttaaatcttatcaaatgtcacttcaagaagatgtacggcaagaccctcagcagcatgatcatggaagacaccagcggtgactacaagaacgccctgctgagcctggtgggcagcgacccctgaggcacagaagaacaagagcaaagaccatgaagccagagtctccaggactcctcactcaacctcggccatggacgcaggtcatttcccagtgtgagcacaatgccaaccttagtgtttctccagccagacagatgcctcagcatgaagggcttggggacttgtggatcattccttcctccctgca

SEQ ID NO: 336068 - DNA, 1954 bp, Artificial Sequence
  derived and/or modified sequence
cccacacccaagtgagcggcctgctcactcctcagctgcaggagccagacgtgtggagtcccagcagaggccaacctgtgtctcttcatctccgtgagaaaggtgcccccgaagtgaaagagatggcctggtggaaagcctggattgaacaggagggtgtcacagtgaagagcagctcccacttcaacccagaccctgatgcagagaccctctacaaagccatgaaggggatcgggaccaacgagcaggctatcatcgatgtgctcaccaagagaagcaacacgcagcggcagcagatcgccaagtccttcaaggctcagttcggcaaggacctcactgagaccttgaagtctgagctcagtggcaagtttgagaggctcattgtggcccttatgtacccgccatacagatacgaagccaaggagctgcatgacgccatgaagggcttaggaaccaaggagggtgtcatcattgagatcctggcctctcggaccaagaaccagctgcgggagataatgaaggcgtatgaggaagactatgggtccagcctggaggaggacatccaagcagacacaagtggctacctggagaggatcctggtgtgcctcctgcagggcagcagggatgatgtgagcagctttgtggacccggcactggccctccaagacgcacaggatctgtatgcggcaggcgagaatattcgtgggactgatgagatgaaattcatcaccatcctgtgcacgcgcagtgccactcacctgctgagagtgtttgaagagtatgagaaaattgccaacaagagcattgaggacagcatcaagagtgagacccatggctcactggaggaggccatgctcactgtggtgaaatgcacccaaaacctccacagctactttgcagagagactctactatgccatgaagggagcagggacgcgtgatgggaccctgataagaaacatcgtttcaaggagcgagattgacttaaatcttatcaaatgtcacttcaagaagatgtacggcaagaccctcagcagcatgatcatggaagacaccagcggtgactacaagaacgccctgctgagcctggtgggcagcgacccctgaggcacagaagaacaagagcaaagaccatgaagccagagtctccaggactcctcactcaacctcggccatggacgcaggttgggtgtgaggggggtcccagcctttcggtcttctatttccctatttccagtgctttccagccgggtttctgacccagagggtggaaccggcctggactcctcttcccaacttcctccaggtcatttcccagtgtgagcacaatgccaaccttagtgtttctccagccagacagatgcctcagcatgaagggcttggggacttgtggatcattccttcctccctgcaggagcttcccaagctggtcacagagtctcctgggcacaggttatacagaccccagccccattcccatctactgaaacagggtctccacaagaggggccagggaatatgggtttttaacaagcgtcttacaaaacacttctctatcatgcagccggagagctggctgggagcccttttgttttagaacacacatccttcagcagctgagaaacgaacacgaatccatcccaaccgagatgccattaacattcatctaaaaatgttaggctctaaatggacgaaaaattctctcgccatcttaataacaaaataaactacaaattcctgacccaaggacactgtgttataagaggcgtgggctcccctggtggctgaccaggtcagctgccctggccttgcacccctctgcatgcagcacagaagggtgtgaccatgccctcagcaccactcttgtccccactgaacggcaactgagactgggtacctggagattctgaagtgcctttgctgtggttttcaaaataataaagatttgtattcaa

SEQ ID NO: 336069 - protein, 141 aa, Artificial Sequence
  derived and/or modified sequence
MAWWKSWIEQEGVTVKSSSHFNPDPDAETLYQAMKGIGTNEQAIIDVLTKRSNTQRQQIAKSFKAQFGKDLTETLKSELSGKFERLIVALMYPPYRYEAKELHDAMKGLGTKEGVIIEILASRTKNQLREIMKAYEEGQQG

SEQ ID NO: 336070 - protein, 141 aa, Artificial Sequence
  derived and/or modified sequence
MAWWKSWIEQEGVTVKSSSHFNPDPDAETLYKAMKGIGTNEQAIIDVLTKRSNTQRQQIAKSFKAQFGKDLTETLKSELSGKFERLIVALMYPPYRYEAKELHDAMKGLGTKEGVIIEILASRTKNQLREIMKAYEEGQQG

SEQ ID NO: 336071 - DNA, 426 bp, Artificial Sequence
  derived and/or modified sequence
atggcctggtggaagagctggatcgagcaggagggcgtgaccgtgaagagcagcagccacttcaaccccgaccccgacgccgagaccctgtaccaggccatgaagggcatcggcaccaacgagcaggccatcatcgacgtgctgaccaagagaagcaacacccagagacagcagatcgccaagagcttcaaggcccagttcggcaaggacctgaccgagaccctgaagagcgagctgagcggcaagttcgagagactgatcgtggccctgatgtaccccccctacagatacgaggccaaggagctgcacgacgccatgaagggcctgggcaccaaggagggcgtgatcatcgagatcctggccagcagaaccaagaaccagctgagagagatcatgaaggcctacgaggagggccagcagggctag

SEQ ID NO: 336072 - DNA, 426 bp, Artificial Sequence
  derived and/or modified sequence
atggcctggtggaaggcctggatcgagcaggagggcgtgaccgtgaagagcagcagccacttcaaccccgaccccgacgccgagaccctgtacaaggccatgaagggcatcggcaccaacgagcaggccatcatcgacgtgctgaccaagagaagcaacacccagagacagcagatcgccaagagcttcaaggcccagttcggcaaggacctgaccgagaccctgaagagcgagctgagcggcaagttcgagagactgatcgtggccctgatgtaccccccctacagatacgaggccaaggagctgcacgacgccatgaagggcctgggcaccaaggagggcgtgatcatcgagatcctggccagcagaaccaagaaccagctgagagagatcatgaaggcctacgaggagggccagcagggctag

SEQ ID NO: 336073 - DNA, 426 bp, Artificial Sequence
  derived and/or modified sequence
atggcatggtggaagtcatggatagaacaggaaggcgttacggtgaaaagcagttcccattttaatcctgatcctgatgctgaaacgctctatcaggctatgaaaggaatcggcacaaacgagcaggcaatcatcgatgtcctaaccaagaggtctaacacccagagacaacagattgccaaaagttttaaggctcagttcggaaaggatctcactgaaacactgaagtccgaacttagcggaaagttcgagcggctaatcgtggctcttatgtacccaccgtaccgatatgaggccaaagagcttcacgatgctatgaaggggctgggtacaaaagagggagtaatcatagaaatcctggccagcagaactaagaaccagctacgtgagatcatgaaagcatacgaagaaggtcagcagggctag

SEQ ID NO: 336074 - DNA, 426 bp, Artificial Sequence
  derived and/or modified sequence
atggcctggtggaaggcctggattgagcaagaaggagtaaccgtcaagtcttcgtctcactttaaccctgaccccgatgcagagaccctatataaggccatgaaggggatcggcacaaacgagcaggcaataatcgacgtgcttaccaaacggagcaatacgcagagacagcagattgccaagagcttcaaggctcagtttggaaaagacttgactgaaacgttgaagagcgaactgtccggaaaatttgagcggctgattgttgcccttatgtatcccccttatcgatatgaagcaaaagaactgcacgatgcaatgaaaggcctcgggacaaaggagggtgttattatcgagatcttagcctccagaacgaagaatcagttgcgtgagatcatgaaagcttacgaagaaggccagcaggggtag

SEQ ID NO: 336075 - DNA, 426 bp, Artificial Sequence
  derived and/or modified sequence
atggcctggtggaagtcctggattgagcaggagggcgtgacagtgaagagcagcagccacttcaacccagaccctgatgctgagaccctgtaccaggccatgaagggcatcggcaccaatgagcaggccatcattgatgtgctgaccaagaggagcaacacccagaggcagcagatcgccaagagcttcaaggcccagtttgggaaggacctgacagagaccctgaagtctgagctgagcggcaagtttgagcggctgattgtggccctgatgtacccaccctaccgctatgaggccaaggagctgcatgatgccatgaagggcctgggcaccaaggagggcgtcatcatcgagatcctggccagcaggaccaagaaccagctgcgggagatcatgaaggcctatgaggagggccagcagggctag

SEQ ID NO: 336076 - DNA, 426 bp, Artificial Sequence
  derived and/or modified sequence
atggcctggtggaaggcctggattgagcaggagggcgtgacagtgaagagcagcagccacttcaacccagaccctgatgctgagaccctgtacaaggccatgaagggcatcggcaccaatgagcaggccatcattgatgtgctgaccaagaggagcaacacccagaggcagcagatcgccaagagcttcaaggcccagtttgggaaggacctgacagagaccctgaagtctgagctgagcggcaagtttgagcggctgattgtggccctgatgtacccaccctaccgctatgaggccaaggagctgcatgatgccatgaagggcctgggcaccaaggagggcgtcatcatcgagatcctggccagcaggaccaagaaccagctgcgggagatcatgaaggcctatgaggagggccagcagggctag

SEQ ID NO: 336077 - DNA, 426 bp, Artificial Sequence
  derived and/or modified sequence
atggcctggtggaagagctggatcgagcaggagggcgtgaccgtgaaatcctcatcccactttaacccagatccagacgccgaaaccctgtatcaagcaatgaaaggaatagggactaacgagcaagccatcatcgatgtcctgaccaaacggagtaacacacaacgccagcagattgccaaatccttcaaagctcagttcggcaaagacctcactgaaactttgaagtcggagctctctggtaagttcgaacgtttaattgttgcactgatgtatcccccctacagatatgaggcgaaagaactccatgatgcgatgaaaggtttaggcaccaaagagggggtgattattgagatactcgccagccggaccaaaaatcaactgcgcgaaataatgaaggcctacgaggaaggtcagcagggttag

SEQ ID NO: 336078 - DNA, 426 bp, Artificial Sequence
  derived and/or modified sequence
atggcctggtggaaggcctggatcgagcaggagggcgtgaccgtgaaaagttccagccactttaaccccgatccggatgccgaaacgctgtataaagccatgaagggaattggtactaacgagcaggctatcatagacgtgctcactaaaaggtcgaacacccaacgtcagcagattgctaaatccttcaaggcacagttcgggaaggatttgacggagacacttaaatctgagctctcggggaagttcgagagactgatagtggccctgatgtacccaccctacagatacgaggccaaagagctgcacgacgccatgaaggggctgggcacaaaggagggcgtcattattgaaattctggcctccagaaccaaaaaccaattgagggaaatcatgaaggcctatgaggagggccagcaaggctag

SEQ ID NO: 336079 - DNA, 426 bp, Artificial Sequence
  derived and/or modified sequence
atggcctggtggaagtcgtggatcgaacaggaaggcgtcactgtcaaaagtagttcccattttaaccctgatccagacgccgaaaccttataccaggcgatgaagggaataggaaccaacgagcaggctattattgacgtcctaaccaaaagatcaaacacacagcgacagcagattgctaagtcttttaaagcccagttcggcaaagacttgacagaaacactgaaaagcgagctgtccggtaagttcgaacggttaatcgttgccctgatgtatccaccatataggtatgaggcgaaagagctgcacgatgccatgaaaggcctggggaccaaggagggcgtgattatcgagattttagcctcaagaaccaagaatcagttgcgagaaattatgaaggcatacgaggagggtcagcagggttag

SEQ ID NO: 336080 - DNA, 426 bp, Artificial Sequence
  derived and/or modified sequence
atggcgtggtggaaagcatggattgagcaagagggcgtaacagtaaagtccagctcacactttaatcctgacccagacgcggaaaccctgtacaaagcaatgaagggcattgggacaaacgaacaagccatcatagacgtgctaacgaagaggagcaatacacagagacagcagatcgctaaaagtttcaaagcccagtttggtaaggatcttaccgagacattgaaaagtgagttgagtgggaagttcgaacggctcattgttgcactgatgtaccctccctacagatacgaagcaaaagaattacacgacgcgatgaagggactggggacgaaggaaggcgtcatcatcgaaatcctggcatcccggaccaaaaaccagttgcgcgagatcatgaaagcttacgaagaaggtcagcaggggtag

SEQ ID NO: 336081 - DNA, 426 bp, Artificial Sequence
  derived and/or modified sequence
atggcctggtggaaaagctggatcgaacaggaaggggtaactgtgaagtcttcctcccattttaaccccgaccctgacgctgagaccctgtacaaggccatgaaaggcattggaactaatgagcaggccataatcgacgtcctcacaaaaaggtcaaacacccagcgtcaacaaatagcaaaatccttcaaagcacagtttgggaaggatctgacagaaaccttaaaaagtgagctgtccgggaagtttgagcgtttaatcgtagccttaatgtaccccccgtacagatacgaagccaaggagctccacgacgctatgaaagggttagggaccaaggagggagtgatcatagagatcctggcatccagaaccaaaaaccaactcagggaaatcatgaaagcctatgaggaagggcagcagggctag

SEQ ID NO: 336082 - DNA, 426 bp, Artificial Sequence
  derived and/or modified sequence
atggcctggtggaagtcctggattgagcaggagggcgtgacagtgaagagcagcagccacttcaacccagaccctgatgctgagaccctgtacaaggccatgaagggcatcggcaccaatgagcaggccatcattgatgtgctgaccaagaggagcaacacccagaggcagcagatcgccaagagcttcaaggcccagtttgggaaggacctgacagagaccctgaagtctgagctgagcggcaagtttgagcggctgattgtggccctgatgtacccaccctaccgctatgaggccaaggagctgcatgatgccatgaagggcctgggcaccaaggagggcgtcatcatcgagatcctggccagcaggaccaagaaccagctgcgggagatcatgaaggcctatgaggagggccagcagggctag

SEQ ID NO: 336083 - DNA, 426 bp, Artificial Sequence
  derived and/or modified sequence
atggcctggtggaagagctggatcgagcaggagggcgtgaccgtgaaaagctcttcccatttcaatcccgatcctgacgcagagaccctgtacaaagcaatgaaaggaattgggaccaacgagcaagcgattattgatgtcctgactaagagatccaacactcaacgacagcaaatcgcaaagtcgtttaaggctcaattcggtaaggacctcacagagactcttaaaagcgagttaagcggaaaatttgaaaggctgatagtggctttgatgtacccaccctataggtatgaggctaaagagctgcacgacgccatgaaaggactcggtacgaaggagggcgtgatcatcgagatactggctagccggacaaagaaccagctgcgagaaatcatgaaggcgtatgaagaaggccagcagggctag

SEQ ID NO: 336084 - DNA, 426 bp, Artificial Sequence
  derived and/or modified sequence
atggcctggtggaaaagttggatcgaacaggaaggcgtcacagtaaagtcgagcagccactttaacccagatcccgatgccgaaaccttgtataaggccatgaagggcatcggcactaatgaacaggcaatcattgatgtcctgacgaagcgcagtaacacccagcggcagcagatcgcgaaatccttcaaagcccagtttggcaaggacttgaccgagacgctcaaatccgagctgagcgggaagtttgagcgtctgattgtcgccttgatgtatccaccctaccggtacgaagccaaagaacttcatgacgcgatgaaaggactgggaaccaaggagggcgttataatcgagatcctcgccagtaggaccaagaatcagctccgggagattatgaaagcttacgaggaggggcagcaggggtag

SEQ ID NO: 336085 - DNA, 426 bp, Artificial Sequence
  derived and/or modified sequence
atggcctggtggaagagctggatcgagcaggagggcgtgaccgtgaagagcagcagccacttcaaccccgaccccgacgccgagaccctgtacaaggccatgaagggcatcggcaccaacgagcaggccatcatcgacgtgctgaccaagagaagcaacacccagagacagcagatcgccaagagcttcaaggcccagttcggcaaggacctgaccgagaccctgaagagcgagctgagcggcaagttcgagagactgatcgtggccctgatgtaccccccctacagatacgaggccaaggagctgcacgacgccatgaagggcctgggcaccaaggagggcgtgatcatcgagatcctggccagcagaaccaagaaccagctgagagagatcatgaaggcctacgaggagggccagcagggctag

SEQ ID NO: 336086 - protein, 126 aa, Artificial Sequence
  derived and/or modified sequence
MDVFKKGFSIAKEGVVGAVEKTKQGVTEAAEKTKEGVMYVGAKTKENVVQSVTSGLPWGWGWGGGQPVSSHSGREDQGAGQRRERGCGEQRQHCGHQDRGGGGEHRGHLRGGAQGGLEAICPPTGG

SEQ ID NO: 336087 - DNA, 381 bp, Artificial Sequence
  derived and/or modified sequence
atggacgtgttcaagaagggcttcagcatcgccaaggagggcgtggtgggcgccgtggagaagaccaagcagggcgtgaccgaggccgccgagaagaccaaggagggcgtgatgtacgtgggcgccaagaccaaggagaacgtggtgcagagcgtgaccagcggcctgccctggggctggggctggggcggcggccagcccgtgagcagccacagcggcagagaggaccagggcgccggccagagaagagagagaggctgcggcgagcagagacagcactgcggccaccaggacagaggcggcggcggcgagcacagaggccacctgagaggcggcgcccagggcggcctggaggccatctgcccccccaccggcggctag

SEQ ID NO: 336088 - DNA, 381 bp, Artificial Sequence
  derived and/or modified sequence
atggatgtcttcaagaagggattcagcatagcaaaagaaggggtggtgggcgcagtggaaaagacaaaacagggggtaaccgaggccgccgagaaaacgaaagaaggggtgatgtacgtgggagcaaaaaccaaggagaatgtggttcaatctgtcacatctggcttaccctggggctggggctgggggggagggcagcctgtctcttctcattccggacgggaggatcagggagctgggcagcggcgtgaacggggctgtggagagcagagacagcactgcggtcaccaagacagagggggaggcggagagcataggggccacctgcgcggcggggcgcagggaggcttggaagctatttgtcctcccacggggggctag

SEQ ID NO: 336089 - DNA, 381 bp, Artificial Sequence
  derived and/or modified sequence
atggatgtgttcaagaagggcttcagcatcgccaaggagggcgtggtgggcgctgtggagaagaccaagcagggcgtgacagaagctgctgagaagaccaaggagggcgtgatgtatgtgggcgccaagaccaaggaaaatgtggtgcagagcgtgaccagcggcctgccctggggctggggctggggcggcggccagcctgtgagcagccacagcggccgggaggaccagggcgccggccagaggcgggagcggggctgtggggagcagaggcagcactgcggccaccaggaccggggcggcggcggggagcaccggggccacctgcggggcggggcccagggcggcctggaggccatctgcccccccaccggcggctag

SEQ ID NO: 336090 - DNA, 381 bp, Artificial Sequence
  derived and/or modified sequence
atggacgtgttcaagaagggcttcagcatcgccaaggagggcgtggtgggggcggtagaaaagactaagcagggtgttactgaggccgcagagaaaactaaagagggcgtgatgtacgtgggggccaagaccaaggagaatgttgtgcagtcagtgacctccggtttaccatggggatggggatggggtggagggcaacccgtatcttctcactcaggccgtgaggaccagggcgcagggcaacggcgggagcgcggatgcggcgagcaacgccaacattgtggacatcaggaccgggggggtggaggcgagcatcgcgggcatctgaggggaggcgcacagggaggattggaggccatttgtccacccacgggaggctag

SEQ ID NO: 336091 - DNA, 381 bp, Artificial Sequence
  derived and/or modified sequence
atggacgtgttcaagaagggcttcagtatcgcaaaagagggggtcgtgggagctgtagagaagacaaagcaaggcgtgacggaagcagcggaaaagaccaaggagggggtgatgtatgtaggggctaaaaccaaggaaaatgtcgtgcagtctgtgaccagtggactaccatggggttgggggtggggtggcggtcagccggtgtctagccacagtgggagggaggatcagggagcaggtcaaagaagagagagaggctgtggcgagcagcgtcagcactgtgggcaccaagatcggggtggcggaggtgagcacagaggacatctgaggggaggtgctcagggagggcttgaagctatctgtccacctaccggaggctag

SEQ ID NO: 336092 - DNA, 684 bp, Artificial Sequence
  derived and/or modified sequence
caagcccgcagctcgcagggagatccagctccgtcctgcctgcagcagcacaaccctgcacacccaccatggatgtcttcaagaagggcttctccatcgccaaggagggcgtggtgggtgcggtggaaaagaccaagcagggggtgacggaagcagctgagaagaccaaggagggggtcatgtatgtgggagccaagaccaaggagaatgttgtacagagcgtgacctcaggcctgccttggggctggggctggggtggaggccagccagtgtcctcccatagtggccgagaagaccaaggagcaggccaacgccgtgagcgaggctgtggtgagcagcgtcaacactgtggccaccaagaccgtggaggaggcggagaacatcgcggtcacctccggggtggtgcgcaaggaggacttgaggccatctgccccccaacaggagggtgaggcatccaaagagaaagaggaagtggcagaggaggcccagagtgggggagactagagggctacaggccagcgtggatgacctgaagagcgctcctctgccttggacaccatcccctcctagcacaaggagtgcccgccttgagtgacatgcggctgcccacgctcctgccctcgtctccctggccacccttggcctgtccacctgtgctgctgcaccaacctcactgccctccct

SEQ ID NO: 336093 - DNA, 792 bp, Artificial Sequence
  derived and/or modified sequence
atgagcttcagcagagccctgctgtgggccagactgcccgccggcagacaggccggccacagagccgccatctgcagcgccctgagaccccacttcggccccttccccggcgtgctgggccaggtgagcgtgctggccaccgccagcagcagcgccagcggcggcagcaagatccccaacaccagcctgttcgtgcccctgaccgtgaagccccagggccccagcgccgacggcgacgtgggcgccgagctgaccagacccctggacaagaacgaggtggccgtgatcgacgagatccagatgatcagagaccccgccagaggctgggcctggaccagagccctgctgggcctgtgcgccgaggaggtgcacctgtgcggcgagcccgccgccatcgacctggtgatggagctgatgtacaccaccggcgaggaggtggaggtgagagactacaagagactgacccccatcagcgtgctggaccacgccctggagagcctggacaacctgagacccggcgactgcatcgtgtgcttcagcaagaacgacatctacagcgtgagcagacagatcgagatcagaggcctggagagcgccgtgatctacggcagcctgccccccggcaccaagctggcccaggccaagaagttcaacgaccccaacgacccctgcaagatcctggtggccaccgacgccatcggcatgggcctgaacctgagcatcagaagaatcatcttctacagcctgatcaagcccagcatcaacgagaagggcgagagagagctggagtag

SEQ ID NO: 336094 - DNA, 792 bp, Artificial Sequence
  derived and/or modified sequence
atgagcttcagcagagcactcctttgggctaggcttcctgcaggccggcaggcaggccatcgagctgcgatttgctcggcattacggccccattttggcccattccctggagtgctggggcaagtgtcagtgttggctacagcatcctcaagcgcaagcggcggctctaagatccccaacacatccctctttgtacctctgacagttaagccacaagggccatccgctgacggagacgtcggcgcggaattaactagacccctcgataaaaatgaggtcgccgtgattgatgagatacaaatgattagggatcccgcacggggatgggcctggacaagggcccttctgggattgtgtgcagaagaagtgcatctctgcggcgaacctgccgccatcgacctggtgatggagcttatgtacacgacaggcgaagaggtggaagttcgagactacaagaggcttaccccaatttcagtgctggaccacgccttagagtcccttgataacttgaggccaggagactgcatcgtgtgtttctccaagaacgacatatactcagtgagtagacagattgaaattagaggacttgagtccgccgtgatttacggaagcctgccccccggaaccaaacttgcccaggccaagaaatttaatgacccgaacgatccctgcaagattctggtggccactgacgccatcggaatgggcctgaacctaagtataaggcggataatcttttatagtctgatcaagccctctattaacgagaagggcgagcgggagctcgagtag

SEQ ID NO: 336095 - DNA, 792 bp, Artificial Sequence
  derived and/or modified sequence
atgtccttcagccgggccctgctgtgggcccggctgcctgctggccggcaggccggccaccgggccgccatctgcagcgccctgcggccccacttcggccccttccctggggtgctgggccaggtgtctgtgctggccacagccagcagcagcgccagcggcggcagcaagatccccaacaccagcctgtttgtgcccctgactgtgaagccccagggccccagcgcagatggagatgtgggcgctgagctgacccggcccctggacaagaatgaggtggccgtgattgatgagatccagatgatccgggaccctgcccggggctgggcctggacccgggccctgctgggcctgtgtgccgaggaggtgcacctgtgtggggagcctgctgccatcgacctggtgatggagctgatgtacaccaccggggaggaggtggaggtgcgggactacaagaggctgacccccatctctgtgctggaccacgccctggagagcctggacaacctgcggcctggggactgcatcgtgtgcttcagcaagaatgacatctacagcgtgtcccggcagatcgagatccggggcctggagagcgctgtgatctacggcagcctgcccccaggcaccaagctggcccaggccaagaagttcaatgaccccaatgacccctgcaagatcctggtggccacagatgccatcggcatgggcctgaacctgagcatccgccgcatcatcttctacagcctcatcaagcccagcatcaatgaaaaaggagagcgggagctggagtag

SEQ ID NO: 336096 - DNA, 792 bp, Artificial Sequence
  derived and/or modified sequence
atgagcttcagccgggccctgctgtgggcccggctgcccgccggccgacaggccggccaccgggctgccatctgcagcgctctgcggccccattttggtcctttccccggggtgctcgggcaggtgagcgtccttgcaactgcttccagctcggcgtctggaggcagtaagatccccaatacatctctctttgtccccctcaccgtaaaaccacagggcccatcagctgacggagacgtgggcgccgagttaaccagacctctggacaaaaatgaagtcgcggttatagacgagatccagatgatccgtgatccggcacgcggctgggcctggaccagagctctgctcggactgtgtgctgaggaggttcatttatgtggagaaccagcagccatcgatctcgtgatggaactgatgtataccacaggtgaggaagtggaggtgcgggattacaagcgcctcaccccaattagtgttctggatcacgccctagaaagcctggacaacctccgccctggagattgtatagtgtgtttctcgaaaaatgatatctatagtgtgagtaggcagatcgagattagaggcttagaatcagccgtgatttatgggtctctgccccccggaaccaaacttgcgcaggctaaaaagttcaacgatccgaacgacccttgtaaaatcctggttgccaccgacgctatcgggatgggcctcaacctgagcattaggaggatcattttctactccttgataaagccttctattaatgaaaaaggggaaagagagctggaatag

SEQ ID NO: 336097 - DNA, 792 bp, Artificial Sequence
  derived and/or modified sequence
atgtcattctctcgggcactcctatgggcacgcctccccgcaggcagacaggccggacacagggcggcaatctgcagcgcgctgaggccacattttggccctttccccggagtgctgggccaagtcagcgtgctggcgactgcctcaagtagcgccagcggtggctccaagatcccaaatacatcgctgttcgtgcccctgactgttaaacctcaaggcccttctgccgacggcgacgttggcgcagaactcaccagacccctggacaaaaacgaagtggccgtgattgatgagattcagatgatccgcgatccagcgagaggctgggcatggacccgcgctctactgggcttgtgcgccgaggaggtgcatctgtgcggagagcctgcggctatcgatttggttatggagctgatgtacactaccggggaggaagtggaggtccgcgattataaacggctgactcccatttccgtgctggaccacgcattggaaagcctagataatctgagacccggtgactgcatcgtgtgttttagcaaaaatgatatctattccgtttcacgccagatcgaaattcgcggacttgagtccgctgtgatttatggttccctcccgccaggcacaaagcttgctcaagcaaagaaattcaacgaccctaatgacccctgcaaaatcctggtggccacggacgctattgggatgggcctcaatctttccatcaggcgcatcatcttctattctcttatcaaaccttccattaacgagaaaggggagagggagctggagtag

SEQ ID NO: 336098 - DNA, 794 bp, Artificial Sequence
  derived and/or modified sequence
ctcgatgtccttctcccgtgccctattgtgggctcggctcccggcggggcgccaggctggccaccgggcagccatctgctctgcccttcgtccccactttgggccctttcccggggttctggggcaagtttctgtccttgccaccgcctcctcctctgcctccggtggctccaaaataccaaacacgtccttgttcgtgcccctgactgtgaaacctcagggccccagcgccgacggcgacgtcggggccgagctaacccggcctctggacaagaatgaagtggctgtaattgatgaaattcaaatgattagagatccagccagaggatgggcctggaccagagcacttctaggactgtgtgctgaagaggttcatttgtgtggagaacctgctgctattgacctggtgatggagcttatgtacacaacgggggaggaagtggaggttcgagactataagaggcttacccccatttctgtgctggaccatgcactagaatctttagataaccttcggcctggggactgcattgtctgttttagcaagaatgatatttattctgtgagtcggcagattgaaattcggggattagaatcagctgttatatatggcagtctcccacctgggaccaaacttgctcaagcaaaaaagtttaatgatcccaatgacccatgcaaaatcttggttgctacagatgcaattggcatgggacttaatttgagcataaggagaattattttttactcccttataaagcccagtatcaatgaaaagggagagagagaactagaac

SEQ ID NO: 336099 - protein, 120 aa, Artificial Sequence
  derived and/or modified sequence
MLYMKEMRAKVVAECTLKESAAINQILGRRWHALSREEQAKYYELARKERQLHMQLYPGWSARDNYGKKKKRKRDKQPGETNDLSAPKKCRARFGLDQQNNWCGPCRCKYSKEVSGTVRA

SEQ ID NO: 336100 - DNA, 363 bp, Artificial Sequence
  derived and/or modified sequence
atgctgtacatgaaggagatgagagccaaggtggtggccgagtgcaccctgaaggagagcgccgccatcaaccagatcctgggcagaagatggcacgccctgagcagagaggagcaggccaagtactacgagctggccagaaaggagagacagctgcacatgcagctgtaccccggctggagcgccagagacaactacggcaagaagaagaagagaaagagagacaagcagcccggcgagaccaacgacctgagcgcccccaagaagtgcagagccagattcggcctggaccagcagaacaactggtgcggcccctgcagatgcaagtacagcaaggaggtgagcggcaccgtgagagcctag

SEQ ID NO: 336101 - DNA, 363 bp, Artificial Sequence
  derived and/or modified sequence
atgctatacatgaaagaaatgcgcgccaaggttgtcgccgaatgtactctgaaggagagcgcagctataaatcagatcctcggcaggcggtggcacgccctttctagagaggagcaagccaagtactatgagctggctaggaaagagcgccagcttcatatgcagctttatcctgggtggtctgccagggacaactatggcaaaaagaaaaaacggaagcgggataaacaaccaggggaaaccaatgatctgtcagcaccaaagaagtgtagagcccgttttggactggaccagcagaacaattggtgcggcccgtgtcgatgtaaatactcgaaggaagtgtctggcactgtgcgagcctag

SEQ ID NO: 336102 - DNA, 363 bp, Artificial Sequence
  derived and/or modified sequence
atgctgtacatgaaggagatgagggccaaggtggtggccgagtgcaccctgaaggagagcgctgccatcaaccagatcctgggccgccgctggcacgccctgagccgggaggagcaggccaagtactatgagctggccaggaaggagcggcagctgcacatgcagctgtacccaggctggagcgcccgggacaactacggcaagaagaagaagaggaagagggacaagcagcccggggagaccaatgacctgagcgcccccaagaagtgccgggcccgcttcggcctggaccagcagaacaactggtgtggcccctgccgctgcaagtacagcaaggaggtgtctggaacagtgcgggcctag

SEQ ID NO: 336103 - DNA, 363 bp, Artificial Sequence
  derived and/or modified sequence
atgctgtacatgaaggagatgcgggccaaggtggtggccgagtgcaccttgaaagagtctgctgccatcaatcagatacttggcaggaggtggcacgcactctctcgggaggagcaggctaagtactatgagcttgctagaaaggagagacaattgcatatgcagctgtatccaggatggtctgcccgggataattacggaaagaaaaagaagagaaaacgcgataagcagcccggagagaccaacgatctcagcgcccccaaaaagtgccgagctcggttcggtctggatcaacagaataattggtgcggaccttgcaggtgcaaatactcgaaggaagtttcaggcacagtgcgtgcttag

SEQ ID NO: 336104 - DNA, 363 bp, Artificial Sequence
  derived and/or modified sequence
atgctctatatgaaggaaatgagggcgaaggtggtggccgagtgcacgctaaaagaatccgccgcaattaaccagatcctgggtcgtcgctggcacgccctgtcaagggaggagcaggcaaaatattatgaactggccaggaaagaacgccagttgcacatgcagttataccccggttggtccgcgcgagacaattatgggaagaagaaaaaacggaaaagagataagcagccaggcgaaaccaatgacctgtctgctcctaaaaaatgtcgagctagattcggactggatcagcagaataactggtgcggcccttgccgatgcaaatattctaaagaggtctccggcaccgtgcgagcatag

SEQ ID NO: 336105 - DNA, 1274 bp, Artificial Sequence
  derived and/or modified sequence
caggaatcgtcccagagtgatgtcggctcactccatagttcaaagcatcaggactccaaaaaggaagaagaaaagaagaagccccacataaagaaacctcttaatgcattcatgttgtatatgaaggaaatgagagcaaaggtcgtagctgagtgcacgttgaaagaaagcgcggccatcaaccagatccttgggcggaggtggcatgcactgtccagagaagagcaagcgaaatactacgagctggcccggaaggagcgacagcttcatatgcaactgtaccccggctggtccgcgcgggataactatggaaagaagaagaagaggaaaagggacaagcagccgggagagaccaatgacctgagcgctcctaagaaatgccgagcgcgctttggccttgatcaacagaataactggtgcggcccttgcagatgcaaatactccaaagaagtgtcgggcactgttcgggcttgaccgacagactttatggtgcaaaccgtgcaggagaaaaaaaaagtgcgttcgctacatacaaggtgaaggcagctgcctcagcccaccctcttcagatggaagcttactagattcgcctcccccctccccgaacctgctaggctcccctccccgagacgccaagtcacagactgagcagacccagcctctgtcgctgtccctgaagcccgaccccctggcccacctgtccatgatgcctccgccacccgccctcctgctcgctgaggccacccacaaggcctccgccctctgtcccaacggggccctggacctgcccccagccgctttgcagcctgccgccccctcctcatcaattgcacagccgtcgacttcttccttacattcccacagctccctggccgggacccagccccagccgctgtcgctcgtcaccaagtctttagaatagctttagcgtcgtgaaccccgctgctttgtttatggttttgtttcacttttcttaatttgccccccacccccaccttgaaaggttttgttttgtactctcttaattttgtgccatgtggctacattagttgatgtttatcgagttcattggtcaatatttgacccattcttatttcaatttctccttttaaatatgtagatgagagaagaacctcatgattctaccaaaatttttatcaacagctgtttaaagtctttgtagcgtttaaaaaatatatatatatacataactgttatgtagttcggatagcttagttttaaaagactgattaaaaaacaaaaagaaaaaaaaa

SEQ ID NO: 336106 - DNA, 105 bp, Artificial Sequence
  derived and/or modified sequence
atggcgtttctccgaagcatgtggggcgtgctgactgccctgggaaggtctggagcagagctgtgcaccggctgtggaagtcgactgcgctcccccttcaggtag

SEQ ID NO: 336107 - protein, 878 aa, Artificial Sequence
  derived and/or modified sequence
MEVKGPSGRSFCCESEGQFKSCLKRHTPSLLLPSSWKGNSGSCLMAKALHRMSPTPNSCPLPLPLCRMSGVLCSRNLFTFKFSLFQLDSGASGEPGHSLGLTLGFSHCGNCQTAVVSAQPEGMASNGAYPALGPGVTANPGTSLSVFTALPFTTPAPGPAHGPLLVTAGAPPGGPLVLSTLPSTPLVTEQDGCGPSGAGASNVFVQMRTEVGPVKAAQAQTLVLTQAPLVWQAPGALCGGVVCPPPLLLAAAPVVPVMAAQVVGGTQACEGGWSQGLPLPPPPPPAAQLPPIVSQGNAGPWPQGAHGEGSLASSQAKAPPDDSCNPRSVYENFRLWQHYKPLARRHLPQSPDTEALSCFLIPVLRSLARRKPTMTLEEGLWRAMREWQHTSNFDRMIFYEMAEKFLEFEAEEEMQIQKSQWMKGPQCLPPPATPRLEPRGPPAPEVVKQPVYLPSKAGPKAPTACLPPPRPQRPVTKARRPPPRPHRRAETKARLPPPRPQRPAETKVPEEIPPEVVQEYVDIMEELLGPSLGATGEPEKQREEGEVKQPQEEDWTPPDPGLLSYTDKLCSQKDFVTKVEAVIHPQFLEELLSPDPQMDFLALSQELEQEEGLTLAQLVEKRLLPLKEKQHARAAPSRGTARLDSSSSKFAAGQGAERDVPVPQQGVGMETCPPQTTARDSQGRGRAHTGMARSKDSVVLLGCQDSPGLRAARPTSPPQDHRPTCPGVGTKDALDLPGGSPVRESHGLAQGSSEEEELPSLAFLLGSQHKLLPWWLPQSPVPASGLLSPEKWGPQGTHQFPSAERRGLNLAPSPANKAKKRPLFGSLSPAEKTPHPGPGLRVSGEQSLTWGLGGPSQSQKRKGDPLVSRKEKKQRCSQ

SEQ ID NO: 336108 - protein, 805 aa, Artificial Sequence
  derived and/or modified sequence
MFQEPVYFQIFFQLDSGASGEPGHSLGLTLGFSHCGNCQTAVVSAQPEGMASNGAYPALGPGVTANPGTSLSVFTALPFTTPAPGPAHGPLLVTAGAPPGGPLVLSTLPSTPLVTEQDGCGPSGAGASNVFVQMRTEVGPVKAAQAQTLVLTQAPLVWQAPGALCGGVVCPPPLLLAAAPVVPVMAAQVVGGTQACEGGWSQGLPLPPPPPPAAQLPPIVSQGNAGPWPQGAHGEGSLASSQAKAPPDDSCNPRSVYENFRLWQHYKPLARRHLPQSPDTEALSCFLIPVLRSLARRKPTMTLEEGLWRAMREWQHTSNFDRMIFYEMAEKFLEFEAEEEMQIQKSQWMKGPQCLPPPATPRLEPRGPPAPEVVKQPVYLPSKAGPKAPTACLPPPRPQRPVTKARRPPPRPHRRAETKARLPPPRPQRPAETKVPEEIPPEVVQEYVDIMEELLGPSLGATGEPEKQREEGEVKQPQEEDWTPPDPGLLSYTDKLCSQKDFVTKVEAVIHPQFLEELLSPDPQMDFLALSQELEQEEGLTLAQLVEKRLLPLKEKQHARAAPSRGTARLDSSSSKFAAGQGAERDVPVPQQGVGMETCPPQTTARDSQGRGRAHTGMARSKDSVVLLGCQDSPGLRAARPTSPPQDHRPTCPGVGTKDALDLPGGSPVRESHGLAQGSSEEEELPSLAFLLGSQHKLLPWWLPQSPVPASGLLSPEKWGPQGTHQFPSAERRGLNLAPSPANKAKKRPLFGSLSPAEKTPHPGPGLRVSGEQSLTWGLGGPSQSQKRKGDPLVSRKEKKQRCSQ

SEQ ID NO: 336109 - protein, 262 aa, Artificial Sequence
  derived and/or modified sequence
MEELLGPSLGATGEPEKQREEGEVKQPQEEDWTPPDPGLLSYTDKLCSQKDFVTKVEAVIHPQFLEELLSPDPQMDFLALSQELEQEEGLTLAQLVEKRLLPLKEKQHARAAPSRGTARLDSSSSKFAAGQGAERDVPVPQQGVGMETCPPQTTARDSQGRGRAHTASGLLSPEKWGPQGTHQFPSAERRGLNLAPSPANKAKKRPLFGSLSPAEKTPHPGPGLRVSGEQSLTWGLGGPSQSQKRKGDPLVSRKEKKQRCSQ

SEQ ID NO: 336110 - protein, 656 aa, Artificial Sequence
  derived and/or modified sequence
  misc_feature (1)..(1): Xaa can be any naturally occurring amino acid
XLTQAPLVWQAPGALCGGVVCPPPLLLAAAPVVPVMAAQVVGGTQACEGGWSQGLPLPPPPPPAAQLPPIVSQGNAGPWPQGAHGEGSLASSQAKAPPDDSCNPRSVYENFRLWQHYKPLARRHLPQSPDTEALSCFLIPVLRSLARRKPTMTLEEGLWRAMREWQHTSNFDRMIFYEMAEKFLEFEAEEEMQIQKSQWMKGPQCLPPPATPRLEPRGPPAPEVVKQPVYLPSKAGPKAPTACLPPPRPQRPVTKARRPPPRPHRRAETKARLPPPRPQRPAETKVPEEIPPEVVQEYVDIMEELLGPSLGATGEPEKQREEGEVKQPQEEDWTPPDPGLLSYTDKLCSQKDFVTKVEAVIHPQFLEELLSPDPQMDFLALSQELEQEEGLTLAQLVEKRLLPLKEKQHARAAPSRGTARLDSSSSKFAAGQGAERDVPVPQQGVGMETCPPQTTARDSQGRGRAHTGMARSKDSVVLLGCQDSPGLRAARPTSPPQDHRPTCPGVGTKDALDLPGGSPVRESHGLAQGSSEEEELPSLAFLLGSQHKLLPWWLPQSPVPASGLLSPEKWGPQGTHQFPSAERRGLNLAPSPANKAKKRPLFGSLSPAEKTPHPGPGLRVSGEQSLTWGLGGPSQSQKRKGDPLVSRKEKKQRCSQ

SEQ ID NO: 336111 - protein, 877 aa, Artificial Sequence
  derived and/or modified sequence
MEVKGPSGRSFCCESEGQFKSCLKRHTPSLLLPSSWKGNSGSCLMAEALHRMSPTPNSCPLPLPLCRMSGVLCSRNLFTFKFSFQLDSGASGEPGHSLGLTLGFSHCGNCQTAVVSAQPEGMASNGAYPALGPGVTANPGTSLSVFTALPFTTPAPGPAHGPLLVTAGAPPGGPLVLSNFPSTPLVTEQDGCGPSGAGASNVFVQMRTEVGPVKAAQAQTLVLTQTPLVWQAPGALCGGVVCPPPLLLAAAPVVPVMAAQVVGGTQACEGGWSQGLPLPPPPPPAAQLPPIVSQGNAGPWPQGAHGEGSLASSQAKAPPDDSCNPRSVYENFRLWQHYKPLARRHLPQSPDTEALSCFLIPVLRSLARRKPTMTLEEGLWRAMREWQHTSNFDRMIFYEMAEKFLEFEAEEEMQIQKSQWMKGPQCLPPPATPRLEPRGPPAPEVVKQPVYLPSKAGPKAPTACLPPPRPQRPVTKARRPPPRPHRRAETKARLPPPRPQRPAETKVPEEIPPEVVQEYVDIMEELLGPSLGATGEPEKQREEGEVKQPQEEDWTPPDPGLLSYTDKLCSQKDFVTKVEAVIHPQFLEELLSPDPQMDFLALSQELEQEEGLTLAQLVEKRLLPLKEKQHARAAPSRGTARLDSSSSKFAAGQGAERDVPDPQQGVGMETCPPQTTARDSQGRGRAHTGMARSKDSVVLLGCQDSPGLRAARPTSPPQDHRPTCPGVGTKDALDLPGGSPVRESHGLAQGSSEEEELPSLAFLLGSQHKLLPWWLPQSPVPASGLLSPEKWGPQGTHQSPSAERRGLNLAPSPANKAKKRPLFGSLSPAEKTPHPGPGLRVSGEQSLTWGLGGPSQSQKRKGDPLVSRKEKKQRCSQ

SEQ ID NO: 336112 - protein, 262 aa, Artificial Sequence
  derived and/or modified sequence
MEELLGPSLGATGEPEKQREEGEVKQPQEEDWTPPDPGLLSYTDKLCSQKDFVTKVEAVIHPQFLEELLSPDPQMDFLALSQELEQEEGLTLAQLVEKRLLPLKEKQHARAAPSRGTARLDSSSSKFAAGQGAERDVPDPQQGVGMETCPPQTTARDSQGRGRAHTASGLLSPEKWGPQGTHQSPSAERRGLNLAPSPANKAKKRPLFGSLSPAEKTPHPGPGLRVSGEQSLTWGLGGPSQSQKRKGDPLVSRKEKKQRCSQ

SEQ ID NO: 336113 - protein, 806 aa, Artificial Sequence
  derived and/or modified sequence
MFQEPVYFQIFLFQLDSGASGEPGHSLGLTLGFSHCGNCQTAVVSAQPEGMASNGAYPALGPGVTANPGTSLSVFTALPFTTPAPGPAHGPLLVTAGAPPGGPLVLSNFPSTPLVTEQDGCGPSGAGASNVFVQMRTEVGPVKAAQAQTLVLTQTPLVWQAPGALCGGVVCPPPLLLAAAPVVPVMAAQVVGGTQACEGGWSQGLPLPPPPPPAAQLPPIVSQGNAGPWPQGAHGEGSLASSQAKAPPDDSCNPRSVYENFRLWQHYKPLARRHLPQSPDTEALSCFLIPVLRSLARRKPTMTLEEGLWRAMREWQHTSNFDRMIFYEMAEKFLEFEAEEEMQIQKSQWMKGPQCLPPPATPRLEPRGPPAPEVVKQPVYLPSKAGPKAPTACLPPPRPQRPVTKARRPPPRPHRRAETKARLPPPRPQRPAETKVPEEIPPEVVQEYVDIMEELLGPSLGATGEPEKQREEGEVKQPQEEDWTPPDPGLLSYTDKLCSQKDFVTKVEAVIHPQFLEELLSPDPQMDFLALSQELEQEEGLTLAQLVEKRLLPLKEKQHARAAPSRGTARLDSSSSKFAAGQGAERDVPDPQQGVGMETCPPQTTARDSQGRGRAHTGMARSKDSVVLLGCQDSPGLRAARPTSPPQDHRPTCPGVGTKDALDLPGGSPVRESHGLAQGSSEEEELPSLAFLLGSQHKLLPWWLPQSPVPASGLLSPEKWGPQGTHQSPSAERRGLNLAPSPANKAKKRPLFGSLSPAEKTPHPGPGLRVSGEQSLTWGLGGPSQSQKRKGDPLVSRKEKKQRCSQ

SEQ ID NO: 336114 - protein, 252 aa, Artificial Sequence
  derived and/or modified sequence
  misc_feature (1)..(1): Xaa can be any naturally occurring amino acid
XTGEPEKQREEGEVKQPQEEDWTPPDPGLLSYTDKLCSQKDFVTKVEAVIHPQFLEELLSPDPQMDFLALSQELEQEEGLTLAQLVEKRLLPLKEKQHARAAPSRGTARLDSSSSKFAAGQGAERDVPDPQQGVGMETCPPQTTARDSQGRGRAHTASGLLSPEKWGPQGTHQSPSAERRGLNLAPSPANKAKKRPLFGSLSPAEKTPHPGPGLRVSGEQSLTWGLGGPSQSQKRKGDPLVSRKEKKQRCSQ

SEQ ID NO: 336115 - DNA, 2637 bp, Artificial Sequence
  derived and/or modified sequence
atggaggtgaagggccccagcggcagaagcttctgctgcgagagcgagggccagttcaagagctgcctgaagagacacacccccagcctgctgctgcccagcagctggaagggcaacagcggcagctgcctgatggccaaggccctgcacagaatgagccccacccccaacagctgccccctgcccctgcccctgtgcagaatgagcggcgtgctgtgcagcagaaacctgttcaccttcaagttcagcctgttccagctggacagcggcgccagcggcgagcccggccacagcctgggcctgaccctgggcttcagccactgcggcaactgccagaccgccgtggtgagcgcccagcccgagggcatggccagcaacggcgcctaccccgccctgggccccggcgtgaccgccaaccccggcaccagcctgagcgtgttcaccgccctgcccttcaccacccccgcccccggccccgcccacggccccctgctggtgaccgccggcgccccccccggcggccccctggtgctgagcaccctgcccagcacccccctggtgaccgagcaggacggctgcggccccagcggcgccggcgccagcaacgtgttcgtgcagatgagaaccgaggtgggccccgtgaaggccgcccaggcccagaccctggtgctgacccaggcccccctggtgtggcaggcccccggcgccctgtgcggcggcgtggtgtgccccccccccctgctgctggccgccgcccccgtggtgcccgtgatggccgcccaggtggtgggcggcacccaggcctgcgagggcggctggagccagggcctgcccctgccccccccccccccccccgccgcccagctgccccccatcgtgagccagggcaacgccggcccctggccccagggcgcccacggcgagggcagcctggccagcagccaggccaaggccccccccgacgacagctgcaaccccagaagcgtgtacgagaacttcagactgtggcagcactacaagcccctggccagaagacacctgccccagagccccgacaccgaggccctgagctgcttcctgatccccgtgctgagaagcctggccagaagaaagcccaccatgaccctggaggagggcctgtggagagccatgagagagtggcagcacaccagcaacttcgacagaatgatcttctacgagatggccgagaagttcctggagttcgaggccgaggaggagatgcagatccagaagagccagtggatgaagggcccccagtgcctgcccccccccgccacccccagactggagcccagaggcccccccgcccccgaggtggtgaagcagcccgtgtacctgcccagcaaggccggccccaaggcccccaccgcctgcctgcccccccccagaccccagagacccgtgaccaaggccagaagacccccccccagaccccacagaagagccgagaccaaggccagactgcccccccccagaccccagagacccgccgagaccaaggtgcccgaggagatcccccccgaggtggtgcaggagtacgtggacatcatggaggagctgctgggccccagcctgggcgccaccggcgagcccgagaagcagagagaggagggcgaggtgaagcagccccaggaggaggactggaccccccccgaccccggcctgctgagctacaccgacaagctgtgcagccagaaggacttcgtgaccaaggtggaggccgtgatccacccccagttcctggaggagctgctgagccccgacccccagatggacttcctggccctgagccaggagctggagcaggaggagggcctgaccctggcccagctggtggagaagagactgctgcccctgaaggagaagcagcacgccagagccgcccccagcagaggcaccgccagactggacagcagcagcagcaagttcgccgccggccagggcgccgagagagacgtgcccgtgccccagcagggcgtgggcatggagacctgccccccccagaccaccgccagagacagccagggcagaggcagagcccacaccggcatggccagaagcaaggacagcgtggtgctgctgggctgccaggacagccccggcctgagagccgccagacccaccagccccccccaggaccacagacccacctgccccggcgtgggcaccaaggacgccctggacctgcccggcggcagccccgtgagagagagccacggcctggcccagggcagcagcgaggaggaggagctgcccagcctggccttcctgctgggcagccagcacaagctgctgccctggtggctgccccagagccccgtgcccgccagcggcctgctgagccccgagaagtggggcccccagggcacccaccagttccccagcgccgagagaagaggcctgaacctggcccccagccccgccaacaaggccaagaagagacccctgttcggcagcctgagccccgccgagaagaccccccaccccggccccggcctgagagtgagcggcgagcagagcctgacctggggcctgggcggccccagccagagccagaagagaaagggcgaccccctggtgagcagaaaggagaagaagcagagatgcagccagtag

SEQ ID NO: 336116 - DNA, 2418 bp, Artificial Sequence
  derived and/or modified sequence
atgttccaggagcccgtgtacttccagatcttcttccagctggacagcggcgccagcggcgagcccggccacagcctgggcctgaccctgggcttcagccactgcggcaactgccagaccgccgtggtgagcgcccagcccgagggcatggccagcaacggcgcctaccccgccctgggccccggcgtgaccgccaaccccggcaccagcctgagcgtgttcaccgccctgcccttcaccacccccgcccccggccccgcccacggccccctgctggtgaccgccggcgccccccccggcggccccctggtgctgagcaccctgcccagcacccccctggtgaccgagcaggacggctgcggccccagcggcgccggcgccagcaacgtgttcgtgcagatgagaaccgaggtgggccccgtgaaggccgcccaggcccagaccctggtgctgacccaggcccccctggtgtggcaggcccccggcgccctgtgcggcggcgtggtgtgccccccccccctgctgctggccgccgcccccgtggtgcccgtgatggccgcccaggtggtgggcggcacccaggcctgcgagggcggctggagccagggcctgcccctgccccccccccccccccccgccgcccagctgccccccatcgtgagccagggcaacgccggcccctggccccagggcgcccacggcgagggcagcctggccagcagccaggccaaggccccccccgacgacagctgcaaccccagaagcgtgtacgagaacttcagactgtggcagcactacaagcccctggccagaagacacctgccccagagccccgacaccgaggccctgagctgcttcctgatccccgtgctgagaagcctggccagaagaaagcccaccatgaccctggaggagggcctgtggagagccatgagagagtggcagcacaccagcaacttcgacagaatgatcttctacgagatggccgagaagttcctggagttcgaggccgaggaggagatgcagatccagaagagccagtggatgaagggcccccagtgcctgcccccccccgccacccccagactggagcccagaggcccccccgcccccgaggtggtgaagcagcccgtgtacctgcccagcaaggccggccccaaggcccccaccgcctgcctgcccccccccagaccccagagacccgtgaccaaggccagaagacccccccccagaccccacagaagagccgagaccaaggccagactgcccccccccagaccccagagacccgccgagaccaaggtgcccgaggagatcccccccgaggtggtgcaggagtacgtggacatcatggaggagctgctgggccccagcctgggcgccaccggcgagcccgagaagcagagagaggagggcgaggtgaagcagccccaggaggaggactggaccccccccgaccccggcctgctgagctacaccgacaagctgtgcagccagaaggacttcgtgaccaaggtggaggccgtgatccacccccagttcctggaggagctgctgagccccgacccccagatggacttcctggccctgagccaggagctggagcaggaggagggcctgaccctggcccagctggtggagaagagactgctgcccctgaaggagaagcagcacgccagagccgcccccagcagaggcaccgccagactggacagcagcagcagcaagttcgccgccggccagggcgccgagagagacgtgcccgtgccccagcagggcgtgggcatggagacctgccccccccagaccaccgccagagacagccagggcagaggcagagcccacaccggcatggccagaagcaaggacagcgtggtgctgctgggctgccaggacagccccggcctgagagccgccagacccaccagccccccccaggaccacagacccacctgccccggcgtgggcaccaaggacgccctggacctgcccggcggcagccccgtgagagagagccacggcctggcccagggcagcagcgaggaggaggagctgcccagcctggccttcctgctgggcagccagcacaagctgctgccctggtggctgccccagagccccgtgcccgccagcggcctgctgagccccgagaagtggggcccccagggcacccaccagttccccagcgccgagagaagaggcctgaacctggcccccagccccgccaacaaggccaagaagagacccctgttcggcagcctgagccccgccgagaagaccccccaccccggccccggcctgagagtgagcggcgagcagagcctgacctggggcctgggcggccccagccagagccagaagagaaagggcgaccccctggtgagcagaaaggagaagaagcagagatgcagccagtag

SEQ ID NO: 336117 - DNA, 789 bp, Artificial Sequence
  derived and/or modified sequence
atggaggagctgctgggccccagcctgggcgccaccggcgagcccgagaagcagagagaggagggcgaggtgaagcagccccaggaggaggactggaccccccccgaccccggcctgctgagctacaccgacaagctgtgcagccagaaggacttcgtgaccaaggtggaggccgtgatccacccccagttcctggaggagctgctgagccccgacccccagatggacttcctggccctgagccaggagctggagcaggaggagggcctgaccctggcccagctggtggagaagagactgctgcccctgaaggagaagcagcacgccagagccgcccccagcagaggcaccgccagactggacagcagcagcagcaagttcgccgccggccagggcgccgagagagacgtgcccgtgccccagcagggcgtgggcatggagacctgccccccccagaccaccgccagagacagccagggcagaggcagagcccacaccgccagcggcctgctgagccccgagaagtggggcccccagggcacccaccagttccccagcgccgagagaagaggcctgaacctggcccccagccccgccaacaaggccaagaagagacccctgttcggcagcctgagccccgccgagaagaccccccaccccggccccggcctgagagtgagcggcgagcagagcctgacctggggcctgggcggccccagccagagccagaagagaaagggcgaccccctggtgagcagaaaggagaagaagcagagatgcagccagtag

SEQ ID NO: 336118 - DNA, 1971 bp, Artificial Sequence
  derived and/or modified sequence
tgactgacccaggcccccctggtgtggcaggcccccggcgccctgtgcggcggcgtggtgtgccccccccccctgctgctggccgccgcccccgtggtgcccgtgatggccgcccaggtggtgggcggcacccaggcctgcgagggcggctggagccagggcctgcccctgccccccccccccccccccgccgcccagctgccccccatcgtgagccagggcaacgccggcccctggccccagggcgcccacggcgagggcagcctggccagcagccaggccaaggccccccccgacgacagctgcaaccccagaagcgtgtacgagaacttcagactgtggcagcactacaagcccctggccagaagacacctgccccagagccccgacaccgaggccctgagctgcttcctgatccccgtgctgagaagcctggccagaagaaagcccaccatgaccctggaggagggcctgtggagagccatgagagagtggcagcacaccagcaacttcgacagaatgatcttctacgagatggccgagaagttcctggagttcgaggccgaggaggagatgcagatccagaagagccagtggatgaagggcccccagtgcctgcccccccccgccacccccagactggagcccagaggcccccccgcccccgaggtggtgaagcagcccgtgtacctgcccagcaaggccggccccaaggcccccaccgcctgcctgcccccccccagaccccagagacccgtgaccaaggccagaagacccccccccagaccccacagaagagccgagaccaaggccagactgcccccccccagaccccagagacccgccgagaccaaggtgcccgaggagatcccccccgaggtggtgcaggagtacgtggacatcatggaggagctgctgggccccagcctgggcgccaccggcgagcccgagaagcagagagaggagggcgaggtgaagcagccccaggaggaggactggaccccccccgaccccggcctgctgagctacaccgacaagctgtgcagccagaaggacttcgtgaccaaggtggaggccgtgatccacccccagttcctggaggagctgctgagccccgacccccagatggacttcctggccctgagccaggagctggagcaggaggagggcctgaccctggcccagctggtggagaagagactgctgcccctgaaggagaagcagcacgccagagccgcccccagcagaggcaccgccagactggacagcagcagcagcaagttcgccgccggccagggcgccgagagagacgtgcccgtgccccagcagggcgtgggcatggagacctgccccccccagaccaccgccagagacagccagggcagaggcagagcccacaccggcatggccagaagcaaggacagcgtggtgctgctgggctgccaggacagccccggcctgagagccgccagacccaccagccccccccaggaccacagacccacctgccccggcgtgggcaccaaggacgccctggacctgcccggcggcagccccgtgagagagagccacggcctggcccagggcagcagcgaggaggaggagctgcccagcctggccttcctgctgggcagccagcacaagctgctgccctggtggctgccccagagccccgtgcccgccagcggcctgctgagccccgagaagtggggcccccagggcacccaccagttccccagcgccgagagaagaggcctgaacctggcccccagccccgccaacaaggccaagaagagacccctgttcggcagcctgagccccgccgagaagaccccccaccccggccccggcctgagagtgagcggcgagcagagcctgacctggggcctgggcggccccagccagagccagaagagaaagggcgaccccctggtgagcagaaaggagaagaagcagagatgcagccagtag

SEQ ID NO: 336119 - DNA, 2634 bp, Artificial Sequence
  derived and/or modified sequence
atggaggtgaagggccccagcggcagaagcttctgctgcgagagcgagggccagttcaagagctgcctgaagagacacacccccagcctgctgctgcccagcagctggaagggcaacagcggcagctgcctgatggccgaggccctgcacagaatgagccccacccccaacagctgccccctgcccctgcccctgtgcagaatgagcggcgtgctgtgcagcagaaacctgttcaccttcaagttcagcttccagctggacagcggcgccagcggcgagcccggccacagcctgggcctgaccctgggcttcagccactgcggcaactgccagaccgccgtggtgagcgcccagcccgagggcatggccagcaacggcgcctaccccgccctgggccccggcgtgaccgccaaccccggcaccagcctgagcgtgttcaccgccctgcccttcaccacccccgcccccggccccgcccacggccccctgctggtgaccgccggcgccccccccggcggccccctggtgctgagcaacttccccagcacccccctggtgaccgagcaggacggctgcggccccagcggcgccggcgccagcaacgtgttcgtgcagatgagaaccgaggtgggccccgtgaaggccgcccaggcccagaccctggtgctgacccagacccccctggtgtggcaggcccccggcgccctgtgcggcggcgtggtgtgccccccccccctgctgctggccgccgcccccgtggtgcccgtgatggccgcccaggtggtgggcggcacccaggcctgcgagggcggctggagccagggcctgcccctgccccccccccccccccccgccgcccagctgccccccatcgtgagccagggcaacgccggcccctggccccagggcgcccacggcgagggcagcctggccagcagccaggccaaggccccccccgacgacagctgcaaccccagaagcgtgtacgagaacttcagactgtggcagcactacaagcccctggccagaagacacctgccccagagccccgacaccgaggccctgagctgcttcctgatccccgtgctgagaagcctggccagaagaaagcccaccatgaccctggaggagggcctgtggagagccatgagagagtggcagcacaccagcaacttcgacagaatgatcttctacgagatggccgagaagttcctggagttcgaggccgaggaggagatgcagatccagaagagccagtggatgaagggcccccagtgcctgcccccccccgccacccccagactggagcccagaggcccccccgcccccgaggtggtgaagcagcccgtgtacctgcccagcaaggccggccccaaggcccccaccgcctgcctgcccccccccagaccccagagacccgtgaccaaggccagaagacccccccccagaccccacagaagagccgagaccaaggccagactgcccccccccagaccccagagacccgccgagaccaaggtgcccgaggagatcccccccgaggtggtgcaggagtacgtggacatcatggaggagctgctgggccccagcctgggcgccaccggcgagcccgagaagcagagagaggagggcgaggtgaagcagccccaggaggaggactggaccccccccgaccccggcctgctgagctacaccgacaagctgtgcagccagaaggacttcgtgaccaaggtggaggccgtgatccacccccagttcctggaggagctgctgagccccgacccccagatggacttcctggccctgagccaggagctggagcaggaggagggcctgaccctggcccagctggtggagaagagactgctgcccctgaaggagaagcagcacgccagagccgcccccagcagaggcaccgccagactggacagcagcagcagcaagttcgccgccggccagggcgccgagagagacgtgcccgacccccagcagggcgtgggcatggagacctgccccccccagaccaccgccagagacagccagggcagaggcagagcccacaccggcatggccagaagcaaggacagcgtggtgctgctgggctgccaggacagccccggcctgagagccgccagacccaccagccccccccaggaccacagacccacctgccccggcgtgggcaccaaggacgccctggacctgcccggcggcagccccgtgagagagagccacggcctggcccagggcagcagcgaggaggaggagctgcccagcctggccttcctgctgggcagccagcacaagctgctgccctggtggctgccccagagccccgtgcccgccagcggcctgctgagccccgagaagtggggcccccagggcacccaccagagccccagcgccgagagaagaggcctgaacctggcccccagccccgccaacaaggccaagaagagacccctgttcggcagcctgagccccgccgagaagaccccccaccccggccccggcctgagagtgagcggcgagcagagcctgacctggggcctgggcggccccagccagagccagaagagaaagggcgaccccctggtgagcagaaaggagaagaagcagagatgcagccagtag

SEQ ID NO: 336120 - DNA, 789 bp, Artificial Sequence
  derived and/or modified sequence
atggaggagctgctgggccccagcctgggcgccaccggcgagcccgagaagcagagagaggagggcgaggtgaagcagccccaggaggaggactggaccccccccgaccccggcctgctgagctacaccgacaagctgtgcagccagaaggacttcgtgaccaaggtggaggccgtgatccacccccagttcctggaggagctgctgagccccgacccccagatggacttcctggccctgagccaggagctggagcaggaggagggcctgaccctggcccagctggtggagaagagactgctgcccctgaaggagaagcagcacgccagagccgcccccagcagaggcaccgccagactggacagcagcagcagcaagttcgccgccggccagggcgccgagagagacgtgcccgacccccagcagggcgtgggcatggagacctgccccccccagaccaccgccagagacagccagggcagaggcagagcccacaccgccagcggcctgctgagccccgagaagtggggcccccagggcacccaccagagccccagcgccgagagaagaggcctgaacctggcccccagccccgccaacaaggccaagaagagacccctgttcggcagcctgagccccgccgagaagaccccccaccccggccccggcctgagagtgagcggcgagcagagcctgacctggggcctgggcggccccagccagagccagaagagaaagggcgaccccctggtgagcagaaaggagaagaagcagagatgcagccagtag

SEQ ID NO: 336121 - DNA, 2421 bp, Artificial Sequence
  derived and/or modified sequence
atgttccaggagcccgtgtacttccagatcttcctgttccagctggacagcggcgccagcggcgagcccggccacagcctgggcctgaccctgggcttcagccactgcggcaactgccagaccgccgtggtgagcgcccagcccgagggcatggccagcaacggcgcctaccccgccctgggccccggcgtgaccgccaaccccggcaccagcctgagcgtgttcaccgccctgcccttcaccacccccgcccccggccccgcccacggccccctgctggtgaccgccggcgccccccccggcggccccctggtgctgagcaacttccccagcacccccctggtgaccgagcaggacggctgcggccccagcggcgccggcgccagcaacgtgttcgtgcagatgagaaccgaggtgggccccgtgaaggccgcccaggcccagaccctggtgctgacccagacccccctggtgtggcaggcccccggcgccctgtgcggcggcgtggtgtgccccccccccctgctgctggccgccgcccccgtggtgcccgtgatggccgcccaggtggtgggcggcacccaggcctgcgagggcggctggagccagggcctgcccctgccccccccccccccccccgccgcccagctgccccccatcgtgagccagggcaacgccggcccctggccccagggcgcccacggcgagggcagcctggccagcagccaggccaaggccccccccgacgacagctgcaaccccagaagcgtgtacgagaacttcagactgtggcagcactacaagcccctggccagaagacacctgccccagagccccgacaccgaggccctgagctgcttcctgatccccgtgctgagaagcctggccagaagaaagcccaccatgaccctggaggagggcctgtggagagccatgagagagtggcagcacaccagcaacttcgacagaatgatcttctacgagatggccgagaagttcctggagttcgaggccgaggaggagatgcagatccagaagagccagtggatgaagggcccccagtgcctgcccccccccgccacccccagactggagcccagaggcccccccgcccccgaggtggtgaagcagcccgtgtacctgcccagcaaggccggccccaaggcccccaccgcctgcctgcccccccccagaccccagagacccgtgaccaaggccagaagacccccccccagaccccacagaagagccgagaccaaggccagactgcccccccccagaccccagagacccgccgagaccaaggtgcccgaggagatcccccccgaggtggtgcaggagtacgtggacatcatggaggagctgctgggccccagcctgggcgccaccggcgagcccgagaagcagagagaggagggcgaggtgaagcagccccaggaggaggactggaccccccccgaccccggcctgctgagctacaccgacaagctgtgcagccagaaggacttcgtgaccaaggtggaggccgtgatccacccccagttcctggaggagctgctgagccccgacccccagatggacttcctggccctgagccaggagctggagcaggaggagggcctgaccctggcccagctggtggagaagagactgctgcccctgaaggagaagcagcacgccagagccgcccccagcagaggcaccgccagactggacagcagcagcagcaagttcgccgccggccagggcgccgagagagacgtgcccgacccccagcagggcgtgggcatggagacctgccccccccagaccaccgccagagacagccagggcagaggcagagcccacaccggcatggccagaagcaaggacagcgtggtgctgctgggctgccaggacagccccggcctgagagccgccagacccaccagccccccccaggaccacagacccacctgccccggcgtgggcaccaaggacgccctggacctgcccggcggcagccccgtgagagagagccacggcctggcccagggcagcagcgaggaggaggagctgcccagcctggccttcctgctgggcagccagcacaagctgctgccctggtggctgccccagagccccgtgcccgccagcggcctgctgagccccgagaagtggggcccccagggcacccaccagagccccagcgccgagagaagaggcctgaacctggcccccagccccgccaacaaggccaagaagagacccctgttcggcagcctgagccccgccgagaagaccccccaccccggccccggcctgagagtgagcggcgagcagagcctgacctggggcctgggcggccccagccagagccagaagagaaagggcgaccccctggtgagcagaaaggagaagaagcagagatgcagccagtag

SEQ ID NO: 336122 - DNA, 759 bp, Artificial Sequence
  derived and/or modified sequence
tgaaccggcgagcccgagaagcagagagaggagggcgaggtgaagcagccccaggaggaggactggaccccccccgaccccggcctgctgagctacaccgacaagctgtgcagccagaaggacttcgtgaccaaggtggaggccgtgatccacccccagttcctggaggagctgctgagccccgacccccagatggacttcctggccctgagccaggagctggagcaggaggagggcctgaccctggcccagctggtggagaagagactgctgcccctgaaggagaagcagcacgccagagccgcccccagcagaggcaccgccagactggacagcagcagcagcaagttcgccgccggccagggcgccgagagagacgtgcccgacccccagcagggcgtgggcatggagacctgccccccccagaccaccgccagagacagccagggcagaggcagagcccacaccgccagcggcctgctgagccccgagaagtggggcccccagggcacccaccagagccccagcgccgagagaagaggcctgaacctggcccccagccccgccaacaaggccaagaagagacccctgttcggcagcctgagccccgccgagaagaccccccaccccggccccggcctgagagtgagcggcgagcagagcctgacctggggcctgggcggccccagccagagccagaagagaaagggcgaccccctggtgagcagaaaggagaagaagcagagatgcagccagtag

SEQ ID NO: 336123 - DNA, 2637 bp, Artificial Sequence
  derived and/or modified sequence
atggaggtgaaaggcccttccggccggagtttctgctgcgaatccgaagggcagtttaaaagctgtctcaagcgtcatacccccagcctgctcctgcccagttcgtggaaaggcaactccgggtcttgtcttatggccaaggccctccaccgtatgagccctacaccaaatagctgcccacttccactgcctctgtgcaggatgagcggggtgctgtgtagccgcaatctatttacctttaaattctcgctgtttcagttagattccggagccagcggagaaccaggacacagcctgggactcaccctcgggtttagtcattgtggcaactgccagacagcagttgtctccgcacagcctgagggaatggcttccaatggagcctacccggccctgggccctggtgtgacggcaaatcccggcacatctctgtctgtgttcactgctttgccctttaccacacctgcccctggcccagcccacggcccactgctggtcacggctggcgctccgccgggtggcccccttgtcctttcgactctccctagtacccctctcgtcacggagcaagatggttgtggaccctcaggggctggtgcaagtaacgtcttcgtgcaaatgcgcaccgaggttggacccgtgaaggccgcccaagcccaaacgcttgttctcacgcaggctcccctggtctggcaggcccctggggcactatgcggaggagttgtgtgtccgccaccactgctcttggcagctgcccctgttgttccggtgatggcagcccaggttgtcggcgggacacaggcgtgcgaggggggttggagccagggcctcccgctgccaccaccgccccccccagctgcacaactgccacccatcgtgtcgcagggcaatgctgggccttggcctcaaggtgcccacggggagggaagcctggcctcatctcaggcaaaggcccctccagacgactcatgcaatccaaggagcgtgtacgaaaattttcgattgtggcagcattataaacctctggcgaggagacacctgccccaatctcccgacacggaagccctaagctgtttcctcatccctgttctgagatctcttgctcgacggaagcctactatgacacttgaagaggggttgtggcgtgcaatgcgcgaatggcagcacacttccaattttgataggatgatcttctatgagatggccgaaaagtttctcgagttcgaagccgaagaggagatgcagatccaaaagagccagtggatgaaaggccctcaatgcctgcctccccccgcgacccctagactggagccaagagggcccccagctccagaggttgtcaaacagccagtgtacctcccttctaaggcgggacctaaggcgccaaccgcgtgcctgccaccacccaggccacagcgaccggtgactaaagcgaggaggcccccgcctaggcctcacaggagagctgagactaaagcccggctgccccctccccgcccacagcgacccgccgaaaccaaagttcctgaggaaatcccgcccgaagtggttcaggagtacgttgatataatggaggaactgttgggtccctccctgggtgcaaccggcgaacccgaaaaacagagagaggaaggcgaggtgaaacaaccacaggaggaggattggaccccgccagaccccggtctgttgtcatacaccgacaagctctgctctcagaaggatttcgtcactaaggtggaagctgttattcaccctcagttcctggaagaacttttatcccccgatccacagatggattttctggcgctgtcacaggaacttgagcaggaggagggtctcacgctggcacagctcgtggagaagcggcttcttccccttaaagagaaacagcacgcaagggccgctccatcccggggtaccgcaagactcgactcgtcatcctctaaattcgcggcgggtcagggtgctgaacgggatgtgcccgtgccgcagcagggggtgggtatggaaacctgccccccccagaccaccgccagagacagccagggtagaggtcgagctcataccggcatggccaggagcaaagatagcgtcgtactgctgggctgccaggatagccctggcttaagagctgcacggcccacgtcgccccctcaggaccaccgccccacgtgccctggagttggcaccaaggatgctctcgacctgcctggggggtcccccgtgagagaatcccatggactcgcccaggggagctccgaagaggaagagctgccatccttggctttcttgctcggctcacagcacaaactgctgccatggtggctgccacagagtcccgtgcccgcatcaggtttgctgtcgcccgagaaatggggacctcaggggacccaccagtttccctcagctgagcgtcggggactgaacttagcacccagccccgccaataaggcgaaaaagcgaccactgtttgggagtctgagtcccgccgaaaagaccccacacccgggccctggtctgcgcgtgtctggagagcagtccctgacgtgggggctcggtggccccagccagagtcaaaagcgaaagggagatcctctggtgtcgcggaaagaaaaaaagcaaagatgcagccagtag

SEQ ID NO: 336124 - DNA, 2418 bp, Artificial Sequence
  derived and/or modified sequence
atgtttcaggagccagtgtactttcagattttcttccagcttgattccggggctagtggcgaacccggccatagcctaggcctgactttagggttttcacactgcggcaactgtcagaccgcagttgtgtccgcacaacccgaaggcatggcttccaacggagcctacccagccctggggccaggcgttacggctaatccaggcacttcattaagtgtgtttactgctctgccattcaccacacctgctccaggaccggcccatgggccacttctggtgaccgccggcgcaccacccggcggcccactggtgctgagcacactgccctctacgccccttgtaaccgaacaggatgggtgtggcccgtcaggggcgggcgcaagtaatgtgttcgtgcagatgcgcaccgaagtcgggccagtgaaggcagcgcaggcacagaccctggtactgacacaagcaccgctggtctggcaagccccaggagccctgtgtggaggcgtggtctgtccaccacctctgttactcgctgccgctccggttgtccctgtgatggccgcccaagtcgtaggaggcactcaggcctgtgaaggcggctggtcccagggactgcctttaccacctccaccccccccagctgcacagctgcctcctattgtttctcagggcaacgccggtccatggccacagggcgctcacggagaaggcagcctggctagttcccaggcaaaggcgcccccagatgatagctgcaatccccgaagcgtgtatgaaaattttcgcctgtggcaacattacaaacctctcgcccgaagacacttgcctcaatcccccgacaccgaagccctgtcctgctttctgatccctgttttgcgttctctggccaggagaaaaccaacaatgacccttgaggaaggcctttggagggctatgcgcgaatggcagcacacatcaaactttgaccggatgatattttacgaaatggcagagaaatttctggaatttgaggccgaagaggagatgcaaattcagaagtcccaatggatgaagggacctcagtgtttacctcccccagcaacaccaaggctggagccgaggggcccacctgcacccgaggtagtgaagcagccagtgtatcttccatcaaaagccggacctaaggctcccacagcctgcctgcctcccccacgtccacaacgtccagttacgaaagcaagaagacctcccccccggccacatcgcagggccgaaactaaggcaaggctgccaccacctagacctcagcggccagcggagaccaaggtgcccgaggagattccacccgaagtggtccaggagtacgttgatattatggaggaactacttgggccttctcttggggccacaggggaacctgagaaacagcgggaagagggcgaggtcaagcagcctcaggaagaggattggactccccccgaccccggcttgctatcctataccgacaagctgtgctcccaaaaggatttcgtgaccaaggtcgaggccgttatccacccacaattccttgaggaactgctctctccagaccctcagatggattttctggccctctcacaagaattggaacaagaagagggactgacattggcccagctcgtcgagaagcgccttctgccgctaaaagaaaaacaacatgcaagagctgcgccttcgcgcggaaccgcccgactcgactccagttctagcaaattcgccgcgggtcaaggagctgagcgagacgtgcctgtgcctcaacagggcgtgggcatggagacctgtcccccacagactaccgccagagattctcaggggcgaggacgcgcacatactgggatggcaagatcaaaggattccgtagtgctgctgggatgccaagactctcccggattgcgggcagcaagaccaacaagccctccacaggatcacaggcctacgtgcccaggcgtcggcacaaaagatgctctcgaccttcccgggggaagtcccgtccgggagtcacacggattggcccaaggctcatctgaagaggaagaacttccctccctggccttcctccttggctctcagcacaaactgttgccttggtggctccctcagagtccagtccccgcatcgggtcttctgagcccagaaaagtggggaccccagggtactcatcagttcccttctgccgaaagacggggtcttaatcttgccccaagccctgcaaacaaggccaaaaaacgcccactatttgggagtctgagccctgccgaaaagacaccccatccaggacctggactgcgagtgtctggagagcaaagtcttacgtggggactgggaggtccttctcagtcccagaagcgcaagggggacccgctggtttcacggaaggagaagaagcaaaggtgttcacagtag

SEQ ID NO: 336125 - DNA, 789 bp, Artificial Sequence
  derived and/or modified sequence
atggaagaactgctcggaccatccctgggagctacaggagagccagaaaaacagcgcgaagaaggcgaggtaaagcaaccacaggaggaagactggacaccaccagaccccggattactcagttacacagataagctctgtagccagaaggacttcgtgaccaaagtggaggccgttatccacccccaatttttggaggagctgttgtcccctgacccccagatggactttctagcccttagccaagaattggagcaggaggaagggctgactctcgctcagctggttgagaaacgtttgctgcctctcaaggaaaagcagcacgctagagccgcaccaagccgaggcaccgctcggctcgattcctcatcatcaaagtttgctgcaggccagggagccgagagagacgttcccgttccccagcagggagtcgggatggaaacatgcccccctcagacaacagcccgcgacagtcagggaagaggtagagcccacactgcgtccggcctactgagtcctgaaaaatggggtccccagggtactcatcaattcccgtcggctgagcgcaggggtctgaacctggcgccatcaccagcgaacaaagcgaaaaagcgcccactatttggttctctctcacccgccgagaagacaccgcacccaggtcccggattgcgtgtctcaggcgaacagtccctgacttggggcctgggcggacccagtcagtcccagaaacgcaaaggagaccctctggtctcaaggaaggaaaagaagcagaggtgttcccagtag

SEQ ID NO: 336126 - DNA, 1971 bp, Artificial Sequence
  derived and/or modified sequence
taactgactcaggctccattggtctggcaggcacctggagccctgtgcggcggtgtggtatgtccacctccattactgctcgctgcggcacccgtggttccggtcatggcagctcaagtggtgggaggtacgcaagcctgcgagggcgggtggagtcagggtttgccacttcctccaccgccaccacctgccgcccagctgccccctatagtgtctcagggcaacgctgggccatggccacaaggggcacacggggaaggatctttggcatcgagtcaggccaaagcccctcccgacgactcatgtaatccaagatctgtgtacgaaaatttccgtctctggcagcattataaaccgctggctcggcgacacttgcctcaaagtcccgatactgaggccctctcttgctttttgatccccgtgttacgaagcctggcaagaagaaaacctactatgactctcgaagaggggctgtggcgcgctatgcgggaatggcagcatacgtccaactttgacagaatgatcttttatgagatggccgaaaagttcttggagtttgaagctgaggaagagatgcaaattcaaaaaagccagtggatgaaagggccccagtgcctcccgcctcccgccaccccgcggctggaaccaagggggccaccagcacctgaagtggtaaagcagcccgtttacctacctagcaaggctggtccaaaagcccctactgcctgtttgccaccacccagacctcagcggccagtgacaaaagctcgtagacctccacctcgcccccaccggagagcagagaccaaagctcgcctgcccccgccacgtccacagaggcctgccgaaacaaaagtgcctgaagagataccacctgaggttgtccaagagtatgtggatattatggaggaattactcggtccgtccttaggcgctaccggcgagcccgaaaaacagagagaggaaggtgaggtcaagcagccccaagaggaggactggacgcccccggatccagggttactcagctacactgataaactgtgtagccagaaggacttcgtgacaaaagtggaggctgtaattcatcctcagtttcttgaggaattgctgtccccagatccacaaatggactttctcgcactgagtcaagagctggagcaggaggaaggcctgacactggcccagctagtggaaaaacgcctgctgccgttaaaggagaagcaacatgctcgagcagctccttctcgaggaactgccaggctggactcctcttctagtaaattcgccgcaggccagggcgcagaacgggatgtccccgtgccacagcagggggtggggatggaaacttgccctcctcaaaccaccgcgcgggattcgcagggtaggggtagggctcataccggtatggcgaggtccaaagactccgtagtgctccttggctgccaggacagcccaggtctgcgggctgctagacccacttccccgcctcaagaccataggcccacgtgccctggggtcggcaccaaagacgccttagacctccctggcggttccccggtgagggaatcacatggactggcacagggcagctctgaagaggaggagctaccgagcttggcttttctgctgggatcgcagcacaaactgctgccctggtggctgcctcagagtcccgttccagcctctggactgctgtcccccgagaagtggggacctcagggtacccaccaattcccgtccgccgaacgcagaggcctcaacttggcacctagccctgccaacaaagcgaaaaaacggccactctttggcagcctctcaccggccgagaagactccacacccaggaccagggctccgagtgagcggcgagcagagtttaacctgggggctgggtggaccatcccagagccagaagcgaaagggagaccctcttgtgtcccgaaaggagaaaaaacaacgatgttcacagtag

SEQ ID NO: 336127 - DNA, 2634 bp, Artificial Sequence
  derived and/or modified sequence
atggaggtgaaggggccatccgggcggagcttctgttgcgagtcagagggccaattcaaatcgtgcctgaagcgccatacaccctccctccttctcccctctagttggaagggaaattccggcagctgtctcatggccgaagctcttcataggatgtcccctactcccaactcttgtccactgcctctccctctgtgtagaatgtctggcgtgctctgtagccgaaatctgttcacgtttaagttttcctttcagctcgattcaggcgcgtccggcgagcccggacatagcttgggcctaaccctcggcttttcacattgcggcaactgccaaacggccgtggtgagcgcccagcccgaaggtatggcttccaacggcgcctaccctgccctaggcccaggggttacagctaacccaggcacgagtctgtccgtgttcacagcactgccattcacaactcctgcccctgggcccgctcatgggcctttgctggtgactgccggagcaccaccaggagggcccctagtgctgagcaattttccaagcactccactcgttactgaacaggatggctgcgggccctctggtgcgggtgccagtaacgtgtttgtgcagatgagaacggaagtggggcctgtgaaagccgcgcaggcacaaaccctggtgctcacacagacacccctggtgtggcaggcccccggcgcgttgtgcggtggcgtggtatgtcctccaccgctcctcctggccgcagcaccggtcgtgcctgtgatggccgcacaggtggttggagggacacaggcctgtgagggtggctggtctcagggactgcccctgccaccccctccgcctcccgctgcacagttgccacccatcgtaagccagggcaatgcagggccatggcctcagggcgcccatggagaaggatcattggcctctagtcaggccaaagcccctccagatgactcctgtaatccccggtccgtttacgaaaatttccgactgtggcagcattacaagccattggccagacggcacttacctcagtcacctgatacggaagccttaagttgttttctgatacctgtgctgcgctcactggcaagacgcaaacctactatgaccctggaagaaggcctgtggagagccatgcgtgagtggcaacacacaagcaatttcgaccggatgatcttctatgagatggcagagaagttcctcgagttcgaagctgaagaagagatgcagattcagaagtctcagtggatgaaagggccgcaatgcctgccaccacctgctacccctaggctggagccccgaggtccgccggcgccagaagtggtgaagcagccagtctacctgccttctaaggctgggccaaaagcccctaccgcctgccttcctcccccacgcccccagagacccgtgactaaggcacggcgcccgcctccacgaccacatcggagagccgaaacaaaagctcggctgccacctccccggcctcagcggcccgcggaaaccaaagtcccagaggaaattccccccgaggtggtgcaggaatacgttgacatcatggaggagttgcttgggccgtcactgggagccactggagagccagagaaacagcgagaagaaggcgaggtgaaacaaccccaagaggaagactggacaccgcccgatcccggactgctctcatatacagataagctatgctctcagaaggacttcgtcaccaaggttgaagctgtgatccacccacagtttctggaggaactcctgtcccctgatcctcagatggattttctggccctctcacaggaattggagcaagaagagggactcaccttagctcagttggtggaaaaaaggctcctgcctctgaaggagaagcagcacgcccgcgccgcaccaagtcggggaactgcacggttggactcctccagttcgaaatttgccgccgggcagggcgccgagagggacgtgcccgatccacagcaaggggtgggtatggagacttgtccgccgcagaccacagcccgggatagccaaggcagggggagggcacatactggcatggcaaggagcaaggactccgtggtgctgctaggatgccaagactctccgggcttgcgcgcagcaaggcccacctcaccacctcaggaccacaggcctacctgtcctggagtgggcaccaaagacgcgttagacctcccaggaggctccccggtgcgtgagtcacacgggctggctcaaggctctagcgaagaagaggaactgccgtcgctagcattcttgcttggatctcaacataaactgctgccttggtggctcccacagagtccagtccccgcctcgggactcctctcccccgagaagtgggggccacaagggactcaccagtctccctcagccgagcggcggggccttaacctggctcctagtcctgccaacaaggcgaagaagcggcctctgtttgggtccttatctcccgccgaaaaaacacctcacccgggccccggactgagagttagcggcgaacagagtttaacttgggggctgggaggtccttcccaatcacagaaaaggaaaggggatccgctcgtgagtcgcaaagaaaagaagcagagatgcagccagtag

SEQ ID NO: 336128 - DNA, 789 bp, Artificial Sequence
  derived and/or modified sequence
atggaagagctgctcggcccaagcctgggcgcaactggagagccagaaaagcagcgagaggaaggcgaggtgaaacagccccaggaagaggactggacccctcccgatccaggtctgttatcatacaccgacaagctttgctcccagaaagactttgttacgaaggtggaggcggtgatccacccccagttcctcgaagaactcctgagtcctgatcctcagatggattttcttgccctgtcccaggaactagaacaggaagaaggcctaactcttgcccagcttgtagaaaaacgactgctccctctgaaagagaagcagcacgcacgagctgcaccatctcgcggaactgccaggttggactcgagctcttccaaatttgctgcaggacaaggagcagaacgggacgttccggatccccagcagggcgtgggtatggaaacctgccccccacaaacgacagccagggacagtcagggcagaggccgggctcacacagccagcgggctgctctccccagagaaatggggcccccaggggactcatcaaagccccagcgctgaacggcggggtctaaacctagctccatcccctgccaataaggccaagaagaggcctttgtttggatctttgtcacctgccgagaagaccccgcaccctggccctggccttagagtgtctggagagcagagtctgacttggggcttggggggaccctctcagtcccagaaacgcaaaggagacccactagtgagccggaaggaaaaaaagcagagatgcagtcagtag

SEQ ID NO: 336129 - DNA, 2421 bp, Artificial Sequence
  derived and/or modified sequence
atgttccaggaacccgtctatttccagatctttctttttcagctggactcaggggcttccggcgaacccggtcactctcttggcctgactctgggctttagtcactgtggcaactgccagaccgcggtggtcagtgcacaacccgaggggatggcctctaacggtgcctacccagccctgggtcctggcgtgaccgccaatccggggaccagcttgtccgtattcaccgccttgcccttcaccacgccagccccaggaccagcacatggccccctgttggtgactgcaggcgcccctcccggtggacctttggttttgagcaacttccccagcaccccgctcgtcacggaacaagacggctgcggaccctcaggcgctggggcctccaatgtgtttgtccagatgaggactgaggtggggcctgtcaaagcagcgcaggctcaaacactggtgctaacgcagacgcctctggtctggcaggcccccggggcactctgcggcggcgttgtttgccccccacccctgcttctggctgccgctcctgtggtccccgttatggcggcccaggtcgtcgggggtacacaggcttgtgagggaggttggtcccagggcttgccattgcctcctccccccccacctgcggcacagctgccccccatcgtgtcccaaggtaacgcggggccatggcctcagggagcgcacggcgaaggaagcctggcttcctcacaagccaaagctccacctgacgactcctgcaatccgcggtccgtttacgagaacttccgcctatggcaacattataagcctcttgcaaggcggcacctgccccaatccccggacactgaggcattgagttgcttcctgattcccgtgctgcggtctttggcacgccggaagccaacaatgactcttgaagagggcctctggagggccatgcgggaatggcagcatacttctaacttcgatcggatgatcttctatgagatggccgaaaaattcctcgaatttgaagcagaagaagagatgcaaatccagaagtctcagtggatgaaaggcccgcagtgcttacccccacccgctactccaaggttggagcctagggggcctcctgcccccgaggtggtgaaacagcccgtgtatctgcctagtaaggcaggacccaaagctccaaccgcttgcctaccacccccccgtccccaaagacctgtgactaaagcccgtagaccaccaccgcggccacatcgcagagctgagaccaaggcccggctccccccaccacgccctcagcgtcctgcggagaccaaagtgccagaggagatcccacctgaagtggtgcaggagtatgtggacatcatggaggaactgctcggacctagcctgggcgccactggtgaacccgaaaaacaacgggaggaaggcgaggtgaagcaaccccaagaagaagattggaccccaccagatccagggctcctttcttacacagataaactgtgctcacaaaaggactttgtcacaaaggttgaagcagttattcaccctcaatttctggaggaactcttaagtcccgatccacagatggactttctcgccctgtcacaggagctggagcaggaggaaggtttaaccctcgcccagttggtggagaaacgactactgcccctgaaagagaagcagcatgcccgcgcagctccttcacgcggaacggccaggctcgactcctcgagctccaagttcgcggcagggcagggagccgaacgtgatgtgccagaccctcagcagggagttggtatggaaacatgtccgccccagacaaccgcccgggactctcaaggccgaggccgggcccatacaggaatggcacgctccaaagatagcgttgtgcttcttggatgtcaggatagtccgggcctgcgcgcggctaggcctacatctcccccgcaagaccataggcctacctgtccaggggtaggcaccaaagatgcactggacttgcctggcggcagccccgtaagagagtctcatggactggcgcagggcagctcagaagaggaggaacttccctctctcgcctttttgctgggaagccagcacaaactcctaccatggtggttgccccagtcacctgtccccgcctccggtctgctcagtcctgaaaagtggggcccccagggcacccaccagagtccgtccgccgagaggagaggactgaacctcgctccttctccggcgaacaaagcgaagaaacgaccactctttggctctctctcaccagccgagaaaacaccccaccctggcccaggcctgagagtctcaggagaacagtccctcacttggggtctcggcggcccgtcacagtcacagaaaagaaagggggatcccctcgtgagcaggaaagaaaagaaacagcggtgttcccagtag

SEQ ID NO: 336130 - DNA, 759 bp, Artificial Sequence
  derived and/or modified sequence
tgaacaggcgagccagaaaagcagcgggaagaaggtgaggtgaaacagccacaggaagaggattggaccccccctgaccctggcctcctcagttatactgacaaactctgttcacaaaaggactttgtgacgaaggtggaagcagtcatccacccacagtttttggaggagttgctctcgcccgatccacaaatggactttctggcgctgtcccaggaactggagcaagaggagggactgaccctggctcagctcgtggaaaagaggctgcttcccctcaaggagaagcagcacgcccgggcggccccatccaggggcaccgctcgtcttgatagctcttcaagcaagttcgccgcaggccagggagcagagagagacgtaccggatcctcagcagggagtgggcatggaaacctgccctccccagactaccgcacgtgactctcagggccgcggaagggcccatactgctagtggtcttttgagtccagagaaatggggtccccaggggactcatcagtccccaagcgccgaaaggcgcggcttaaacctggccccttccccagcgaacaaggcaaagaagcgcccactgtttgggagcttgtcccctgctgaaaaaactcctcacccaggcccaggactccgggtttctggcgagcagtcccttacctggggtttaggaggcccatcgcagtcacagaaaagaaaaggagatcccttggttagtcggaaagaaaagaagcaaaggtgtagtcagtag

SEQ ID NO: 336131 - DNA, 3286 bp, Artificial Sequence
  derived and/or modified sequence
ggatttctggtctcggtgctgtaggtcacatagccactctttcctggattgaggctttccagcaaaggggctgggacgtaaggctggcctgctggtgtggacagagattccagcaacatgcatgacctgggggtacaaggattgcttcctaaacaatgataagcacacagccacctaatagtctggatcggctgagaccatcctgatttcaaacacccagtccccttgccttcctaagaacccctgtgtttctcagactgaaaatgtgttttgaactttgttcacgaagtgaggccgctgttgaaattcgtcaagactgggaaagagccaaagtgggaaggagcatgggttgattggcacaaaagtaggtctgctgataaagaatggaagtaaaggggccatcaggtagaagcttttgctgtgagtcagaaggacaatttaaaagttgcctaaagaggcacacgccatctctgctgctgccttccagttggaagggaaactcaggttcttgcctaatggccaaagcccttcacagaatgtcccccacccctaacagctgcccactgcccctccccctctgcagaatgtctggggtcctatgttccaggaacctgtttactttcaaattttccctgtttcagttggactcaggagcatctggtgagccaggtcactctctgggtcttacccttggcttttctcattgcggaaactgccagacagcggtggtcagtgcccagcctgaggggatggcttcaaatggagcatacccagcgctgggaccgggcgtgaccgcgaaccctggcacctccctgtctgtgttcacggctctgcccttcaccacacccgctcccggcccagcacacgggccgctccttgtgactgcaggggctcctccaggcggccctctggtgctgtctaccctccccagcacacctctggtgacagaacaggatggctgcggcccgagtggggccggggcttccaacgtctttgtccagatgaggacagaggtggggcctgtgaaggccgctcaggcgcagaccttggtcctaactcaggcccccctcgtctggcaggctccaggcgccctctgcggaggtgttgtgtgtccacctcccctactcctggcagctgctcctgtggtgcctgttatggctgcccaggtggttgggggcacccaggcctgtgagggaggctggtcccagggccttcctcttccaccaccaccaccaccggctgcccagctgccccccattgtgtcccaagggaatgctgggccatggccacaaggggctcacggagagggcagcctggcttcctcccaggccaaggccccgccagatgactcctgtaaccccaggagtgtctatgagaacttccgactctggcagcactacaagcccctggcccggaggcaccttccccagagtcctgacaccgaagcgctttcgtgcttcctcatcccagttctccgatccctggcccggcggaagcccaccatgaccctggaggagggactgtggcgggccatgcgggaatggcagcacacgagcaactttgaccggatgatcttctacgagatggcggaaaagttcctggagtttgaggctgaggaggagatgcagattcagaaatcgcaatggatgaaggggccccagtgcctgcctcctccagccacaccgaggcttgaacctcgaggacccccggcccctgaggtggtcaagcagccagtgtaccttcccagcaaggccggccccaaggccccgactgcctgcctgccaccacccaggccccagaggccagtgaccaaggcccgccggccaccaccccggccccaccggcgagcagagaccaaggcccgcctgccaccacccaggccccagagaccagcagagaccaaggtccctgaggagatccccccagaagtggtgcaggagtatgtggacatcatggaggagctgctggggccttccctcggggccacgggggagcccgagaaacaacgggaagagggcgaagtgaagcagccacaggaagaggactggacgcccccagacccgggcctcctgagctacactgacaagctgtgttcccagaaagacttcgtcaccaaggtggaggccgtcattcatccccaattcctggaagaattgctttccccagatccacagatggatttcttggccctaagccaggagctggagcaggaggaaggactcacccttgcccagctagtggagaagcgcctcctacccttgaaggagaaacagcatgcgagggcagcccctagtcgtggcacagcccggttggactcaagttcttctaagtttgcagctggccaaggagcagagagagacgtccctgtcccccaacaaggggttggcatggaaacctgcccaccccagacgactgcccgggactctcagggacgaggcagagcacacactggcatggccaggtccaaagactctgttgtgcttttgggatgtcaggattcccctgggctgagggctgcccggccaacctctcctccccaggaccacagacccacctgccctggcgtgggtaccaaggatgccttggatctccctggagggtctcctgtcagggagtcacatgggctggctcaggggtcaagtgaggaggaggaactccccagcctggccttcctcttgggttcccagcacaagcttctgccctggtggctaccccagagccctgtccctgcctcgggccttctcagcccagaaaagtggggaccccagggaactcatcagttcccatctgctgagagaagaggcctcaacctagcaccttctcctgccaacaaggccaagaagcgacctctctttggaagcctgtcccctgctgaaaagacaccccacccagggcctgggctcagggtctctggggagcaatccctgacttgggggctgggtggcccctcacagtctcaaaagagaaagggtgaccccttggtctccaggaaggagaagaagcagcgttgtagccagtaggggcttctgagcaggctctctggggccgatccccaaggatggggctctggcatccgatgccccaaagcggtcaaaagcttcttctcccccagtgctgatcttgctgggccttagctttggagggtaggggagggaggggagggagagggtggctgaatggggagggcaggaagggagggtctggggggaaggggctggggagtgggggtgggaagcagtgcgttgggggcctcgtgtgtaagtgtgaataaatgtagttgtcttgg

SEQ ID NO: 336132 - DNA, 3282 bp, Artificial Sequence
  derived and/or modified sequence
ggatttctggtctcggtgctgtaggtcacatagccactctttcctggattgaggctttccagcaaaggggctgggacgtaaggctggcctgctggtgtggacagagattccagcaacatgcatgacctgggggtacaaggattgcttcctaaacaatgataagcacacagccacctaatagtctggatcggctgagaccatcctgatttcaaacacccagtccccttgccttcctaagaacccctgtgtttctcagactgaaaatgtgttttgaactttgttcacgaagtgaggccgctgttgaaattcgtcaagactgggaaagagccaaagtgggaaggagcatgggttgattggcacaaaagtaggtctgctgataaagaatggaagtaaaggggccatcaggtagaagcttttgctgtgagtcagaaggacaatttaaaagttgcctaaagaggcacacgccatctctgctgctgccttccagttggaagggaaactcaggttcttgcctaatggccaaagcccttcacagaatgtcccccacccctaacagctgcccactgcccctccccctctgcagaatgtctggggtcctatgttccaggaacctgtttactttcaaattttctttcagttggactcaggagcatctggtgagccaggtcactctctgggtcttacccttggcttttctcattgcggaaactgccagacagcggtggtcagtgcccagcctgaggggatggcttcaaatggagcatacccagcgctgggaccgggcgtgaccgcgaaccctggcacctccctgtctgtgttcacggctctgcccttcaccacacccgctcccggcccagcacacgggccgctccttgtgactgcaggggctcctccaggcggccctctggtgctgtctaccctccccagcacacctctggtgacagaacaggatggctgcggcccgagtggggccggggcttccaacgtctttgtccagatgaggacagaggtggggcctgtgaaggccgctcaggcgcagaccttggtcctaactcaggcccccctcgtctggcaggctccaggcgccctctgcggaggtgttgtgtgtccacctcccctactcctggcagctgctcctgtggtgcctgttatggctgcccaggtggttgggggcacccaggcctgtgagggaggctggtcccagggccttcctcttccaccaccaccaccaccggctgcccagctgccccccattgtgtcccaagggaatgctgggccatggccacaaggggctcacggagagggcagcctggcttcctcccaggccaaggccccgccagatgactcctgtaaccccaggagtgtctatgagaacttccgactctggcagcactacaagcccctggcccggaggcaccttccccagagtcctgacaccgaagcgctttcgtgcttcctcatcccagttctccgatccctggcccggcggaagcccaccatgaccctggaggagggactgtggcgggccatgcgggaatggcagcacacgagcaactttgaccggatgatcttctacgagatggcggaaaagttcctggagtttgaggctgaggaggagatgcagattcagaaatcgcaatggatgaaggggccccagtgcctgcctcctccagccacaccgaggcttgaacctcgaggacccccggcccctgaggtggtcaagcagccagtgtaccttcccagcaaggccggccccaaggccccgactgcctgcctgccaccacccaggccccagaggccagtgaccaaggcccgccggccaccaccccggccccaccggcgagcagagaccaaggcccgcctgccaccacccaggccccagagaccagcagagaccaaggtccctgaggagatccccccagaagtggtgcaggagtatgtggacatcatggaggagctgctggggccttccctcggggccacgggggagcccgagaaacaacgggaagagggcgaagtgaagcagccacaggaagaggactggacgcccccagacccgggcctcctgagctacactgacaagctgtgttcccagaaagacttcgtcaccaaggtggaggccgtcattcatccccaattcctggaagaattgctttccccagatccacagatggatttcttggccctaagccaggagctggagcaggaggaaggactcacccttgcccagctagtggagaagcgcctcctacccttgaaggagaaacagcatgcgagggcagcccctagtcgtggcacagcccggttggactcaagttcttctaagtttgcagctggccaaggagcagagagagacgtccctgtcccccaacaaggggttggcatggaaacctgcccaccccagacgactgcccgggactctcagggacgaggcagagcacacactggcatggccaggtccaaagactctgttgtgcttttgggatgtcaggattcccctgggctgagggctgcccggccaacctctcctccccaggaccacagacccacctgccctggcgtgggtaccaaggatgccttggatctccctggagggtctcctgtcagggagtcacatgggctggctcaggggtcaagtgaggaggaggaactccccagcctggccttcctcttgggttcccagcacaagcttctgccctggtggctaccccagagccctgtccctgcctcgggccttctcagcccagaaaagtggggaccccagggaactcatcagttcccatctgctgagagaagaggcctcaacctagcaccttctcctgccaacaaggccaagaagcgacctctctttggaagcctgtcccctgctgaaaagacaccccacccagggcctgggctcagggtctctggggagcaatccctgacttgggggctgggtggcccctcacagtctcaaaagagaaagggtgaccccttggtctccaggaaggagaagaagcagcgttgtagccagtaggggcttctgagcaggctctctggggccgatccccaaggatggggctctggcatccgatgccccaaagcggtcaaaagcttcttctcccccagtgctgatcttgctgggccttagctttggagggtaggggagggaggggagggagagggtggctgaatggggagggcaggaagggagggtctggggggaaggggctggggagtgggggtgggaagcagtgcgttgggggcctcgtgtgtaagtgtgaataaatgtagttgtcttgg

SEQ ID NO: 336133 - DNA, 2741 bp, Artificial Sequence
  derived and/or modified sequence
ggatttctggtctcggtgctgtaggtcacatagccactctttcctggattgaggctttccagcaaaggggctgggacgtaaggctggcctgctggtgtggacagagattccagcaacatgcatgacctgggggtacaaggattgcttcctaaacaatgataagcacacagccacctaatagtctggatcggctgagaccatcctgatttcaaacacccagtccccttgccttcctaagaacccctgtgtttctcagactgaaaatgtgttttgaactttgttcacgaagtgaggccgctgttgaaattcgtcaagactgggaaagagccaaagtgggaaggagcatgggttgattggcacaaaagtaggtctgctgataaagaatggaagtaaaggggccatcaggtagaagcttttgctgtgagtcagaaggacaatttaaaagttgcctaaagaggcacacgccatctctgctgctgccttccagttggaagggaaactcaggttcttgcctaatggccaaagcccttcacagaatgtcccccacccctaacagctgcccactgcccctccccctctgcagaatgtctggggtcctatgttccaggaacctgtttactttcaaattttccctgtttcagttggactcaggagcatctggtgagccaggtcactctctgggtcttacccttggcttttctcattgcggaaactgccagacagcggtggtcagtgcccagcctgaggggatggcttcaaatggagcatacccagcgctgggaccgggcgtgaccgcgaaccctggcacctccctgtctgtgttcacggctctgcccttcaccacacccgctcccggcccagcacacgggccgctccttgtgactgcaggggctcctccaggcggccctctggtgctgtctaccctccccagcacacctctggtgacagaacaggatggctgcggcccgagtggggccggggcttccaacgtctttgtccagatgaggacagaggtggggcctgtgaaggccgctcaggcgcagaccttggtcctaactcaggcccccctcgtctggcaggctccaggcgccctctgcggaggtgttgtgtgtccacctcccctactcctggcagctgctcctgtggtgcctgttatggctgcccaggtggttgggggcacccaggcctgtgagggaggctggtcccagggccttcctcttccaccaccaccaccaccggctgcccagctgccccccattgtgtcccaagggaatgctgggccatggccacaaggggctcacggagagggcagcctggcttcctcccaggccaaggccccgccagatgactcctgtaaccccaggagtgtctatgagaacttccgactctggcagcactacaagcccctggcccggaggcaccttccccagagtcctgacaccgaagcgctttcgtgcttcctcatcccagttctccgatccctggcccggcggaagcccaccatgaccctggaggagggactgtggcgggccatgcgggaatggcagcacacgagcaactttgaccggatgatcttctacgagatggcggaaaagttcctggagtttgaggctgaggaggagatgcagattcagaaatcgcaatggatgaaggggccccagtgcctgcctcctccagccacaccgaggcttgaacctcgaggacccccggcccctgaggtggtcaagcagccagtgtaccttcccagcaaggccggccccaaggccccgactgcctgcctgccaccacccaggccccagaggccagtgaccaaggcccgccggccaccaccccggccccaccggcgagcagagaccaaggcccgcctgccaccacccaggccccagagaccagcagagaccaaggtccctgaggagatccccccagaagtggtgcaggagtatgtggacatcatggaggagctgctggggccttccctcggggccacgggggagcccgagaaacaacgggaagagggcgaagtgaagcagccacaggaagaggactggacgcccccagacccgggcctcctgagctacactgacaagctgtgttcccagaaagacttcgtcaccaaggtggaggccgtcattcatccccaattcctggaagaattgctttccccagatccacagatggatttcttggccctaagccaggagctggagcaggaggaaggactcacccttgcccagctagtggagaagcgcctcctacccttgaaggagaaacagcatgcgagggcagcccctagtcgtggcacagcccggttggactcaagttcttctaagtttgcagctggccaaggagcagagagagacgtccctgtcccccaacaaggggttggcatggaaacctgcccaccccagacgactgcccgggactctcagggacgaggcagagcacacactgcctcgggccttctcagcccagaaaagtggggaccccagggaactcatcagttcccatctgctgagagaagaggcctcaacctagcaccttctcctgccaacaaggccaagaagcgacctctctttggaagcctgtcccctgctgaaaagacaccccacccagggcctgggctcagggtctctggggagcaatccctgacttgggggctgggtggcccctcacagtctcaaaagagaaagggtgaccccttggtctccaggaaggagaagaagcagcgttgtagccagtag

SEQ ID NO: 336134 - DNA, 2239 bp, Artificial Sequence
  derived and/or modified sequence
cctaactcaggcccccctcgtctggcaggctccaggcgccctctgcggaggtgttgtgtgtccacctcccctactcctggcagctgctcctgtggtgcctgttatggctgcccaggtggttgggggcacccaggcctgtgagggaggctggtcccagggccttcctcttccaccaccaccaccaccggctgcccagctgccccccattgtgtcccaagggaatgctgggccatggccacaaggggctcacggagagggcagcctggcttcctcccaggccaaggccccgccagatgactcctgtaaccccaggagtgtctatgagaacttccgactctggcagcactacaagcccctggcccggaggcaccttccccagagtcctgacaccgaagcgctttcgtgcttcctcatcccagttctccgatccctggcccggcggaagcccaccatgaccctggaggagggactgtggcgggccatgcgggaatggcagcacacgagcaactttgaccggatgatcttctacgagatggcggaaaagttcctggagtttgaggctgaggaggagatgcagattcagaaatcgcaatggatgaaggggccccagtgcctgcctcctccagccacaccgaggcttgaacctcgaggacccccggcccctgaggtggtcaagcagccagtgtaccttcccagcaaggccggccccaaggccccgactgcctgcctgccaccacccaggccccagaggccagtgaccaaggcccgccggccaccaccccggccccaccggcgagcagagaccaaggcccgcctgccaccacccaggccccagagaccagcagagaccaaggtccctgaggagatccccccagaagtggtgcaggagtatgtggacatcatggaggagctgctggggccttccctcggggccacgggggagcccgagaaacaacgggaagagggcgaagtgaagcagccacaggaagaggactggacgcccccagacccgggcctcctgagctacactgacaagctgtgttcccagaaagacttcgtcaccaaggtggaggccgtcattcatccccaattcctggaagaattgctttccccagatccacagatggatttcttggccctaagccaggagctggagcaggaggaaggactcacccttgcccagctagtggagaagcgcctcctacccttgaaggagaaacagcatgcgagggcagcccctagtcgtggcacagcccggttggactcaagttcttctaagtttgcagctggccaaggagcagagagagacgtccctgtcccccaacaaggggttggcatggaaacctgcccaccccagacgactgcccgggactctcagggacgaggcagagcacacactggcatggccaggtccaaagactctgttgtgcttttgggatgtcaggattcccctgggctgagggctgcccggccaacctctcctccccaggaccacagacccacctgccctggcgtgggtaccaaggatgccttggatctccctggagggtctcctgtcagggagtcacatgggctggctcaggggtcaagtgaggaggaggaactccccagcctggccttcctcttgggttcccagcacaagcttctgccctggtggctaccccagagccctgtccctgcctcgggccttctcagcccagaaaagtggggaccccagggaactcatcagttcccatctgctgagagaagaggcctcaacctagcaccttctcctgccaacaaggccaagaagcgacctctctttggaagcctgtcccctgctgaaaagacaccccacccagggcctgggctcagggtctctggggagcaatccctgacttgggggctgggtggcccctcacagtctcaaaagagaaagggtgaccccttggtctccaggaaggagaagaagcagcgttgtagccagtaggggcttctgagcaggctctctggggccgatccccaaggatggggctctggcatccgatgccccaaagcggtcaaaagcttcttctcccccagtgctgatcttgctgggccttagctttggagggtaggggagggaggggagggagagggtggctgaatggggagggcaggaagggagggtctggggggaaggggctggggagtgggggtgggaagcagtgcgttgggggcctcgtgtgtaagtgtgaataaatgtagttgtcttggaaaa

SEQ ID NO: 336135 - DNA, 3284 bp, Artificial Sequence
  derived and/or modified sequence
ggatttctggtctcggtgctgtaggtcacatagccactctttcctggattgaggctttccagcaaaggggctgggacgtaaggctggcctgctggtgtggacagagattccagcaacatgcatgacctgggggtacaaggattgcttcctaaacaatgataagcacacagccacctaatagtctggatcggctgagaccatcctgatttcaaacacccagtccccttgccttcctaagaacccctgtgtttctcagactgaaaatgtgttttgaactttgttcacgaagtgaggccgctgttgaaattcgtcaagactgggaaagagccaaagtgggaaggagcatgggttgattggcacaaaagtaggtctgctgataaagaatggaagtaaaggggccatcaggtagaagcttttgctgtgagtcagaaggacaatttaaaagttgcctaaagaggcacacgccatctctgctgctgccttccagttggaagggaaactcaggttcttgcctaatggccgaagcccttcacagaatgtcccccacccctaacagctgcccactgcccctccccctctgcagaatgtctggggtcctatgttccaggaacctgtttactttcaaattttcctttcagttggactcaggagcatctggtgagccaggtcactctctgggtcttacccttggcttttctcattgtggaaactgccagacagcggtagtcagtgcccagcctgaggggatggcttcaaatggagcatacccagcgctgggaccgggcgtgaccgcgaaccctggcacctccctgtctgtgttcacggctctgcccttcaccacacccgctcccggcccagcacacgggccgctccttgtgactgcaggggctcctccaggcggccctctggtgctgtctaacttccccagcacacctctggtgacagaacaggatggctgcggcccgagtggggccggggcttccaacgtctttgtccagatgaggacagaggtggggcctgtgaaggccgctcaggcgcagaccttggtcttaactcagacccccctcgtctggcaggctccaggcgccctctgcggaggtgttgtgtgtccacctcccctactcctggcagctgctcctgtggtgcctgttatggctgcccaggtggttgggggcacccaggcctgtgagggaggctggtcccagggccttcctcttccaccaccaccaccaccggctgcccagctgccccccattgtgtcccaagggaatgctgggccatggccacaaggggctcacggagagggcagcctggcttcctcccaggccaaggccccgccagatgactcctgtaaccccaggagtgtctatgagaacttccgactctggcagcactacaagcccctggcccggaggcaccttccccagagtcctgacaccgaagcgctttcgtgcttcctcatcccagttctccgatccctggcccggcggaagcccaccatgaccctggaggagggactgtggcgggccatgcgggaatggcagcacacgagcaactttgaccggatgatcttctacgagatggcggaaaagttcctggagtttgaggctgaggaggagatgcagattcagaaatcgcaatggatgaaggggccccagtgcctgcctcctccagccacaccgaggcttgaacctcgaggacccccggcccctgaggtggtcaagcagccagtgtaccttcccagcaaggccggccccaaggccccgactgcctgcctgccaccacccaggccccagaggccagtgaccaaggcccgccggccaccaccccggccccaccggcgagcagagaccaaggcccgcctgccaccacccaggccccagagaccagcagagaccaaggtccctgaggagatccccccagaagtggtgcaggagtatgtggacatcatggaggagctgctggggccttctctcggggccacgggggagcccgagaaacaacgggaagagggcgaagtgaagcagccacaggaagaggactggacgcccccagacccgggcctcctgagctacactgacaagctgtgttcccagaaagacttcgtcaccaaggtggaggccgtcattcatccccaattcctggaagaattgctttccccagatccacagatggatttcttggccctaagccaggagctggagcaggaggaaggactcacccttgcccagctagtggagaagcgcctcctacccttgaaggagaaacagcatgcgagggcagcccctagtcgtggcacagcccggttggactcaagttcttctaagtttgcagctggccaaggagcagagagagacgtccctgacccccaacaaggggttggcatggaaacctgcccaccccagacgactgcccgggactctcagggacgaggcagagcacacactggcatggccaggtccaaagactctgttgtgcttttgggatgtcaggattcccctgggctgagggctgcccggccaacctctcctccccaggaccacagacccacctgccctggcgtgggtaccaaggatgccttggatctccctggagggtctcctgtcagggagtcacatgggctggctcaggggtcaagtgaggaggaggaactccccagcctggccttcctcttgggttcccagcacaagcttctgccctggtggctaccccagagccctgtccctgcctcgggccttctcagcccagaaaagtggggaccccagggaactcatcagtccccatctgctgagagaagaggcctcaacctagcaccttctcctgccaacaaggccaagaagcgacctctctttggaagcctgtcccctgctgaaaagacaccccacccagggcctgggctcagggtctctggggagcaatccctgacttgggggctgggtggcccctcacagtctcaaaagagaaagggtgaccccttggtctccaggaaggagaagaagcagcgttgtagccagtaggggcttctgagcaggctctctggggccgatccccaaggatggggctctggcatccgatgccccaaagcggtcaaaagcttcttctcccccagtgctgatcttgctgggccttagctttggagggtaggggagggaggggagggagagggtggcctgaatggggagggcaggaagggagggtctggggggaaggggctggggagtgggggtgggaagcagtgtgttgggggcctcgtgtgtaagtgtgaataaatgtagttgtcttgg

SEQ ID NO: 336136 - DNA, 2740 bp, Artificial Sequence
  derived and/or modified sequence
ggatttctggtctcggtgctgtaggtcacatagccactctttcctggattgaggctttccagcaaaggggctgggacgtaaggctggcctgctggtgtggacagagattccagcaacatgcatgacctgggggtacaaggattgcttcctaaacaatgataagcacacagccacctaatagtctggatcggctgagaccatcctgatttcaaacacccagtccccttgccttcctaagaacccctgtgtttctcagactgaaaatgtgttttgaactttgttcacgaagtgaggccgctgttgaaattcgtcaagactgggaaagagccaaagtgggaaggagcatgggttgattggcacaaaagtaggtctgctgataaagaatggaagtaaaggggccatcaggtagaagcttttgctgtgagtcagaaggacaatttaaaagttgcctaaagaggcacacgccatctctgctgctgccttccagttggaagggaaactcaggttcttgcctaatggccgaagcccttcacagaatgtcccccacccctaacagctgcccactgcccctccccctctgcagaatgtctggggtcctatgttccaggaacctgtttactttcaaattttcctgtttcagttggactcaggagcatctggtgagccaggtcactctctgggtcttacccttggcttttctcattgtggaaactgccagacagcggtagtcagtgcccagcctgaggggatggcttcaaatggagcatacccagcgctgggaccgggcgtgaccgcgaaccctggcacctccctgtctgtgttcacggctctgcccttcaccacacccgctcccggcccagcacacgggccgctccttgtgactgcaggggctcctccaggcggccctctggtgctgtctaacttccccagcacacctctggtgacagaacaggatggctgcggcccgagtggggccggggcttccaacgtctttgtccagatgaggacagaggtggggcctgtgaaggccgctcaggcgcagaccttggtcttaactcagacccccctcgtctggcaggctccaggcgccctctgcggaggtgttgtgtgtccacctcccctactcctggcagctgctcctgtggtgcctgttatggctgcccaggtggttgggggcacccaggcctgtgagggaggctggtcccagggccttcctcttccaccaccaccaccaccggctgcccagctgccccccattgtgtcccaagggaatgctgggccatggccacaaggggctcacggagagggcagcctggcttcctcccaggccaaggccccgccagatgactcctgtaaccccaggagtgtctatgagaacttccgactctggcagcactacaagcccctggcccggaggcaccttccccagagtcctgacaccgaagcgctttcgtgcttcctcatcccagttctccgatccctggcccggcggaagcccaccatgaccctggaggagggactgtggcgggccatgcgggaatggcagcacacgagcaactttgaccggatgatcttctacgagatggcggaaaagttcctggagtttgaggctgaggaggagatgcagattcagaaatcgcaatggatgaaggggccccagtgcctgcctcctccagccacaccgaggcttgaacctcgaggacccccggcccctgaggtggtcaagcagccagtgtaccttcccagcaaggccggccccaaggccccgactgcctgcctgccaccacccaggccccagaggccagtgaccaaggcccgccggccaccaccccggccccaccggcgagcagagaccaaggcccgcctgccaccacccaggccccagagaccagcagagaccaaggtccctgaggagatccccccagaagtggtgcaggagtatgtggacatcatggaggagctgctggggccttctctcggggccacgggggagcccgagaaacaacgggaagagggcgaagtgaagcagccacaggaagaggactggacgcccccagacccgggcctcctgagctacactgacaagctgtgttcccagaaagacttcgtcaccaaggtggaggccgtcattcatccccaattcctggaagaattgctttccccagatccacagatggatttcttggccctaagccaggagctggagcaggaggaaggactcacccttgcccagctagtggagaagcgcctcctacccttgaaggagaaacagcatgcgagggcagcccctagtcgtggcacagcccggttggactcaagttcttctaagtttgcagctggccaaggagcagagagagacgtccctgacccccaacaaggggttggcatggaaacctgcccaccccagacgactgcccgggactctcagggacgaggcagagcacacactgcctcgggccttctcagcccagaaaagtggggaccccagggaactcatcagtccccatctgctgagagaagaggcctcaacctagcaccttctcctgccaacaaggccaagaagcgacctctctttggaagcctgtcccctgctgaaaagacaccccacccagggcctgggctcagggtctctggggagcaatccctgacttgggggctgggtggcccctcacagtctcaaaagagaaagggtgaccccttggtctccaggaaggagaagaagcagcgttgtagccagtag

SEQ ID NO: 336137 - DNA, 3286 bp, Artificial Sequence
  derived and/or modified sequence
ggatttctggtctcggtgctgtaggtcacatagccactctttcctggattgaggctttccagcaaaggggctgggacgtaaggctggcctgctggtgtggacagagattccagcaacatgcatgacctgggggtacaaggattgcttcctaaacaatgataagcacacagccacctaatagtctggatcggctgagaccatcctgatttcaaacacccagtccccttgccttcctaagaacccctgtgtttctcagactgaaaatgtgttttgaactttgttcacgaagtgaggccgctgttgaaattcgtcaagactgggaaagagccaaagtgggaaggagcatgggttgattggcacaaaagtaggtctgctgataaagaatggaagtaaaggggccatcaggtagaagcttttgctgtgagtcagaaggacaatttaaaagttgcctaaagaggcacacgccatctctgctgctgccttccagttggaagggaaactcaggttcttgcctaatggccgaagcccttcacagaatgtcccccacccctaacagctgcccactgcccctccccctctgcagaatgtctggggtcctatgttccaggaacctgtttactttcaaattttcctgtttcagttggactcaggagcatctggtgagccaggtcactctctgggtcttacccttggcttttctcattgtggaaactgccagacagcggtagtcagtgcccagcctgaggggatggcttcaaatggagcatacccagcgctgggaccgggcgtgaccgcgaaccctggcacctccctgtctgtgttcacggctctgcccttcaccacacccgctcccggcccagcacacgggccgctccttgtgactgcaggggctcctccaggcggccctctggtgctgtctaacttccccagcacacctctggtgacagaacaggatggctgcggcccgagtggggccggggcttccaacgtctttgtccagatgaggacagaggtggggcctgtgaaggccgctcaggcgcagaccttggtcttaactcagacccccctcgtctggcaggctccaggcgccctctgcggaggtgttgtgtgtccacctcccctactcctggcagctgctcctgtggtgcctgttatggctgcccaggtggttgggggcacccaggcctgtgagggaggctggtcccagggccttcctcttccaccaccaccaccaccggctgcccagctgccccccattgtgtcccaagggaatgctgggccatggccacaaggggctcacggagagggcagcctggcttcctcccaggccaaggccccgccagatgactcctgtaaccccaggagtgtctatgagaacttccgactctggcagcactacaagcccctggcccggaggcaccttccccagagtcctgacaccgaagcgctttcgtgcttcctcatcccagttctccgatccctggcccggcggaagcccaccatgaccctggaggagggactgtggcgggccatgcgggaatggcagcacacgagcaactttgaccggatgatcttctacgagatggcggaaaagttcctggagtttgaggctgaggaggagatgcagattcagaaatcgcaatggatgaaggggccccagtgcctgcctcctccagccacaccgaggcttgaacctcgaggacccccggcccctgaggtggtcaagcagccagtgtaccttcccagcaaggccggccccaaggccccgactgcctgcctgccaccacccaggccccagaggccagtgaccaaggcccgccggccaccaccccggccccaccggcgagcagagaccaaggcccgcctgccaccacccaggccccagagaccagcagagaccaaggtccctgaggagatccccccagaagtggtgcaggagtatgtggacatcatggaggagctgctggggccttctctcggggccacgggggagcccgagaaacaacgggaagagggcgaagtgaagcagccacaggaagaggactggacgcccccagacccgggcctcctgagctacactgacaagctgtgttcccagaaagacttcgtcaccaaggtggaggccgtcattcatccccaattcctggaagaattgctttccccagatccacagatggatttcttggccctaagccaggagctggagcaggaggaaggactcacccttgcccagctagtggagaagcgcctcctacccttgaaggagaaacagcatgcgagggcagcccctagtcgtggcacagcccggttggactcaagttcttctaagtttgcagctggccaaggagcagagagagacgtccctgacccccaacaaggggttggcatggaaacctgcccaccccagacgactgcccgggactctcagggacgaggcagagcacacactggcatggccaggtccaaagactctgttgtgcttttgggatgtcaggattcccctgggctgagggctgcccggccaacctctcctccccaggaccacagacccacctgccctggcgtgggtaccaaggatgccttggatctccctggagggtctcctgtcagggagtcacatgggctggctcaggggtcaagtgaggaggaggaactccccagcctggccttcctcttgggttcccagcacaagcttctgccctggtggctaccccagagccctgtccctgcctcgggccttctcagcccagaaaagtggggaccccagggaactcatcagtccccatctgctgagagaagaggcctcaacctagcaccttctcctgccaacaaggccaagaagcgacctctctttggaagcctgtcccctgctgaaaagacaccccacccagggcctgggctcagggtctctggggagcaatccctgacttgggggctgggtggcccctcacagtctcaaaagagaaagggtgaccccttggtctccaggaaggagaagaagcagcgttgtagccagtaggggcttctgagcaggctctctggggccgatccccaaggatggggctctggcatccgatgccccaaagcggtcaaaagcttcttctcccccagtgctgatcttgctgggccttagctttggagggtaggggagggaggggagggagagggtggcctgaatggggagggcaggaagggagggtctggggggaaggggctggggagtgggggtgggaagcagtgtgttgggggcctcgtgtgtaagtgtgaataaatgtagttgtcttgg

SEQ ID NO: 336138 - DNA, 866 bp, Artificial Sequence
  derived and/or modified sequence
cacgggggagcccgagaaacaacgggaagagggcgaagtgaagcagccacaggaagaggactggacgcccccagacccgggcctcctgagctacactgacaagctgtgttcccagaaagacttcgtcaccaaggtggaggccgtcattcatccccaattcctggaagaattgctttccccagatccacagatggatttcttggccctaagccaggagctggagcaggaggaaggactcacccttgcccagctagtggagaagcgcctcctacccttgaaggagaaacagcatgcgagggcagcccctagtcgtggcacagcccggttggactcaagttcttctaagtttgcagctggccaaggagcagagagagacgtccctgacccccaacaaggggttggcatggaaacctgcccaccccagacgactgcccgggactctcagggacgaggcagagcacacactgcctcgggccttctcagcccagaaaagtggggaccccagggaactcatcagtccccatctgctgagagaagaggcctcaacctagcaccttctcctgccaacaaggccaagaagcgacctctctttggaagcctgtcccctgctgaaaagacaccccacccagggcctgggctcagggtctctggggagcaatccctgacttgggggctgggtggcccctcacagtctcaaaagagaaagggtgaccccttggtctccaggaaggagaagaagcagcgttgtagccagtaggggcttctgagcaggctctctggggccgatccccaaggatggggctctggcatccgatgccccaaagcggtcaaaagcttcttctcccccagtgctgatcttgctgggc

SEQ ID NO: 336139 - DNA, 2637 bp, Artificial Sequence
  derived and/or modified sequence
atggaggtgaagggccccagcggccgctccttctgctgtgagagcgagggccagttcaagagctgcctgaagaggcacacccccagcctgctgctgcccagctcctggaagggcaacagcggcagctgcctgatggccaaggccctgcacaggatgagccccacccccaacagctgccccctgcccctgcccctgtgcaggatgtctggagtgctgtgcagcaggaacctcttcaccttcaagttcagcctcttccagctggacagcggggccagcggggagcccggccacagcctgggcctgaccctgggcttcagccactgcggcaactgccagacagctgtggtgtctgcccagcctgagggcatggccagcaatggagcctacccagccctgggccctggggtgacagccaaccctggcaccagcctgtctgtgttcaccgccctgcccttcaccaccccagcccctggccctgcccacggccccctgctggtgacagctggggcccctcctgggggccccctggtgctgagcaccctgcccagcacccccctggtgacagagcaggacggctgcggccccagcggggccggggccagcaatgtgtttgtgcagatgaggacagaggtgggccctgtgaaggccgcccaggcccagaccctggtgctgacccaggcccccctggtgtggcaggcccctggggccctgtgtggcggcgtggtgtgccccccacccctgctgctggccgccgcccctgtggtgcctgtgatggccgcccaggtggtgggcggcacccaggcctgtgagggcggctggagccagggcctgcccctgcccccacctcctcctcctgctgcccagctgccccccatcgtgtcccagggcaatgccggcccctggccccagggcgcccacggggagggcagcctggccagcagccaggccaaggcccccccagatgacagctgcaaccccaggtctgtgtatgagaacttccggctgtggcagcactacaagcccctggcccggcggcacctgccccagagcccagacacagaggccctgagctgcttcctgatccctgtgctgcggagcctggcccggaggaagcccaccatgaccctggaggagggcctgtggagggccatgagggagtggcagcacaccagcaactttgacaggatgatcttctatgagatggccgagaagttcctggagtttgaggccgaggaggagatgcagatccagaagagccagtggatgaagggcccccagtgcctgcccccaccagccaccccccggctggagccccggggccccccagcccctgaggtggtgaagcagcctgtgtacctgcccagcaaggccggccccaaggcccccacagcctgcctgcccccaccccggccccagaggcctgtgaccaaggcccggcggcccccaccccggccccacagaagagctgagaccaaggcccggctgcccccaccccggccccagaggcctgctgagaccaaggtgcctgaggagatccccccagaggtggtgcaggagtatgtggacatcatggaggagctgctgggccccagcctgggcgccactggagagcctgagaagcagcgggaggagggggaggtgaagcagccccaggaggaggactggaccccaccagaccccggcctgctgagctacacagacaagctgtgcagccagaaggactttgtgaccaaggtggaggccgtcatccacccccagttcctggaggagctgctgagcccagacccccagatggacttcctggccctgagccaggagctggagcaggaggagggcctgaccctggcccagctggtggagaagaggctgctgcccctgaaggagaagcagcacgcccgggccgcccccagccggggcacagcccggctggacagcagcagcagcaagtttgctgctggccagggcgctgagagagatgtgcctgtgccccagcagggcgtgggcatggagacctgccccccccagaccacagcccgggacagccagggccggggccgggcccacacaggcatggcccggagcaaggacagcgtggtgctgctgggctgccaggacagccctggcctgcgggccgcccggcccaccagccccccccaggaccaccggcccacctgccctggggtgggcaccaaggatgccctggacctgcccggcggcagccctgtgcgggagagccacggcctggcccagggcagcagcgaggaggaggagctgcccagcctggccttcctgctgggcagccagcacaagctgctgccctggtggctgccccagagccctgtgcctgccagcggcctgctgagccctgagaagtggggcccccagggcacccaccagttccccagcgctgagcggcggggcctgaacctggcccccagccctgccaacaaggccaagaagaggcccctgtttggcagcctgagccctgctgagaagaccccccaccctggccctggcctgcgggtgtctggagagcagagcctgacctggggcctgggcggccccagccagagccagaagaggaagggggaccccctggtgtccaggaaggagaagaagcagcgctgcagccagtag

SEQ ID NO: 336140 - DNA, 2418 bp, Artificial Sequence
  derived and/or modified sequence
atgttccaggagcctgtgtacttccagatcttcttccagctggacagcggggccagcggggagcccggccacagcctgggcctgaccctgggcttcagccactgcggcaactgccagacagctgtggtgtctgcccagcctgagggcatggccagcaatggagcctacccagccctgggccctggggtgacagccaaccctggcaccagcctgagcgtcttcaccgccctgcccttcaccaccccagcccctggccctgcccacggccccctgctggtgacagctggggcccctcctgggggccccctggtgctgagcaccctgcccagcacccccctggtgacagagcaggacggctgcggccccagcggggccggggccagcaatgtgtttgtgcagatgaggacagaggtgggccctgtgaaggccgcccaggcccagaccctggtgctgacccaggcccccctggtgtggcaggcccctggggccctgtgtggcggcgtggtgtgccccccacccctgctgctggccgccgcccctgtggtgcctgtgatggccgcccaggtggtgggcggcacccaggcctgtgagggcggctggagccagggcctgcccctgcccccacctcctcctcctgctgcccagctgccccccatcgtgtcccagggcaatgccggcccctggccccagggcgcccatggagagggcagcctggccagcagccaggccaaggcccccccagatgacagctgcaaccccaggtctgtgtatgagaacttccggctgtggcagcactacaagcccctggcccggcggcacctgccccagagcccagacacagaggccctgagctgcttcctgatccctgtgctgcggagcctggcccggaggaagcccaccatgaccctggaggagggcctgtggagggccatgagggagtggcagcacaccagcaactttgacaggatgatcttctatgagatggccgagaagttcctggagtttgaagctgaggaggagatgcagatccagaagagccagtggatgaagggcccccagtgcctgcccccaccagccaccccccggctggagccccggggccccccagcccctgaggtggtgaagcagcctgtgtacctgcccagcaaggccggccccaaggcccccacagcctgcctgcccccaccccggccccagaggcctgtgaccaaggcccggcggcccccaccccggccccaccggcgggcagagaccaaggcccggctgcccccaccccggccccagaggcctgctgagaccaaggtgcctgaggagatccccccagaggtggtgcaggagtatgtggacatcatggaggagctgctgggccccagcctgggcgccaccggggagcctgagaagcagcgggaggagggggaggtgaagcagccccaggaggaggactggaccccaccagaccccggcctgctgagctacacagacaagctgtgcagccagaaggactttgtgaccaaggtggaggccgtcatccacccccagttcctggaggagctgctgagcccagacccccagatggacttcctggccctgagccaggagctggagcaggaggagggcctgaccctggcccagctggtggagaagaggctgctgcccctgaaggagaagcagcacgcccgggccgcccccagccggggcacagcccggctggacagcagcagcagcaagtttgctgctggccagggcgctgagagagatgtgcctgtgccccagcagggcgtgggcatggagacctgccccccccagaccacagcccgggacagccagggccggggccgggcccacacaggcatggcccggagcaaggacagcgtggtgctgctgggctgccaggacagccctggcctgcgggccgcccggcccaccagccccccccaggaccaccggcccacctgccctggggtgggcaccaaggatgccctggacctgcccggcggcagccctgtgcgggagagccacggcctggcccagggcagcagcgaggaggaggagctgcccagcctggccttcctgctgggcagccagcacaagctgctgccctggtggctgccccagagccctgtgcctgccagcggcctgctgagccctgagaagtggggcccccagggcacccaccagttccccagcgctgagcggcggggcctgaacctggcccccagccctgccaacaaggccaagaagaggcccctgtttggcagcctgagccctgctgagaagaccccccaccctggccctggcctgcgggtgtctggagagcagagcctgacctggggcctgggcggccccagccagagccagaagaggaaaggagaccccctggtgtccaggaaggagaagaagcagcgctgcagccagtag

SEQ ID NO: 336141 - DNA, 789 bp, Artificial Sequence
  derived and/or modified sequence
atggaggagctgctgggccccagcctgggcgccaccggggagcctgagaagcagcgggaggagggggaggtgaagcagccccaggaggaggactggaccccaccagaccccggcctgctgagctacacagacaagctgtgcagccagaaggactttgtgaccaaggtggaggccgtcatccacccccagttcctggaggagctgctgagcccagacccccagatggacttcctggccctgagccaggagctggagcaggaggagggcctgaccctggcccagctggtggagaagaggctgctgcccctgaaggagaagcagcacgcccgggccgcccccagccggggcacagcccggctggacagcagcagcagcaagtttgctgctggccagggcgctgagagagatgtgcctgtgccccagcagggcgtgggcatggagacctgccccccccagaccacagcccgggacagccagggccggggccgggcccacacagccagcggcctgctgagccctgagaagtggggcccccagggcacccaccagttccccagcgctgagcggcggggcctgaacctggcccccagccctgccaacaaggccaagaagaggcccctgtttggcagcctgagccctgctgagaagaccccccaccctggccctggcctgcgggtgtctggagagcagagcctgacctggggcctgggcggccccagccagagccagaagaggaagggggaccccctggtgtccaggaaggagaagaagcagcgctgcagccagtag

SEQ ID NO: 336142 - DNA, 1971 bp, Artificial Sequence
  derived and/or modified sequence
tgactgacccaggcccccctggtgtggcaggcccctggggccctgtgtggcggcgtggtgtgccccccacccctgctgctggccgccgcccctgtggtgcctgtgatggccgcccaggtggtgggcggcacccaggcctgtgagggcggctggagccagggcctgcccctgcccccacctcctcctcctgctgcccagctgccccccatcgtgtcccagggcaatgccggcccctggccccagggcgcccacggggagggcagcctggccagcagccaggccaaggcccccccagatgacagctgcaaccccaggtctgtgtatgagaacttccggctgtggcagcactacaagcccctggcccggcggcacctgccccagagcccagacacagaggccctgagctgcttcctgatccctgtgctgcggagcctggcccggaggaagcccaccatgaccctggaggagggcctgtggagggccatgagggagtggcagcacaccagcaactttgacaggatgatcttctatgagatggccgagaagttcctggagtttgaggccgaggaggagatgcagatccagaagagccagtggatgaagggcccccagtgcctgcccccaccagccaccccccggctggagccccggggccccccagcccctgaggtggtgaagcagcctgtgtacctgcccagcaaggccggccccaaggcccccacagcctgcctgcccccaccccggccccagaggcctgtgaccaaggcccggcggcccccaccccggccccacagaagagctgagaccaaggcccggctgcccccaccccggccccagaggcctgctgagaccaaggtgcctgaggagatccccccagaggtggtgcaggagtatgtggacatcatggaggagctgctgggccccagcctgggcgccactggagagcctgagaagcagcgggaggagggggaggtgaagcagccccaggaggaggactggaccccaccagaccccggcctgctgagctacacagacaagctgtgcagccagaaggactttgtgaccaaggtggaggccgtcatccacccccagttcctggaggagctgctgagcccagacccccagatggacttcctggccctgagccaggagctggagcaggaggagggcctgaccctggcccagctggtggagaagaggctgctgcccctgaaggagaagcagcacgcccgggccgcccccagccggggcacagcccggctggacagcagcagcagcaagtttgctgctggccagggcgctgagagagatgtgcctgtgccccagcagggcgtgggcatggagacctgccccccccagaccacagcccgggacagccagggccggggccgggcccacacaggcatggcccggagcaaggacagcgtggtgctgctgggctgccaggacagccctggcctgcgggccgcccggcccaccagccccccccaggaccaccggcccacctgccctggggtgggcaccaaggatgccctggacctgcccggcggcagccctgtgcgggagagccacggcctggcccagggcagcagcgaggaggaggagctgcccagcctggccttcctgctgggcagccagcacaagctgctgccctggtggctgccccagagccctgtgcctgccagcggcctgctgagccctgagaagtggggcccccagggcacccaccagttccccagcgctgagcggcggggcctgaacctggcccccagccctgccaacaaggccaagaagaggcccctgtttggcagcctgagccctgctgagaagaccccccaccctggccctggcctgcgggtgtctggagagcagagcctgacctggggcctgggcggccccagccagagccagaagaggaagggggaccccctggtgtccaggaaggagaagaagcagcgctgcagccagtag

SEQ ID NO: 336143 - DNA, 2634 bp, Artificial Sequence
  derived and/or modified sequence
atggaggtgaagggccccagcggccgctccttctgctgtgagagcgagggccagttcaagagctgcctgaagaggcacacccccagcctgctgctgcccagctcctggaagggcaacagcggcagctgcctgatggccgaggccctgcacaggatgagccccacccccaacagctgccccctgcccctgcccctgtgcaggatgtctggagtgctgtgcagcaggaacctcttcaccttcaagttctccttccagctggacagcggggccagcggggagcccggccacagcctgggcctgaccctgggcttcagccactgcggcaactgccagacagctgtggtgtctgcccagcctgagggcatggccagcaatggagcctacccagccctgggccctggggtgacagccaaccctggcaccagcctgagcgtcttcaccgccctgcccttcaccaccccagcccctggccctgcccacggccccctgctggtgacagctggggcccctcctgggggccccctggtgctgagcaacttccccagcacccccctggtgacagagcaggacggctgcggccccagcggggccggggccagcaatgtgtttgtgcagatgaggacagaggtgggccctgtgaaggccgcccaggcccagaccctggtgctgacccagacccccctggtgtggcaggcccctggggccctgtgtggcggcgtggtgtgccccccacccctgctgctggccgccgcccctgtggtgcctgtgatggccgcccaggtggtgggcggcacccaggcctgtgagggcggctggagccagggcctgcccctgcccccacctcctcctcctgctgcccagctgccccccatcgtgtcccagggcaatgccggcccctggccccagggcgcccatggagagggcagcctggccagcagccaggccaaggcccccccagatgacagctgcaaccccaggtctgtgtatgagaacttccggctgtggcagcactacaagcccctggcccggcggcacctgccccagagcccagacacagaggccctgagctgcttcctgatccctgtgctgcggagcctggcccggaggaagcccaccatgaccctggaggagggcctgtggagggccatgagggagtggcagcacaccagcaactttgacaggatgatcttctatgagatggccgagaagttcctggagtttgaagctgaggaggagatgcagatccagaagagccagtggatgaagggcccccagtgcctgcccccaccagccaccccccggctggagccccggggccccccagcccctgaggtggtgaagcagcctgtgtacctgcccagcaaggccggccccaaggcccccacagcctgcctgcccccaccccggccccagaggcctgtgaccaaggcccggcggcccccaccccggccccaccggcgggcagagaccaaggcccggctgcccccaccccggccccagaggcctgctgagaccaaggtgcctgaggagatccccccagaggtggtgcaggagtatgtggacatcatggaggagctgctgggccccagcctgggcgccaccggggagcctgagaagcagcgggaggagggggaggtgaagcagccccaggaggaggactggaccccaccagaccccggcctgctgagctacacagacaagctgtgcagccagaaggactttgtgaccaaggtggaggccgtcatccacccccagttcctggaggagctgctgagcccagacccccagatggacttcctggccctgagccaggagctggagcaggaggagggcctgaccctggcccagctggtggagaagaggctgctgcccctgaaggagaagcagcacgcccgggccgcccccagccggggcacagcccggctggacagcagcagcagcaagtttgctgctggccagggcgctgagagagatgtgcctgacccccagcagggcgtgggcatggagacctgccccccccagaccacagcccgggacagccagggccggggccgggcccacacaggcatggcccggagcaaggacagcgtggtgctgctgggctgccaggacagccctggcctgcgggccgcccggcccaccagccccccccaggaccaccggcccacctgccctggggtgggcaccaaggatgccctggacctgcccggcggcagccctgtgcgggagagccacggcctggcccagggcagcagcgaggaggaggagctgcccagcctggccttcctgctgggcagccagcacaagctgctgccctggtggctgccccagagccctgtgcctgccagcggcctgctgagccctgagaagtggggcccccagggcacccaccagagccccagcgctgagcggcggggcctgaacctggcccccagccctgccaacaaggccaagaagaggcccctgtttggcagcctgagccctgctgagaagaccccccaccctggccctggcctgcgggtgtctggagagcagagcctgacctggggcctgggcggccccagccagagccagaagaggaaaggagaccccctggtgtccaggaaggagaagaagcagcgctgcagccagtag

SEQ ID NO: 336144 - DNA, 789 bp, Artificial Sequence
  derived and/or modified sequence
atggaggagctgctgggccccagcctgggcgccaccggggagcctgagaagcagcgggaggagggggaggtgaagcagccccaggaggaggactggaccccaccagaccccggcctgctgagctacacagacaagctgtgcagccagaaggactttgtgaccaaggtggaggccgtcatccacccccagttcctggaggagctgctgagcccagacccccagatggacttcctggccctgagccaggagctggagcaggaggagggcctgaccctggcccagctggtggagaagaggctgctgcccctgaaggagaagcagcacgcccgggccgcccccagccggggcacagcccggctggacagcagcagcagcaagtttgctgctggccagggcgctgagagagatgtgcctgacccccagcagggcgtgggcatggagacctgccccccccagaccacagcccgggacagccagggccggggccgggcccacacagccagcggcctgctgagccctgagaagtggggcccccagggcacccaccagagccccagcgctgagcggcggggcctgaacctggcccccagccctgccaacaaggccaagaagaggcccctgtttggcagcctgagccctgctgagaagaccccccaccctggccctggcctgcgggtgtctggagagcagagcctgacctggggcctgggcggccccagccagagccagaagaggaagggggaccccctggtgtccaggaaggagaagaagcagcgctgcagccagtag

SEQ ID NO: 336145 - DNA, 2421 bp, Artificial Sequence
  derived and/or modified sequence
atgttccaggagcctgtgtacttccagatcttcctgttccagctggacagcggggccagcggggagcccggccacagcctgggcctgaccctgggcttcagccactgcggcaactgccagacagctgtggtgtctgcccagcctgagggcatggccagcaatggagcctacccagccctgggccctggggtgacagccaaccctggcaccagcctgtctgtgttcaccgccctgcccttcaccaccccagcccctggccctgcccacggccccctgctggtgacagctggggcccctcctgggggccccctggtgctgagcaacttccccagcacccccctggtgacagagcaggacggctgcggccccagcggggccggggccagcaatgtgtttgtgcagatgaggacagaggtgggccctgtgaaggccgcccaggcccagaccctggtgctgacccagacccccctggtgtggcaggcccctggggccctgtgtggcggcgtggtgtgccccccacccctgctgctggccgccgcccctgtggtgcctgtgatggccgcccaggtggtgggcggcacccaggcctgtgagggcggctggagccagggcctgcccctgcccccacctcctcctcctgctgcccagctgccccccatcgtgtcccagggcaatgccggcccctggccccagggcgcccacggggagggcagcctggccagcagccaggccaaggcccccccagatgacagctgcaaccccaggtctgtgtatgagaacttccggctgtggcagcactacaagcccctggcccggcggcacctgccccagagcccagacacagaggccctgagctgcttcctgatccctgtgctgcggagcctggcccggaggaagcccaccatgaccctggaggagggcctgtggagggccatgagggagtggcagcacaccagcaactttgacaggatgatcttctatgagatggccgagaagttcctggagtttgaggccgaggaggagatgcagatccagaagagccagtggatgaagggcccccagtgcctgcccccaccagccaccccccggctggagccccggggccccccagcccctgaggtggtgaagcagcctgtgtacctgcccagcaaggccggccccaaggcccccacagcctgcctgcccccaccccggccccagaggcctgtgaccaaggcccggcggcccccaccccggccccacagaagagctgagaccaaggcccggctgcccccaccccggccccagaggcctgctgagaccaaggtgcctgaggagatccccccagaggtggtgcaggagtatgtggacatcatggaggagctgctgggccccagcctgggcgccactggagagcctgagaagcagcgggaggagggggaggtgaagcagccccaggaggaggactggaccccaccagaccccggcctgctgagctacacagacaagctgtgcagccagaaggactttgtgaccaaggtggaggccgtcatccacccccagttcctggaggagctgctgagcccagacccccagatggacttcctggccctgagccaggagctggagcaggaggagggcctgaccctggcccagctggtggagaagaggctgctgcccctgaaggagaagcagcacgcccgggccgcccccagccggggcacagcccggctggacagcagcagcagcaagtttgctgctggccagggcgctgagagagatgtgcctgacccccagcagggcgtgggcatggagacctgccccccccagaccacagcccgggacagccagggccggggccgggcccacacaggcatggcccggagcaaggacagcgtggtgctgctgggctgccaggacagccctggcctgcgggccgcccggcccaccagccccccccaggaccaccggcccacctgccctggggtgggcaccaaggatgccctggacctgcccggcggcagccctgtgcgggagagccacggcctggcccagggcagcagcgaggaggaggagctgcccagcctggccttcctgctgggcagccagcacaagctgctgccctggtggctgccccagagccctgtgcctgccagcggcctgctgagccctgagaagtggggcccccagggcacccaccagagccccagcgctgagcggcggggcctgaacctggcccccagccctgccaacaaggccaagaagaggcccctgtttggcagcctgagccctgctgagaagaccccccaccctggccctggcctgcgggtgtctggagagcagagcctgacctggggcctgggcggccccagccagagccagaagaggaagggggaccccctggtgtccaggaaggagaagaagcagcgctgcagccagtag

SEQ ID NO: 336146 - DNA, 759 bp, Artificial Sequence
  derived and/or modified sequence
tgaacaggagagcctgagaagcagcgggaggagggggaggtgaagcagccccaggaggaggactggaccccaccagaccccggcctgctgagctacacagacaagctgtgcagccagaaggactttgtgaccaaggtggaggccgtcatccacccccagttcctggaggagctgctgagcccagacccccagatggacttcctggccctgagccaggagctggagcaggaggagggcctgaccctggcccagctggtggagaagaggctgctgcccctgaaggagaagcagcacgcccgggccgcccccagccggggcacagcccggctggacagcagcagcagcaagtttgctgctggccagggcgctgagagagatgtgcctgacccccagcagggcgtgggcatggagacctgccccccccagaccacagcccgggacagccagggccggggccgggcccacacagccagcggcctgctgagccctgagaagtggggcccccagggcacccaccagagccccagcgctgagcggcggggcctgaacctggcccccagccctgccaacaaggccaagaagaggcccctgtttggcagcctgagccctgctgagaagaccccccaccctggccctggcctgcgggtgtctggagagcagagcctgacctggggcctgggcggccccagccagagccagaagaggaagggggaccccctggtgtccaggaaggagaagaagcagcgctgcagccagtag

SEQ ID NO: 336147 - DNA, 2637 bp, Artificial Sequence
  derived and/or modified sequence
atggaggtgaagggccccagcggccggagcttctgctgcgagagcgaagggcagtttaaatcttgtctcaagagacacaccccgtcgttgctactgccctcttcttggaaaggaaatagcggatcgtgtctcatggcaaaggccctgcataggatgagccccactccaaacagttgtcccttaccgctgcctctttgcagaatgtctggggtgctgtgttcacggaacctgtttacattcaagttttctttattccagctggattccggcgccagtggagaacccggccactctctgggcctgacattaggattttcccattgtggcaattgccagacagctgttgtctctgcccaaccagaagggatggcgtccaacggcgcttaccctgcccttggaccaggagtcaccgctaatcctgggaccagcctaagcgtgtttacggcactccctttcaccactcctgctcctggacccgcccacggcccactcctcgttaccgctggagcacccccgggcggcccactcgtgctgtcaacactgccttcgacccccctagtcacagagcaggatggttgcggaccaagcggtgctggagcaagtaatgttttcgttcagatgaggacagaagtcggccctgtaaaggcagcccaggcacaaacccttgtgctgactcaggctcccttagtctggcaggccccaggcgcgctctgcggtggtgtcgtgtgcccccccccactgcttctagctgccgcccccgttgttcctgtgatggccgcccaggttgtgggaggaacccaggcctgcgagggaggatggtctcaaggactgcccctgcctccgcccccaccccccgcagcccagcttcccccaatcgtgtctcaggggaacgccggtccctggcctcagggagctcatggcgagggttctttagcctcaagtcaggccaaggccccgcccgacgatagttgcaatccccgcagcgtgtacgagaacttcaggctatggcagcattataagcccctcgctagaaggcatctgccacagtcaccagacaccgaggccttgtcctgtttcctgatccccgtactgagaagtctggcacggcgtaagcctacaatgaccctcgaagagggcttatggcgcgcaatgagggagtggcagcacaccagcaacttcgacaggatgattttttacgagatggctgaaaaatttttggaatttgaagcagaagaagagatgcagatacaaaagagccaatggatgaaaggccctcaatgcttgccccctccagcaacccccaggctcgagcccagggggccacctgctccggaggtcgtgaaacagcctgtttaccttcctagtaaagcggggccaaaggcacctacggcttgcctgccacctccgcggccacagcgtcctgtgacaaaagctcgtcggcccccaccacgccctcacaggagggcagaaacaaaggcccgcctaccacccccaagaccccaaaggccagcagagaccaaagtgcctgaagagatcccccccgaagtggtccaggaatatgttgacattatggaagaactactgggcccatctttaggcgccactggtgaacccgagaaacagcgcgaagaaggggaagtgaagcagccacaggaggaagattggacacctccagatcctggtctgctgtcttacaccgataaactctgtagccagaaggacttcgtcacaaaggtcgaagccgtgatccatccacagttcctggaggagcttctgagccccgatccccagatggacttcttggccttgtctcaggagctggagcaggaggaaggccttaccctggcacagcttgtggagaaacgattgttgcccctgaaagaaaagcagcatgctcgggcagctccctctcgtggcaccgctaggcttgacagctcctctagcaaattcgctgccggccaaggtgccgagagggatgtgcccgtgcctcagcagggtgtgggaatggaaacctgcccgccacagacgacggcccgggactctcagggaagaggtcgtgctcacacaggcatggcccgttcaaaagattccgtggtcctgttgggttgccaggactccccaggactcagggcagcccgaccaactagcccgccccaggatcataggccaacttgccccggtgttgggacaaaggacgctctggatcttcccggtggttcccccgtgagggagtcccacgggttagcccaagggtcaagcgaggaggaggagctcccatcactggccttcctcttgggctcccagcacaaacttttaccttggtggctcccacaaagccctgtgccagcatccggactcttatcgccggagaagtgggggccgcagggcacgcatcaattcccatcggcagaacgacggggtctgaatctggcaccaagccctgcaaataaggccaagaaaaggccactgttcgggagtctctcacccgccgagaaaacaccccatcctgggcccgggctgcgagtctcgggcgagcaaagtctgacttggggattaggaggacctagccagagccaaaaacggaagggtgacccacttgtatcccggaaggaaaaaaaacaacgctgttctcaatag

SEQ ID NO: 336148 - DNA, 2418 bp, Artificial Sequence
  derived and/or modified sequence
atgttccaggagcccgtgtacttccagatcttcttccagctggactcgggcgcaagcggcgagccaggccattcactgggcttgactctggggttttcacattgcgggaactgccagaccgcggtggtgtccgcgcaacctgaggggatggcctcaaatggggcctatccggccctgggccctggcgttaccgctaatcctgggacaagcctttctgtgttcactgcactgccatttactactcccgcccctggccccgcccacgggccactgctggtgacggcgggcgctcctcctggtgggcccctggtgctgtccacactgcccagcactcctttggtgactgagcaggacggttgcggcccttcgggcgcgggggctagtaatgtgttcgttcagatgcggacggaggtggggccggtgaaagcagcacaggcgcagactctcgtgctcacgcaggcacccctggtttggcaggccccgggcgccttatgcggaggggttgtctgtcccccgcccctgctcttggctgccgctcccgtggtcccagtgatggctgcacaggttgttggtgggacacaggcctgtgaaggaggctggtctcaggggcttcccctacctccacctcctccccccgcagctcaacttccccccatcgtgagtcagggaaacgctggtccatggccgcagggagcgcatggtgaaggaagcctggcaagtagccaggccaaggctccccccgacgacagttgtaatccccgctctgtatacgaaaactttcggctgtggcagcactataagcccctggcccggagacacttgccacaatccccagataccgaggccttgtcatgctttctgatccccgtgctcaggtccctcgcacggagaaaaccgaccatgacgctggaagagggactgtggagagcaatgcgcgaatggcaacacaccagtaatttcgaccgcatgatattttatgagatggccgagaagtttctcgagtttgaagcggaggaagagatgcaaatccagaaaagtcaatggatgaaagggcctcaatgcctcccgcctccagcaacacccagactggagccgcgcggccctcccgcaccagaagttgtcaaacaaccggtctatctcccgagtaaggcggggcccaaagcaccaaccgcttgccttccaccaccccggccacaacgacccgtcaccaaggctcgacgacctccaccccgccctcaccgacgggcagaaactaaggctagactcccccctccgcgaccgcagagacctgctgagaccaaggtaccagaggagattcctccagaggtggtacaagaatatgtggatattatggaggaactgttaggcccttcgttgggcgccaccggggagccggagaagcagcgggaggaaggcgaagtcaagcaacctcaggaggaagactggacgccccccgatcccggtcttcttagttataccgataagctatgctcacagaaggacttcgtgacgaaggtggaggctgttattcacccacagttcctggaggagctactgtccccagatccccaaatggatttcttagccctgtcgcaggaattggagcaagaggaaggactgactctggcccagctcgtggaaaagaggctgttaccattgaaagagaagcaacacgctagagccgcccctagcagagggacggcccgattggattcaagtagtagcaagtttgctgcaggccagggtgctgagagggacgtccccgtaccgcagcaaggtgtgggaatggagacttgccctccccaaacaaccgcgagagatagccaggggagaggccgagctcatacagggatggctagaagcaaggacagcgttgtgctgctaggctgtcaagactcacccggccttagggccgcccggcctacatctcccccacaggaccataggcccacctgtccaggggtcggtaccaaagacgctctcgacctcccaggcgggagccctgtccgtgagtcacacggcctagcacagggatcaagcgaagaagaggagttaccatccctcgccttcctcctaggcagccagcataaactgctgccctggtggctgccgcaaagccctgtgcctgcgagcgggctcttgtcccctgagaaatggggacctcaggggacgcatcagttcccctcagccgagcgacgcggcttgaacctggcgcctagccccgctaataaagccaagaagcgaccgctgttcggcagcctcagccccgctgagaagacccctcaccctggtccgggactccgtgtctcaggggagcagtcactaacctggggtctaggtggccccagtcagtcacagaagcgtaaaggggacccgctggtatctaggaaggaaaagaagcaacgatgcagtcagtag

SEQ ID NO: 336149 - DNA, 789 bp, Artificial Sequence
  derived and/or modified sequence
atggaggagctgctgggccccagcctgggcgccaccggcgagcccgaaaagcaacgcgaggaaggggaggtgaagcagccccaggaggaagactggacccctcctgaccccggactgctgagttacactgataaactgtgtagccagaaggatttcgtcacaaaagttgaggccgtgatccatcctcagttcctcgaggaattgctgtcacccgatccccagatggacttcctggctctgagccaggagttggaacaagaggagggccttacactggcgcagctggtcgagaaacgcctactgcccttgaaggagaaacaacacgcacgcgccgcaccctcacgaggaaccgcaagattggactcttctagctcaaagtttgccgccggtcagggtgctgaaagggatgtccccgtccctcagcagggtgttgggatggagacttgtcctccccagaccaccgccagggatagccagggacgaggtagagcccatactgcctcagggttgttgtcaccagagaagtggggcccacagggtacccatcagttccccagcgcagagaggagggggttgaatctcgccccttcgccagcaaataaagcaaagaaacggcctcttttcgggtctctgtcacccgccgagaaaaccccccaccctggacccggcctgagggtcagcggggagcagtcattaacctggggactggggggcccttcccaaagtcaaaagagaaagggtgatccccttgtttcgagaaaggaaaagaaacagaggtgctcccagtag

SEQ ID NO: 336150 - DNA, 1971 bp, Artificial Sequence
  derived and/or modified sequence
tgactgacccaggcccccctggtgtggcaggcccccggcgccctgtgtggtggtgtggtgtgtcctccgcctctgctcctggcggctgcacctgtggtgccagttatggctgctcaggtggtcggcgggactcaggcttgcgagggcggatggtcccagggtctgcccctcccgcccccacctccccccgccgcccagctgccccctatcgtgtcccagggcaatgctggcccctggccacaaggggctcacggtgagggatccctggcttcatcccaagccaaagctcctcccgacgatagttgcaatccacggagtgtttacgagaactttcgcttgtggcaacactacaagccactagccaggagacacttgcctcagtctcccgacacagaagccttgtcttgcttcctcatcccagtgctgcgtagcttagctcgaaggaaaccaaccatgacattggaggaggggttgtggagagccatgcgcgagtggcaacacacttccaattttgaccgcatgatcttctatgagatggcagagaaatttctcgaatttgaggcagaggaggagatgcaaattcagaagagccagtggatgaagggcccacagtgcttgcctccaccagcaactccacggcttgagccacgagggccccctgcgcccgaggtggtgaagcagccagtgtatctgccatctaaggcagggccaaaggcaccaactgcctgtctacctcccccaagaccccagcgtcccgtaacaaaggccaggagacctcccccacggccccaccgtagggcagagaccaaggccagactacctccaccacggccacagcgacccgctgagactaaggttcctgaggagatcccgcctgaagtggttcaggagtacgtggatataatggaggagctactcggcccttctctgggtgcgaccggggagcctgagaagcagcgggaagaaggcgaggtaaagcagccccaggaggaagactggactccaccagacccggggttgttgagttataccgacaagctgtgctcccagaaagactttgtcaccaaagtggaggctgtcatccacccacagtttttggaagaactgttgtcaccagacccacagatggacttcctggccctgtcacaagaacttgaacaggaggaaggcctcacattggcgcagctggtagagaaaaggctactgccactcaaggagaaacagcatgcacgtgccgccccatctcgcggaacagcaagactggacagctcgtcctcaaaattcgccgccggtcagggggcagagcgggacgtgcccgtgccccaacagggagttgggatggaaacctgcccaccacagacaactgcccgtgacagccagggccggggaagagcacatactgggatggcgaggtccaaggattcagtcgtccttctaggatgtcaggattcgcctggcttacgggccgcccgtcccacgtctcctccccaggaccataggccaacctgcccaggcgtggggactaaggatgccctggatcttccgggcgggagtcccgtacgagaaagtcacggcctggctcaaggcagctccgaggaggaagagctgccttctctcgccttcctccttggcagccagcacaagttgctgccctggtggctaccccagtccccagtgcctgcttctggactgctatccccagagaagtgggggccgcaggggacacaccagttcccctccgccgaaagaagaggcctgaatttagccccttctccggcaaacaaagcaaagaagcgtcctctattcgggtccttaagcccagccgagaagacgcctcacccaggcccagggctgagggtttcgggtgaacagtcattgacatggggcttggggggaccatcacaatcacagaaacgtaaaggagaccccctcgtcagccggaaggaaaagaaacagcgttgcagtcagtag

SEQ ID NO: 336151 - DNA, 2634 bp, Artificial Sequence
  derived and/or modified sequence
atggaggtgaagggccccagcggccggagcttctgctgcgagagcgagggccagtttaaatcctgtttaaagcggcataccccaagccttctgctaccttcctcctggaaaggaaattctggcagttgcctaatggctgaagctctgcataggatgtctccaacaccaaactcatgtcctttgccactcccactgtgtcgcatgtctggagtgctttgctcaagaaacctattcacattcaaattctcttttcagctggatagcggggctagcggggagccggggcactctctcggacttactctggggttttctcactgtggaaactgtcagaccgccgttgtgagcgcacagcctgaaggcatggcttctaatggagcctatcccgcactgggccctggtgtcaccgccaaccccggaacgagtctgtcggttttcacagctctgccatttacgaccccggctcctgggcctgctcacggaccactactcgtaactgcgggagcacccccaggggggccactggtcctctccaactttcccagtactcccttggtcacagagcaggacggctgtggcccgagcggcgctggggcatcaaatgtgtttgtacagatgcggactgaggtcggccctgtcaaggctgcccaggctcaaacactcgtgctgacacagaccccgctcgtatggcaggcccccggtgcgctgtgtgggggcgttgtgtgtcctcctcccctgctgctcgcagctgccccagtggtgcccgtgatggcagcgcaggtcgtgggcggcacacaggcttgcgagggaggatggtcccaaggcctaccactgcccccccctcccccacccgccgcgcaactaccaccaatcgtgtcacagggcaacgctggcccttggccacagggcgcccatggggaaggcagtctggcaagctcgcaggccaaggccccgcctgacgacagttgtaaccccaggtctgtctacgagaatttcaggttgtggcagcactacaaaccactggccagaaggcatctccctcagagtccggatactgaggctctgagttgctttctaattccagtgcttcggagtctcgctcgccggaagccaaccatgaccttagaggagggtctgtggcgcgccatgcgggaatggcagcacacatcaaacttcgatcggatgattttttacgagatggcagaaaagtttctcgagttcgaagctgaagaggagatgcagattcaaaagtcacagtggatgaagggcccccagtgcctgccaccccctgcgactcctagactggaacctcgtggacccccagctcccgaagtggttaaacaaccggtgtaccttccctcaaaggcaggtcccaaggcacctactgcttgtctgcctcctcccaggcctcagcgcccagtcacaaaggccagacgcccgccccccagaccccacaggcgagcagaaacgaaagctcgtcttcctccgccccgcccccagcggcccgccgaaacaaaggtccctgaagagattcctcccgaggtggtgcaagagtacgtggacatcatggaggagctgctaggtccctctctgggagcgacgggggagcccgagaagcagagggaagagggagaggttaagcagccgcaggaggaggactggacccctccggaccctgggttgcttagctacacggacaaactgtgtagccagaaagactttgtgacaaaggtggaggcggtgattcacccccagttcctggaggagctcctaagccccgacccgcaaatggacttcctggccttgagccaggaactagaacaggaagagggcctgaccctcgcccagcttgtggaaaagcgactgctaccccttaaagagaaacaacatgcccgagcagccccctcacgcgggacggctagactggactccagctctagcaaatttgctgccggccaaggcgccgaaagagacgtccccgaccctcagcagggagttggaatggagacttgtcctccgcagaccaccgctagggactcacaggggaggggcagggcccatacaggcatggctcggtccaaggacagtgtcgtcttgctgggctgtcaagattcccctggactgcgggcagcgcgacctacatctccaccccaagatcataggccaacatgcccaggtgttggaaccaaggacgctctcgacctcccgggtggctctccagtgcgtgaaagccacggcctggctcagggcagttccgaagaagaagaactgccctccctcgcgtttctgcttggaagccagcataagttgctcccatggtggctacctcagtcaccagtacccgcttctggcctgttgtcaccggaaaagtggggcccgcaaggcacccaccagtccccatcagcggagcgtcgagggctgaacttagctccctctccagcaaataaggctaagaagcggccactattcggaagcctgagccctgcagaaaagacgccacatcccggccccggtttaagagtttctggagagcagtcgctcacctggggcttgggaggaccctctcaatctcaaaaacgtaagggcgaccctctggtctcccggaaagaaaaaaaacaacggtgcagtcaatag

SEQ ID NO: 336152 - DNA, 789 bp, Artificial Sequence
  derived and/or modified sequence
atggaggagctgctgggccccagcctgggcgccaccggcgagcccgagaaacaacgggaggagggagaagtgaagcagccgcaggaagaggactggactccaccagatcctgggctactctcttatactgacaagctttgttcacagaaagacttcgtgaccaaagtggaggcagtgattcatcctcagttcttggaagagttactgagtcctgacccacagatggatttcctggccctgagtcaggagctggagcaggaagaagggctgacactcgcacaactggtggagaagcgattgctgcctctcaaagagaaacagcacgcaagggcagcaccttctaggggaacagccagattggatagcagtagcagtaaatttgcagccggccagggcgcggagagagacgtgccggatcctcaacagggagttggcatggaaacctgccccccacagacaacagcccgcgatagtcagggcagaggccgtgctcataccgcctctggtcttctgtcgcccgagaagtggggtccccagggcacacatcagtccccgagcgcagagcggagaggactgaacctcgctccctcaccggccaacaaggcaaaaaagagacctctcttcggctctctctcccccgctgagaagaccccgcatcctggtccaggactgcgtgtctccggagaacagagtctgacatggggtctcggcggcccgtcacaatcccagaaaaggaagggcgatccgttagtgagcagaaaggaaaaaaaacaaagatgctcccagtag

SEQ ID NO: 336153 - DNA, 2421 bp, Artificial Sequence
  derived and/or modified sequence
atgttccaggagcccgtgtacttccagatcttcctgttccagctggacagcggggccagcggggagcccgggcacagcctcgggttaactctcggtttctcgcattgtggcaactgccaaacagcagtagtgagcgctcagcctgagggcatggcatccaatggggcctaccctgccctcggtccgggcgtgacggctaatcctggaacaagcctaagtgtttttactgcactgcccttcaccactcccgctccaggccctgcccatggccccttactagtcacagccggagcgcccccaggagggcctctggtattgtccaacttccccagcacccctctggtgaccgagcaggacggatgcggacctagcggggccggggcttcaaatgtttttgtccaaatgcggaccgaagtggggcccgtaaaagccgcacaagcacaaaccctcgttctgacacagaccccactggtatggcaagctcccggcgcgttgtgcggcggcgtggtttgcccaccaccactgttgctggccgccgctccagtggtgcccgtaatggctgcccaggtggtgggcggaacacaggcatgcgaaggtggttggtcccaggggcttccactcccccccccacctccacctgcagcccagctccctccaatcgtaagccaggggaatgccggcccctggccccaaggggcccatggagagggctcacttgcctcttcccaagcaaaggccccacccgacgattcatgtaatcctcgtagtgtatacgagaactttcggttgtggcagcattacaaacccctcgcccgccgacacctaccccagtccccagacaccgaggctttgtcctgtttcctcatacccgtcttgcgttctcttgccaggcggaagcccactatgactttagaggaggggctttggagggccatgagagaatggcagcacacgagcaactttgaccggatgatcttctatgaaatggccgagaagttcttggaattcgaagcagaggaggagatgcaaattcaaaaatcccagtggatgaagggccctcagtgtctccctccccccgccacgcccagactagagccccggggaccccccgccccggaagtggtcaagcagcctgtataccttccatccaaggcaggccccaaagcaccgactgcatgcctgccgcctccccgaccgcagcggcccgtaacaaaagcgaggcgcccccccccccgacctcacagacgagccgagaccaaggctcgtctgcctccaccccgcccccagcgccccgctgagactaaagtcccagaggagatcccccccgaggtggtgcaggaatatgttgatatcatggaggaattgctaggtcctagtcttggggcaactggggagccggagaaacagagagaggagggagaggtgaagcagccgcaagaagaggactggacacccccggaccctggcttgctctcttacaccgacaagctgtgctctcagaaggacttcgtgacgaaagtggaagccgtgatccatcctcaatttctggaagaactgctaagtcccgaccctcagatggactttttggctttgtcccaggagctcgagcaggaagaggggctgaccctcgctcagttagtggaaaaacgcctcctgcccctgaaggagaagcagcacgctcgcgcggcaccttcccgtggcactgctaggctcgactcctcctcctcaaagttcgccgctggacagggcgctgagagggacgtccccgacccacagcagggagttggcatggaaacctgccccccgcagacaacagcccgcgatagtcaagggaggggacgcgcacataccggtatggccaggtccaaagactctgtggttctgctcgggtgtcaggattccccggggctgagggcggctaggcctacgagcccaccccaggaccaccggccaacctgtcctggagtgggtaccaaggatgctctagatctgcccgggggatctccggtgagagagagtcatgggctggcccagggctcgagtgaagaggaggagttacctagtttagcatttttgttagggtcccagcacaagctgctgccctggtggctgccacagtcgcctgtgcccgcatctggactgttatctcctgaaaaatggggaccccaaggtactcatcaaagtcccagcgcagagagaagaggcctgaacctcgccccttccccggccaataaggcaaaaaagcgacctttgtttggcagcctcagtccagccgagaaaaccccccaccccggacccgggctgcgagtatccggagagcagtccctgacctgggggctgggtggaccttcccagagccaaaagcgcaagggagatccactggtgtcacgaaaggaaaagaagcagcgttgtagccagtag

SEQ ID NO: 336154 - DNA, 759 bp, Artificial Sequence
  derived and/or modified sequence
tgaaccggcgagcccgagaagcagcgggaggagggcgaggtgaagcaaccacaggaggaagattggactccaccagacccaggcctactttcctacacagataaactatgctctcagaaagactttgtaacaaaggttgaagccgtgattcacccccagtttcttgaggaactactatccccggacccacagatggatttcctggctttgtctcaggagctcgaacaggaagaaggactgacccttgcgcagctcgtggaaaaaaggctgctgcctctcaaagagaaacagcatgctcgcgccgcgccaagcagaggtaccgcgcgtctcgactcctcctcttcgaaattcgccgccggccagggcgctgagagagatgtccccgacccgcaacagggggtgggcatggagacctgcccaccccagacaacagccagggacagccaaggcagaggcagagcccacacagcgagtggactcttgtcgcctgagaaatggggacctcaagggactcaccagtccccatcggccgagagacgaggacttaatctggcaccatcgccagccaataaagccaaaaaaagaccactttttggaagtctgtcaccggcagaaaaaacgccacaccctggccccgggcttcgcgtctctggcgaacagagcctgacctggggactgggcgggccctcacaaagccagaaacgaaagggggacccattagtgtctaggaaagagaagaaacaaagatgttcccaatag

SEQ ID NO: 336155 - DNA, 2637 bp, Artificial Sequence
  derived and/or modified sequence
atggaagtgaagggacccagtggaaggagtttttgctgtgaaagcgaaggtcagttcaagagttgtttgaaaaggcacaccccaagcctgcttcttccttcttcatggaagggaaactccggatcctgcctgatggcaaaagccttacacagaatgtcacctactcccaacagctgtcccctccctctgccgctatgccggatgtctggggtactgtgttcccgcaacttgttcacttttaaattctcgctctttcagttggattctggggcatctggggaaccaggtcacagcctgggcctaacattggggtttagccattgcggaaattgccagaccgccgttgtgtctgcacagcccgagggaatggcctcaaacggcgcataccctgccctcggcccaggcgtcactgcgaaccctggaaccagtctgtccgtgtttaccgcactgccattcacaacccccgctcctggtcccgcacatggcccattactggtgaccgcaggggctccacccggaggacctctggtattgagcactctgcctagcaccccgctggtcacagaacaggacggctgcggccctagcggcgctggcgcatctaatgtgttcgtccaaatgagaactgaggtgggacccgtgaaggcagcacaggcccaaacactcgtgttaacccaggctcccttggtgtggcaagcaccgggagctctgtgcggaggagtggtctgtccgccacccctcctcctggccgctgcacctgtggtcccggtgatggctgcacaggtagtagggggtacccaggcgtgcgaggggggttggtctcaagggctgccactgccacctcctcctcccccagcggcacagctgccacctatcgtgtcgcaagggaatgctggtccgtggccacagggcgctcatggcgaggggtctctggccagttcacaggctaaagctcctcctgacgactcctgcaatcctaggtctgtctatgagaactttcggctgtggcagcattataaacccctggcacgcagacatttgccccaatcacccgatactgaggcactgtcctgttttcttatccccgtgcttagaagcttagcacggcgaaaaccaacgatgactctggaagaaggcttgtggagagccatgagggaatggcaacatacttctaatttcgaccgaatgatcttttacgagatggctgagaagttcctcgaatttgaggcggaggaggaaatgcaaatacagaagtcccaatggatgaagggaccccagtgcttacccccacctgcaacccccaggctggaacctaggggtcccccagcacctgaagtcgttaagcagcccgtgtacctcccatccaaggccggtcctaaggctcccaccgcctgtcttcctccacctcgcccacagaggccagttaccaaggcgaggagaccgccaccacgaccccatagacgcgcagagaccaaggcgagactgccccctccgaggccacagagaccggcagagaccaaggtacccgaagagatcccccctgaagtcgtgcaggaatacgtggatatcatggaagagctgctcggcccatcccttggcgcaacaggggagcccgagaagcagagagaggaaggggaggtaaaacagccacaggaagaggattggaccccgccagaccccggtctcctaagttataccgataaactctgctcacagaaagattttgtcactaaagtggaggcagttatccaccctcagtttctcgaggaactgctctcacctgacccacaaatggatttcctcgccctatctcaggagctggagcaagaagaagggctgacattagcccaacttgtggagaagcgcctcctacctttgaaagaaaagcagcacgcccgagccgctcctagccggggtaccgcgaggctcgattccagttcttccaaattcgccgctggacaaggcgcagagcgtgacgttcctgtgccgcagcagggcgtcggaatggagacttgcccacctcagacaacagcacgcgactcccagggccgtggcagggcccacactgggatggccagatccaaggattcagtggtgctacttggatgccaggattcacctggtctgagggccgcacggccaacatccccccctcaggaccatcgcccaacttgcccgggtgtcggcaccaaagatgcactggacctaccgggaggtagcccagtcagagaatcacacggcctcgcccagggctcttctgaggaagaggaactaccctccctggcatttctcctgggctcccagcataaactgctgccttggtggctgccgcagtcacccgtaccagccagcgggctgctctctcctgaaaagtggggcccacaagggacacatcagttcccaagcgcggagagacgcggtctaaatctcgctccaagccccgctaacaaggcgaaaaaacggcctcttttcgggtcactatctccggctgagaaaaccccccacccgggaccaggactacgcgtaagtggcgaacagtcactgacatggggcttaggcggaccaagccagagccagaagcgtaagggcgaccccttggtatcgcgcaaagaaaaaaagcagaggtgcagtcagtag

SEQ ID NO: 336156 - DNA, 2418 bp, Artificial Sequence
  derived and/or modified sequence
atgttccaggaacctgtatattttcagatatttttccaactggattctggcgcttctggagagcctgggcacagcctggggctcacactcggattttcccactgtggcaactgccagacagcagttgttagcgcccagcccgagggcatggctagtaatggggcatatcctgctctgggcccaggcgtgaccgcgaatcctggaacctcactgagtgtgtttacagcattacccttcaccacccctgccccaggcccagcccatggccctttactggtgaccgcaggcgctccacctgggggacctctcgttctgagcaccttaccatctaccccactggttacggaacaggacggatgtggaccttccggcgctggagctagtaatgtttttgtgcagatgaggaccgaggtcggaccagttaaggcagcacaggcacagacgctcgtgctgacgcaggccccactagtatggcaggcaccaggcgctctgtgtggtggagtagtgtgtccaccacctctcctccttgctgctgcaccagtcgtaccagtcatggccgcacaggttgtcggtggcacgcaggcttgcgaaggcggatggtcacagggactgcctctgcctcctccaccccctccagcagctcagctgccacctatcgttagccaagggaacgctggcccatggcctcagggcgcacatggggaaggctccctcgcctccagccaggcaaaggctcccccagatgactcctgtaatcctaggagtgtgtacgagaactttaggctgtggcagcactacaagcctctggcaagacgccacctcccccaatccccagatactgaagcactcagctgcttccttattcctgtacttcggtccctcgcacgaaggaaaccaaccatgacactggaggagggactgtggcgggcaatgcgggagtggcagcacacgtcaaatttcgatcgcatgattttttatgagatggcagagaagtttctagagttcgaggcggaggaggagatgcagatccagaaatcacagtggatgaaggggcctcagtgcctcccccctcctgcgacccccaggctggagccccgaggaccaccagcacccgaagtcgtgaaacagccggtgtatctgccatccaaggctggccctaaagcccctaccgcctgccttcccccaccaagaccccaacgccctgttacgaaggccagacggccaccacctcgcccacatagacgggctgaaactaaggccagactgccaccccctcgtcctcagcgtcccgcagagaccaaggtcccggaagaaattcctcccgaagtagtgcaggagtacgtggacatcatggaagaactcctgggccctagtctgggagctacaggagagcctgagaaacagagggaggagggcgaggttaaacagcctcaagaggaagattggacaccaccagacccaggtcttctgtcctatacagataaattgtgtagtcagaaggacttcgtcacgaaagttgaggcggtgatccacccccagttcctggaagagcttctgagcccagatccgcaaatggattttctcgctttgtcacaagaactggagcaggaagaaggactgactctcgctcagctggttgagaagaggctgttaccacttaaggagaagcagcacgcccgtgcagcgccaagcagaggtacggccaggctggattcctcatcatctaaatttgccgctggtcagggggctgaacgggatgtacccgtgccccaacagggagtgggcatggagacatgcccccctcagaccacggcacgagacagtcagggcagagggagggcccacaccgggatggcgcgtagcaaggactccgttgtcctgctgggctgccaggattcacctggccttcgggctgctaggcctacctctcccccacaggatcatcgaccaacatgtccaggcgtgggcacaaaggacgccctggacctaccaggcggaagccccgtgcgcgaatcccatggactggcgcagggaagttcagaggaggaagagctgccaagcctcgcattcttactgggctctcaacacaaattactgccttggtggctaccccaatcacctgtcccggcttctggcctgttatctcccgagaagtggggtccccagggaactcaccagttcccatccgcagagaggagaggattgaatttggctccaagccccgctaataaggccaaaaaacgtcctctgtttggctccctatctcctgcagaaaaaacaccacaccctggccctggtctcagagtatctggtgaacaatctctcacgtgggggcttggcggaccgtctcagagccagaaacgaaaaggtgatccattagtctcgcgaaaggagaagaagcagaggtgctcccaatag

SEQ ID NO: 336157 - DNA, 789 bp, Artificial Sequence
  derived and/or modified sequence
atggaggagcttctgggcccatccttgggggcaaccggcgaacctgagaagcagcgggaagagggtgaggtgaagcaaccacaggaagaggactggacgcctccggatcccggtctactctcttacaccgataagctgtgttcccagaaagatttcgtgactaaggtggaggccgtgatccacccgcagtttctcgaggagctactttctcctgatcctcaaatggatttcctcgctctttctcaagagcttgagcaggaagagggtctcactctggcacagctggtggagaaacgcctgttacccctgaaagaaaagcagcatgctcgtgccgcaccttccagagggaccgcacgcctggactcctcaagcagcaagttcgcggcaggtcaaggcgcagagagggatgtgcccgtgccacagcaaggggtgggaatggaaacttgccccccacagaccactgcaagggattctcagggtcgcggtagggcccacacggcaagcggactgctcagtccagaaaaatggggcccacagggcactcaccagttcccttctgcagagaggcgcggactgaacctggctccttctcccgcaaacaaggcaaagaaaaggccactttttggatcccttagccccgctgagaaaaccccccatcccggtcctggtctcagagttagcggggagcagagtctaacgtggggcctcggagggccaagccagagccaaaagaggaaaggagatccgctagtttccagaaaagagaagaagcagcggtgcagtcagtag

SEQ ID NO: 336158 - DNA, 1971 bp, Artificial Sequence
  derived and/or modified sequence
tgactgacacaggcccctctcgtgtggcaagccccaggagcactttgcggtggcgttgtatgcccgcctccgctgctcctggcggctgcacctgttgtgccagtgatggcggcacaggtcgtgggcggaactcaggcgtgcgaaggcggatggtcacaggggctcccactgccccctccccctcccccagctgcccagctcccgccaatcgttagccagggtaatgccggtccctggccccaaggagctcacggagagggctcattagcttcttcccaagctaaggcaccacccgacgattcctgtaacccccgatcagtgtatgaaaactttaggctatggcaacattacaaacccctggccagaagacatcttccgcagtcccctgacactgaggctctgagctgttttttgattccagtgctgcgttcattagctcgacggaagcccactatgaccctggaggagggactgtggcgggctatgcgggagtggcagcatacgtcaaatttcgacaggatgattttctacgaaatggccgagaaattcttggagttcgaggcggaggaggaaatgcagattcagaaatcacaatggatgaaggggcctcaatgtctgccacctccagccacacctcgcctggaaccacgcggtccacctgcacctgaggttgtaaagcagccagtgtatttgcccagtaaggccggtcccaaggcccctactgcgtgcctgcctcctcctcggcctcaaagacctgtgacaaaagcccgaagaccacctcccaggcctcatcgcagagcggagacaaaggcacgcctgccccctccccgaccccagagaccagctgagaccaaggtccccgaggagatccctccggaagtggtccaagaatacgtggacataatggaggaactcttggggccatcccttggcgctactggcgagcctgaaaaacagcgcgaggagggcgaggtcaaacagccacaagaagaggactggacgcctccggaccctggtctcctgtcttatactgataagctctgctctcaaaaggatttcgtcactaaagtggaggccgtgatccaccctcagttcctggaggagctgctcagcccagacccgcagatggattttctggccctctcacaggagctggaacaggaagaaggtctgacacttgctcagttagtcgagaagcggctactgcctcttaaggaaaagcaacacgccagggccgctccaagtagagggactgcacggctcgatagttcatcttcgaagtttgcagctggacaaggggctgagagagatgttcccgtgccacagcagggcgtgggtatggagacatgtccgcctcagacaaccgcgcgtgactcgcagggaagaggtagggcacacaccggaatggcacgcagcaaggacagcgttgtacttctcggatgccaggactctccaggactgcgtgcggctagacccacatccccacctcaggaccatagacccacatgtcccggtgttggaacaaaggacgcactggatctacctggcggatcacccgtgagagagagccatggcctggcacaggggagtagcgaggaagaggagctgccctcccttgcctttctgctcggctcacaacataaactgctgccatggtggctacctcaatcaccagtgcctgcaagcggactgctgagtccagaaaaatggggccctcagggcacacatcagttcccgagcgccgagcgtcgtgggttgaacttagccccaagcccagccaataaggccaagaagcggccactgttcggctccttaagtcctgccgaaaaaacaccgcaccccggacccggactgcgtgtatctggggagcagtctctcacgtggggcctgggaggtccatcccagtcacagaaacgcaaaggcgaccctctggtgtcgcggaaagagaaaaaacagagatgttcccagtag

SEQ ID NO: 336159 - DNA, 2634 bp, Artificial Sequence
  derived and/or modified sequence
atggaggtaaagggccctagcggccgttcattttgctgcgaatccgaaggccagttcaagtcatgtttgaagcgtcacactcccagcttgctgcttccttcctcatggaagggtaattcaggatcctgtctgatggcagaagccctgcaccggatgtctcccactcccaactcgtgtccactccccttaccgctttgcaggatgtccggggtgctgtgttccaggaacctgtttacattcaaattctctttccagctggacagtggagcctcgggggagcctggtcacagtctagggcttactttgggcttttcccactgtggtaactgccagaccgctgtcgtttccgcccagccagaaggaatggcatcaaacggcgcttacccggcactgggcccaggcgtgacggctaatcctggcacctcactctccgtgttcacggcactgccattcaccactcccgcaccaggccctgcacacggcccattactggtgacagccggtgcaccacctgggggtcccctcgttttgagcaattttccgtcgacgcctcttgtcactgagcaggacgggtgtggacctagtggggcaggcgctagtaatgtgttcgtacagatgcgcacagaagttggtccggttaaagccgcacaggcccagaccctggttctcacgcagacccctctggtgtggcaggctcccggtgcgctttgtggaggggtggtgtgccctccccctctcctgctggcagcagcccctgtggtgcccgtcatggctgcgcaagtcgtaggtggaacccaagcttgtgaaggagggtggagccagggactccccttgccaccccctcccccacctgctgctcaattgcctcctatcgtgagtcaaggcaatgctggtccctggccccagggggctcacggcgaggggagcctcgccagcagccaggcaaaggccccaccagacgattcctgcaaccctagatctgtctatgagaatttcaggttatggcagcattacaaaccacttgcaagacgccacttgccacagtcccccgatactgaagcattgtcttgctttctaatccccgtgctgaggtcccttgcaaggcgtaaacccaccatgacactcgaagaaggactgtggcgggctatgcgagaatggcaacacacgtcaaatttcgacaggatgatcttttatgagatggccgagaaattcctcgagttcgaagctgaggaggagatgcaaattcagaaatcccagtggatgaagggccctcagtgcctgccacccccagctacacccagactggaaccccgtggccctccggcaccagaagttgtgaagcaaccagtgtatctgccctccaaagccggtcctaaggcacccaccgcatgcctgcctcccccaaggccccaacgcccagtgactaaagcccgtcgaccaccacctagacctcatcggagagccgaaaccaaggctaggctacccccacccaggccgcaacgtccggcagaaaccaaagtgcccgaagagatcccccctgaagtggtgcaggagtacgttgatatcatggaagaactcctgggtcctagcctgggcgcaacgggagaacctgagaagcagagggaggaaggagaggtgaagcagccacaagaagaagattggactccaccagaccctggcctcctgtcctacaccgacaaactctgctcacagaaagatttcgtgacaaaggtcgaagccgtaattcatccgcaatttcttgaggaattgctaagccccgacccccagatggactttcttgcactctctcaggagctggaacaagaggaaggactgactctggctcagctagtcgagaagcgcctcctacctctaaaggaaaaacagcacgctcgagccgctccctctagaggcaccgcccgactggattcaagttcttccaagtttgctgccggacagggagccgagcgcgatgtgcccgacccccaacagggcgtgggcatggaaacttgcccgccacagactacagccagggatagtcaggggaggggacgagctcataccggaatggcgcgtagcaaggactcagttgtgctcttgggatgccaggattcaccgggactgagggcagccagaccaacttctcccccacaagatcacagacccacgtgtcccggtgtgggaactaaggatgcgttggacttacctggtgggtctccagtgcgggagtctcacggcttggctcagggtagttctgaggaggaggaactgcctagcctggcgttcctgctggggtcccagcacaagttattaccctggtggctgccccagtcccctgtacctgcttctggtctgttaagcccggaaaaatggggacctcagggcacacaccaaagcccaagcgccgagagacggggattaaacttagctccttctccggctaataaagctaaaaagaggccactcttcggcagcctgagtcccgctgagaagactcctcaccccggacccggattgcgagtatctggggagcagagcctaacttggggtctgggcggacctagtcaaagtcagaagaggaaaggtgatcctctcgtaagtagaaaggaaaaaaagcagcggtgttcacaatag

SEQ ID NO: 336160 - DNA, 789 bp, Artificial Sequence
  derived and/or modified sequence
atggaggaactgttgggtccctccttgggggcaaccggtgaacccgaaaaacagcgggaggagggcgaggttaagcaaccccaggaagaagactggacacctccggatcctggactcctgagttatacagataagctgtgttcacagaaggactttgtgacaaaggtggaagcggttattcatcctcagttcctagaagaactgttgtctcctgaccctcaaatggatttccttgcactttcccaggaactggagcaggaggagggccttaccctggcacagctagtcgagaagaggctgttacctctgaaggagaagcagcacgccagagccgctccatcgagaggtactgctcgcctcgactcttcttcttcaaaatttgcagcaggccagggcgcagagcgggacgttcctgatccacagcagggagtgggaatggagacctgcccaccccagaccacagcccgtgactcccagggccgtggcagggcccacacggcatctggccttctctcgccagagaagtggggaccacagggcacccatcaatctccgtctgctgagcggcgaggcctcaatttagcccctagtccagcgaacaaggcgaaaaagaggccactgttcgggagtctgtcccccgctgaaaaaaccccacatccaggccctggcctgcgagtttccggcgagcaaagcctcacttggggtctcggaggaccatctcaaagccaaaaaaggaaaggcgacccactggtgagcagaaaagaaaagaagcagcgctgtagtcagtag

SEQ ID NO: 336161 - DNA, 2421 bp, Artificial Sequence
  derived and/or modified sequence
atgttccaggagcctgtgtatttccaaatcttcctgtttcagctggacagtggtgcctctggtgaacccggacactcactgggcttgacgctgggattttctcattgcggcaactgtcagaccgccgtcgtgagtgcgcagcctgaggggatggccagcaacggagcctatccggcactgggccctggcgtgacagccaaccctggcactagcctgagtgttttcaccgctttaccctttacgaccccggcacctggacccgcacatggtcccctcctagtcactgcaggcgcacctcccggaggcccactcgtgttaagcaactttccatctactcctcttgtcacagagcaggacggttgcggcccaagcggggcaggcgcttccaatgtttttgtgcaaatgcggaccgaggtgggaccagttaaagcagcacaggctcagacgctcgtgctgacacagaccccattggtatggcaagctcctggtgcgctctgcggaggtgtggtctgtcctccaccgctgctcctagcggcagccccagtggtccctgtcatggccgctcaggttgtgggcggaacccaggcttgcgagggaggttggtcacagggattacccctgccaccaccaccccctcctgccgcacagttgccaccaattgtgtcccaaggcaatgcagggccttggccacagggagcgcatggggaaggcagtttagcctcgtcccaggctaaagcgcctccagatgattcttgcaatccaaggtccgtctacgagaactttcgattatggcaacactacaagccactggcccgaagacaccttcctcagtctccagacacagaagcactctcctgctttctcattcctgtattacggtcacttgcccgacgcaaacctactatgactctggaagagggcctgtggcgcgcaatgagggagtggcagcataccagcaatttcgacaggatgattttctacgagatggctgaaaagttcctcgagttcgaggccgaagaagaaatgcagattcaaaagtctcagtggatgaagggtcctcagtgcctgcctccccctgccacacccaggctggaaccacgaggccctcccgcaccagaggtcgttaagcagcctgtgtacctcccatctaaggctgggcctaaagcccctactgcttgcctgccccctccccgaccacagcgccctgtgaccaaggctaggcgcccaccgcctagaccccacagaagagccgagaccaaagcgcgtctgcccccaccacgccctcagaggcctgctgagaccaaggtgcctgaggagatacctccggaggtagtgcaagagtacgtcgatatcatggaggaacttcttggtcccagcctgggtgcaactggcgagccagagaagcagagggaagaaggcgaagtgaaacagccacaggaagaggattggacccccccagaccccggactactcagctatactgataaactgtgcagccagaaggactttgtgacaaaggtcgaggcagtcatccacccacagtttcttgaagaacttctgtctcctgatcctcaaatggactttctcgcattgtctcaagaactggagcaggaggagggattgacacttgcccagctagtggagaaacggttgctgccattaaaagagaaacagcatgcacgtgccgcacccagccgaggtaccgcacgccttgactctagctcttccaaattcgcggctggccagggagcggaaagagacgtccctgacccccagcaaggcgtgggaatggagacttgcccccctcagaccacagcgagagacagtcagggcaggggacgagctcacacgggcatggctaggagtaaggacagcgtcgtgctccttggttgtcaagattctcctggcctccgggctgctcgccctacatctccccctcaggatcaccgcccaacgtgtcccggtgtgggaaccaaggacgctcttgacctgcccggtgggtcacctgtgcgcgagagccacgggttggctcagggttcaagcgaggaagaggagctgccctctctcgcctttctccttggcagccaacacaagctacttccgtggtggttaccccaaagcccggtgcctgcatccggtttactatctcccgagaagtggggtccacagggcacccatcagagtccctctgctgagagacgaggactcaacctcgcgccatcccccgctaataaggctaaaaagagaccgctatttgggtctttgtctcctgcagagaaaactccccatcctggtccgggtcttagagtatcaggtgagcagtccttaacatggggtttggggggaccctcccaatcgcagaagagaaagggagaccccctggtgagtcggaaggagaaaaaacagaggtgttcgcagtag

SEQ ID NO: 336162 - DNA, 759 bp, Artificial Sequence
  derived and/or modified sequence
tgaacaggagaacccgagaaacagagagaggaaggcgaggtgaaacaaccacaggaagaagattggactccacctgatcctggattactaagctataccgacaaattgtgtagccagaaagacttcgtcacgaaggtcgaagccgtcattcacccccagtttctggaggagttgctgtcgccggatccccaaatggattttctggccctgagccaggaactcgaacaggaagagggcctgaccttggcacagctagtggaaaaacggctgcttccgctgaaagagaaacagcacgctagagcagcgcctagtaggggaactgcacggctggattcctcctcctctaagttcgcggcagggcagggggctgagcgggacgtgcctgatccccaacagggggtaggaatggagacctgccccccacagaccacagctcgggactcccaaggaagggggagagcgcatactgcaagtgggctgctgtctccagaaaaatggggaccgcaaggtacacaccaaagtccatcagctgagcgcaggggcctcaacctcgcccctagccctgctaacaaggccaaaaagcggcctctgttcggaagcctgtcaccagctgagaaaaccccccaccccggtcccggactcagagtgtccggagaacagtccttgacttgggggctgggcggaccttcccagtctcagaagcgcaaaggggaccctctcgtcagtcgcaaagagaagaaacagagatgcagccaatag

SEQ ID NO: 336163 - protein, 629 aa, Artificial Sequence
  derived and/or modified sequence
MEVKGPSGRSFCCESEGQFKSCLKRHTPSLLLPSSWKGNSGSCLMAKALHRMSPTPNSCPLPLPLCRMSGVLCSRNLFTFKFSLFQLDSGASGEPGHSLGLTLGFSHCGNCQTAVVSAQPEGMASNGAYPALGPGVTANPGTSLSVFTALPFTTPAPGPAHGPLLVTAGAPPGGPLVLSTLPSTPLVTEQDGCGPSGAGASNVFVQMRTEVGPVKAAQAQTLVLTQAPLVWQAPGALCGGVVCPPPLLLAAAPVVPVMAAQVVGGTQACEGGWSQGLPLPPPPPPAAQLPPIVSQGNAGPWPQGAHGEGSLASSQAKAPPDDSCNPRSVYENFRLWQHYKPLARRHLPQSPDTEALSCFLIPVLRSLARRKPTMTLEEGLWRAMREWQHTSNFDRMIFYEMAEKFLEFEAEEEMQIQKSQWMKGPQCLPPPATPRLEPRGPPAPEVVKQPVYLPSKAGPKAPTACLPPPRPQRPVTKARRPPPRPHRRAETKARLPPPRPQRPAETKVPEEIPPEVVQEYVDIMEELLGPSLGATGEPEKQREEGEVKQPQEEDWTPPDPGLLSYTDKLCSQKDFVTKVEAVIHPQFLEELLSPDPQMDFLALSQELEQEEGLTLAQGAPSDAPGTDRC

SEQ ID NO: 336164 - protein, 562 aa, Artificial Sequence
  derived and/or modified sequence
MSGVLCSRNLFTFKFSLFQLDSGASGEPGHSLGLTLGFSYCGNCQTAVVSAQPEGMASNGAYPVLGPGVTANPGTSLSVFTALPFTTPAPGPAHGPLLVTAGAPPGGPLVLSTFPSTPLVTEQDGCGPSGAGASNVFVQMRTEVGPVKAAQAQTLVLTQAPLVWQAPGALCGGVVCPPPLLLAAAPVVPVMAAQVVGGTQACEGGWSQGLPLPPPPPPAAQLPPIVSQGNAGPWPQGAHGESSLASSQAKAPPDDSCNPRSVYENFRLWQHYKPLARRHLPQSPDTEALSCFLIPVLRSLARRKPTMTLEEGLWRAMREWQHTSNFDRMIFYEMAEKFLEFEAEEEMQIQKSQWMKGPQCLPPPATPRLEPRGPPAPEVVKQPVYLPSKAGPKAPTACLPPPRPQRPVTKARRPPPRPHRRAETKARLPPPRPQRPAETKVPEEIPPEVVQEYVDIMEELLGPSLGATGEPEKQREEGKVKQPQEEDWTPPDPGLLSYIDKLCSQKDFVTKVEAVIHPQFLEELLSPDPQMDFLALSQDLEQEEGLTLAQGAPSDAPGTDRC

SEQ ID NO: 336165 - protein, 629 aa, Artificial Sequence
  derived and/or modified sequence
MEVKGPSGRSFCCESEGQFKSCLKRHTPSLLLPSSWKGNSGSCLMAEALHRTSPTPNSCPLPLPLCRMSGVLCSRNLFTFKFSLFQLDSGASGEPGHSLGLTLGFSYCGNCQTAVVSAQPEGMASNGAYPVLGPGVTANPGTSLSVFTALPFTTPAPGPAHGPLLVTAGAPPGGPLVLSTFPSTPLVTEQDGCGPSGAGASNVFVQMRTEVGPVKAAQAQTLVLTQAPLVWQAPGALCGGVVCPPPLLLAAAPVVPVMAAQVVGGTQACEGGWSQGLPLPPPPPPAAQLPPIVSQGNAGPWPQGAHGESSLASSQAKAPPDDSCNPRSVYENFRLWQHYKPLARRHLPQSPDTEALSCFLIPVLRSLARRKPTMTLEEGLWRAMREWQHTSNFDRMIFYEMAEKFLEFEAEEEMQIQKSQWMKGPQCLPPPATPRLEPRGPPAPEVVKQPVYLPSKAGPKAPTACLPPPRPQRPVTKARRPPPRPHRRAETKARLPPPRPQRPAETKVPEEIPPEVVQEYVDIMEELLGPSLGATGEPEKQREEGKVKQPQEEDWTPPDPGLLSYIDKLCSQKDFVTKVEAVIHPQFLEELLSPDPQMDFLALSQDLEQEEGLTLAQGAPSDAPGTDRC

SEQ ID NO: 336166 - protein, 557 aa, Artificial Sequence
  derived and/or modified sequence
MFQEPVYFQIFLFQLDSGASGEPGHSLGLTLGFSHCGNCQTAVVSAQPEGMASNGAYPALGPGVTANPGTSLSVFTALPFTTPAPGPAHGPLLVTAGAPPGGPLVLSNFPSTPLVTEQDGCGPSGAGASNVFVQMRTEVGPVKAAQAQTLVLTQTPLVWQAPGALCGGVVCPPPLLLAAAPVVPVMAAQVVGGTQACEGGWSQGLPLPPPPPPAAQLPPIVSQGNAGPWPQGAHGEGSLASSQAKAPPDDSCNPRSVYENFRLWQHYKPLARRHLPQSPDTEALSCFLIPVLRSLARRKPTMTLEEGLWRAMREWQHTSNFDRMIFYEMAEKFLEFEAEEEMQIQKSQWMKGPQCLPPPATPRLEPRGPPAPEVVKQPVYLPSKAGPKAPTACLPPPRPQRPVTKARRPPPRPHRRAETKARLPPPRPQRPAETKVPEEIPPEVVQEYVDIMEELLGPSLGATGEPEKQREEGEVKQPQEEDWTPPDPGLLSYTDKLCSQKDFVTKVEAVIHPQFLEELLSPDPQMDFLALSQELEQEEGLTLAQGAPSDAPGTDRC

SEQ ID NO: 336167 - DNA, 1890 bp, Artificial Sequence
  derived and/or modified sequence
atggaggtgaagggccccagcggcagaagcttctgctgcgagagcgagggccagttcaagagctgcctgaagagacacacccccagcctgctgctgcccagcagctggaagggcaacagcggcagctgcctgatggccaaggccctgcacagaatgagccccacccccaacagctgccccctgcccctgcccctgtgcagaatgagcggcgtgctgtgcagcagaaacctgttcaccttcaagttcagcctgttccagctggacagcggcgccagcggcgagcccggccacagcctgggcctgaccctgggcttcagccactgcggcaactgccagaccgccgtggtgagcgcccagcccgagggcatggccagcaacggcgcctaccccgccctgggccccggcgtgaccgccaaccccggcaccagcctgagcgtgttcaccgccctgcccttcaccacccccgcccccggccccgcccacggccccctgctggtgaccgccggcgccccccccggcggccccctggtgctgagcaccctgcccagcacccccctggtgaccgagcaggacggctgcggccccagcggcgccggcgccagcaacgtgttcgtgcagatgagaaccgaggtgggccccgtgaaggccgcccaggcccagaccctggtgctgacccaggcccccctggtgtggcaggcccccggcgccctgtgcggcggcgtggtgtgccccccccccctgctgctggccgccgcccccgtggtgcccgtgatggccgcccaggtggtgggcggcacccaggcctgcgagggcggctggagccagggcctgcccctgccccccccccccccccccgccgcccagctgccccccatcgtgagccagggcaacgccggcccctggccccagggcgcccacggcgagggcagcctggccagcagccaggccaaggccccccccgacgacagctgcaaccccagaagcgtgtacgagaacttcagactgtggcagcactacaagcccctggccagaagacacctgccccagagccccgacaccgaggccctgagctgcttcctgatccccgtgctgagaagcctggccagaagaaagcccaccatgaccctggaggagggcctgtggagagccatgagagagtggcagcacaccagcaacttcgacagaatgatcttctacgagatggccgagaagttcctggagttcgaggccgaggaggagatgcagatccagaagagccagtggatgaagggcccccagtgcctgcccccccccgccacccccagactggagcccagaggcccccccgcccccgaggtggtgaagcagcccgtgtacctgcccagcaaggccggccccaaggcccccaccgcctgcctgcccccccccagaccccagagacccgtgaccaaggccagaagacccccccccagaccccacagaagagccgagaccaaggccagactgcccccccccagaccccagagacccgccgagaccaaggtgcccgaggagatcccccccgaggtggtgcaggagtacgtggacatcatggaggagctgctgggccccagcctgggcgccaccggcgagcccgagaagcagagagaggagggcgaggtgaagcagccccaggaggaggactggaccccccccgaccccggcctgctgagctacaccgacaagctgtgcagccagaaggacttcgtgaccaaggtggaggccgtgatccacccccagttcctggaggagctgctgagccccgacccccagatggacttcctggccctgagccaggagctggagcaggaggagggcctgaccctggcccagggcgcccccagcgacgcccccggcaccgacagatgctag

SEQ ID NO: 336168 - DNA, 1689 bp, Artificial Sequence
  derived and/or modified sequence
atgagcggcgtgctgtgcagcagaaacctgttcaccttcaagttcagcctgttccagctggacagcggcgccagcggcgagcccggccacagcctgggcctgaccctgggcttcagctactgcggcaactgccagaccgccgtggtgagcgcccagcccgagggcatggccagcaacggcgcctaccccgtgctgggccccggcgtgaccgccaaccccggcaccagcctgagcgtgttcaccgccctgcccttcaccacccccgcccccggccccgcccacggccccctgctggtgaccgccggcgccccccccggcggccccctggtgctgagcaccttccccagcacccccctggtgaccgagcaggacggctgcggccccagcggcgccggcgccagcaacgtgttcgtgcagatgagaaccgaggtgggccccgtgaaggccgcccaggcccagaccctggtgctgacccaggcccccctggtgtggcaggcccccggcgccctgtgcggcggcgtggtgtgccccccccccctgctgctggccgccgcccccgtggtgcccgtgatggccgcccaggtggtgggcggcacccaggcctgcgagggcggctggagccagggcctgcccctgccccccccccccccccccgccgcccagctgccccccatcgtgagccagggcaacgccggcccctggccccagggcgcccacggcgagagcagcctggccagcagccaggccaaggccccccccgacgacagctgcaaccccagaagcgtgtacgagaacttcagactgtggcagcactacaagcccctggccagaagacacctgccccagagccccgacaccgaggccctgagctgcttcctgatccccgtgctgagaagcctggccagaagaaagcccaccatgaccctggaggagggcctgtggagagccatgagagagtggcagcacaccagcaacttcgacagaatgatcttctacgagatggccgagaagttcctggagttcgaggccgaggaggagatgcagatccagaagagccagtggatgaagggcccccagtgcctgcccccccccgccacccccagactggagcccagaggcccccccgcccccgaggtggtgaagcagcccgtgtacctgcccagcaaggccggccccaaggcccccaccgcctgcctgcccccccccagaccccagagacccgtgaccaaggccagaagacccccccccagaccccacagaagagccgagaccaaggccagactgcccccccccagaccccagagacccgccgagaccaaggtgcccgaggagatcccccccgaggtggtgcaggagtacgtggacatcatggaggagctgctgggccccagcctgggcgccaccggcgagcccgagaagcagagagaggagggcaaggtgaagcagccccaggaggaggactggaccccccccgaccccggcctgctgagctacatcgacaagctgtgcagccagaaggacttcgtgaccaaggtggaggccgtgatccacccccagttcctggaggagctgctgagccccgacccccagatggacttcctggccctgagccaggacctggagcaggaggagggcctgaccctggcccagggcgcccccagcgacgcccccggcaccgacagatgctag

SEQ ID NO: 336169 - DNA, 1890 bp, Artificial Sequence
  derived and/or modified sequence
atggaggtgaagggccccagcggcagaagcttctgctgcgagagcgagggccagttcaagagctgcctgaagagacacacccccagcctgctgctgcccagcagctggaagggcaacagcggcagctgcctgatggccgaggccctgcacagaaccagccccacccccaacagctgccccctgcccctgcccctgtgcagaatgagcggcgtgctgtgcagcagaaacctgttcaccttcaagttcagcctgttccagctggacagcggcgccagcggcgagcccggccacagcctgggcctgaccctgggcttcagctactgcggcaactgccagaccgccgtggtgagcgcccagcccgagggcatggccagcaacggcgcctaccccgtgctgggccccggcgtgaccgccaaccccggcaccagcctgagcgtgttcaccgccctgcccttcaccacccccgcccccggccccgcccacggccccctgctggtgaccgccggcgccccccccggcggccccctggtgctgagcaccttccccagcacccccctggtgaccgagcaggacggctgcggccccagcggcgccggcgccagcaacgtgttcgtgcagatgagaaccgaggtgggccccgtgaaggccgcccaggcccagaccctggtgctgacccaggcccccctggtgtggcaggcccccggcgccctgtgcggcggcgtggtgtgccccccccccctgctgctggccgccgcccccgtggtgcccgtgatggccgcccaggtggtgggcggcacccaggcctgcgagggcggctggagccagggcctgcccctgccccccccccccccccccgccgcccagctgccccccatcgtgagccagggcaacgccggcccctggccccagggcgcccacggcgagagcagcctggccagcagccaggccaaggccccccccgacgacagctgcaaccccagaagcgtgtacgagaacttcagactgtggcagcactacaagcccctggccagaagacacctgccccagagccccgacaccgaggccctgagctgcttcctgatccccgtgctgagaagcctggccagaagaaagcccaccatgaccctggaggagggcctgtggagagccatgagagagtggcagcacaccagcaacttcgacagaatgatcttctacgagatggccgagaagttcctggagttcgaggccgaggaggagatgcagatccagaagagccagtggatgaagggcccccagtgcctgcccccccccgccacccccagactggagcccagaggcccccccgcccccgaggtggtgaagcagcccgtgtacctgcccagcaaggccggccccaaggcccccaccgcctgcctgcccccccccagaccccagagacccgtgaccaaggccagaagacccccccccagaccccacagaagagccgagaccaaggccagactgcccccccccagaccccagagacccgccgagaccaaggtgcccgaggagatcccccccgaggtggtgcaggagtacgtggacatcatggaggagctgctgggccccagcctgggcgccaccggcgagcccgagaagcagagagaggagggcaaggtgaagcagccccaggaggaggactggaccccccccgaccccggcctgctgagctacatcgacaagctgtgcagccagaaggacttcgtgaccaaggtggaggccgtgatccacccccagttcctggaggagctgctgagccccgacccccagatggacttcctggccctgagccaggacctggagcaggaggagggcctgaccctggcccagggcgcccccagcgacgcccccggcaccgacagatgctag

SEQ ID NO: 336170 - DNA, 1674 bp, Artificial Sequence
  derived and/or modified sequence
atgttccaggagcccgtgtacttccagatcttcctgttccagctggacagcggcgccagcggcgagcccggccacagcctgggcctgaccctgggcttcagccactgcggcaactgccagaccgccgtggtgagcgcccagcccgagggcatggccagcaacggcgcctaccccgccctgggccccggcgtgaccgccaaccccggcaccagcctgagcgtgttcaccgccctgcccttcaccacccccgcccccggccccgcccacggccccctgctggtgaccgccggcgccccccccggcggccccctggtgctgagcaacttccccagcacccccctggtgaccgagcaggacggctgcggccccagcggcgccggcgccagcaacgtgttcgtgcagatgagaaccgaggtgggccccgtgaaggccgcccaggcccagaccctggtgctgacccagacccccctggtgtggcaggcccccggcgccctgtgcggcggcgtggtgtgccccccccccctgctgctggccgccgcccccgtggtgcccgtgatggccgcccaggtggtgggcggcacccaggcctgcgagggcggctggagccagggcctgcccctgccccccccccccccccccgccgcccagctgccccccatcgtgagccagggcaacgccggcccctggccccagggcgcccacggcgagggcagcctggccagcagccaggccaaggccccccccgacgacagctgcaaccccagaagcgtgtacgagaacttcagactgtggcagcactacaagcccctggccagaagacacctgccccagagccccgacaccgaggccctgagctgcttcctgatccccgtgctgagaagcctggccagaagaaagcccaccatgaccctggaggagggcctgtggagagccatgagagagtggcagcacaccagcaacttcgacagaatgatcttctacgagatggccgagaagttcctggagttcgaggccgaggaggagatgcagatccagaagagccagtggatgaagggcccccagtgcctgcccccccccgccacccccagactggagcccagaggcccccccgcccccgaggtggtgaagcagcccgtgtacctgcccagcaaggccggccccaaggcccccaccgcctgcctgcccccccccagaccccagagacccgtgaccaaggccagaagacccccccccagaccccacagaagagccgagaccaaggccagactgcccccccccagaccccagagacccgccgagaccaaggtgcccgaggagatcccccccgaggtggtgcaggagtacgtggacatcatggaggagctgctgggccccagcctgggcgccaccggcgagcccgagaagcagagagaggagggcgaggtgaagcagccccaggaggaggactggaccccccccgaccccggcctgctgagctacaccgacaagctgtgcagccagaaggacttcgtgaccaaggtggaggccgtgatccacccccagttcctggaggagctgctgagccccgacccccagatggacttcctggccctgagccaggagctggagcaggaggagggcctgaccctggcccagggcgcccccagcgacgcccccggcaccgacagatgctag

SEQ ID NO: 336171 - DNA, 1890 bp, Artificial Sequence
  derived and/or modified sequence
atggaagtgaaagggccaagcggtcgttccttctgttgcgaaagcgagggtcaattcaaaagctgccttaaacggcatacaccgtctcttctgctgccttccagctggaaaggaaattcgggtagttgcttgatggcgaaggccttgcatcgcatgagtcccacccctaactcctgccctcttcctctgccgttgtgtaggatgtcaggggtgttgtgtagtagaaatctatttacctttaagttcagcctcttccagctcgactcgggcgcctcaggggagcctgggcatagcttggggttaacactcggtttttcgcactgcggaaattgtcaaaccgcagttgtgtcagctcaacccgaggggatggcgagcaatggcgcctaccccgctctcggccctggggttactgcaaaccctggaacttccctctctgtttttacggctctccccttcacgactcctgccccaggtcccgcacatggcccactcttagtgaccgcaggagcccctccaggcggtccactggtattgagcaccttgccatcaactcctcttgtaactgagcaggacggttgtgggccgtctggcgccggagcaagtaacgtgttcgtccagatgcgaacggaagtaggccccgtgaaggctgctcaggcccaaacccttgtgctcacccaggccccacttgtgtggcaggcacccggcgcactctgtggcggggtggtctgccctccgccacttctgttggccgccgctcccgtagtcccagtcatggccgcacaggttgtgggtggaactcaagcttgtgaaggtggttggtctcaagggctgcctctgcccccacctccaccgccagctgcccagttgcctcccattgtatctcagggaaatgctggcccatggccccaaggggcccacggtgagggaagccttgcatcttcccaagcaaaagcaccgcccgacgattcttgtaacccacggtcagtttacgagaattttagattgtggcagcattataaacccctggcccgcaggcatctgcctcaatctcccgacaccgaagccctaagttgcttcctcattcctgtgttgcgatctcttgctcgaagaaaacccaccatgaccctggaggaggggctgtggcgggcaatgcgcgagtggcagcacacctcgaacttcgacagaatgatcttttatgagatggccgagaagtttcttgaattcgaggcggaggaggagatgcagattcaaaaaagccagtggatgaaagggccccagtgcctgccaccacccgcaacacctagactcgagccccgcggtcctcccgcaccagaggtggtcaagcagccggtgtatctgccctccaaagccggcccaaaagcccccactgcctgtctgcccccgcctcgtcctcagcgcccagtgaccaaagctagacgacctccccctcgacctcatagacgggcggagactaaagcccggctgccaccaccacggccccagaggcctgccgagactaaagtccccgaagagattcctcccgaagttgtgcaggaatacgttgacataatggaagaattgctcgggcctagcttaggcgcaaccggcgaacccgaaaagcagcgggaagaaggcgaagttaaacagccacaggaggaagattggaccccgccggatcctgggcttctcagttacaccgacaaactctgctctcagaaggatttcgttaccaaagtcgaggctgtgatacacccgcagttccttgaagagctgctgtcccctgaccctcagatggacttcctcgcattgtctcaggagctggagcaggaggaaggcttaactctagctcagggggccccgtctgacgctccaggaacagacagatgttag

SEQ ID NO: 336172 - DNA, 1689 bp, Artificial Sequence
  derived and/or modified sequence
atgagtggcgtgctctgtagccggaatctgttcacatttaaattctcgctattccagctggactccggcgcttctggcgagccgggtcacagcttggggctcacattaggcttttcttactgcggaaactgccagaccgctgttgtgagcgctcagccagagggcatggcgagtaacggagcatatcctgtgctaggccccggcgtgacagcgaaccctggaacaagtctgtctgtgtttacagctctcccatttaccacgcccgcaccaggccccgcccacgggccattgctagtgacagccggagccccccctggtggcccactggtgttaagtacttttccgtcaaccccactcgtcaccgagcaggatggttgcggaccttcaggggccggcgcgtccaacgtcttcgtgcagatgcggacagaggtgggtccagtgaaggctgctcaggctcagaccctggtcctaacgcaagcccccctcgtgtggcaggcacccggggccctgtgtggcggcgtggtatgtccccctccgctgttgctggccgctgctcctgtggtgcctgtaatggcagcccaggtggtcggtggcacacaggcttgcgaaggcggatggagtcagggtctgcctctgcccccgcctccccctccggcagcccaattgccacccatcgtctcacagggaaatgccggcccttggccccagggtgcccacggagagagctcattggcttcttcccaggccaaagccccccccgatgactcttgtaaccccagaagtgtatacgaaaacttcaggttgtggcagcactataagcctctggcgaggaggcacctcccccagtccccagacacagaagcattgtcatgtttcctcatccccgtgctgaggtctctcgcacgtcgtaaaccaacgatgactctggaagaagggctctggagggcaatgcgggagtggcagcatacgagcaattttgacagaatgatattctacgagatggccgaaaagtttttggaattcgaggctgaggaagaaatgcagatacagaagtcccagtggatgaagggtcctcagtgcctgccacccccagctaccccccgcctagaacctcgcggaccaccagctcctgaagtggtgaagcagcctgtgtacctccccagcaaggccggccccaaggcacctacagcctgcctacctcctcctcggccacaaagacccgtgactaaggctaggcgcccaccccccaggccgcaccggcgggctgagactaaagctcgcctcccccctcctagacctcagcgccccgcagagactaaggtcccagaggagattccaccagaagttgtccaggagtacgttgacatcatggaggaactactcggtccatcgttgggcgccacaggcgaacctgagaagcagagggaagaagggaaggttaagcagcctcaggaagaggactggaccccccccgacccaggccttctgagctatatcgataagctgtgcagccagaaggacttcgtaactaaggtcgaagcagtcatccacccacagtttttggaggagttgttgtcccctgacccacagatggacttccttgccctaagccaggacttagaacaggaggaagggctaactcttgcccagggtgcaccctcagatgcccccggtacagatagatgttag

SEQ ID NO: 336173 - DNA, 1890 bp, Artificial Sequence
  derived and/or modified sequence
atggaagttaaagggccgagtgggcgctctttctgctgcgaatccgagggacagtttaaatcgtgtttgaaaagacatacccctagtttgctgctgccttcctcatggaagggaaattcaggaagttgtctcatggctgaagctctgcacagaaccagcccaacacctaactcctgccctttgcccctgccattatgcaggatgtctggtgtgttatgctctaggaacctgtttacctttaaattctcactgtttcagctggacagcggggcctccggggaacccggacattcactgggattgacactggggtttagttattgcggaaattgtcagacagcagtagtgagcgctcagcccgagggaatggcgtccaacggtgcctacccagtgctgggcccgggagtgactgccaaccccggtacctcactctccgttttcaccgcgcttccatttaccacgcccgcgcccggtccagcacatggaccactgctagtgacagccggggcaccccccggtggtcccctagttctgagcacttttcctagtacaccactggtgaccgagcaggacggctgtggaccttctggcgctggagccagcaacgtgttcgtgcagatgcggacagaggtgggccctgtgaaagctgcccaggcccagacactcgtgttaacgcaggcacctctcgtgtggcaggccccgggggccctttgtggtggcgttgtttgtccgccaccactgcttctagccgcggcgccggtggtgccagtcatggccgctcaagtggtcggaggtacacaggcctgcgagggaggctggtcccaggggctgccgcttccccctcctcctcctcctgccgcccaactgcctcccattgtctctcagggcaatgccgggccctggccccagggtgctcacggtgaatcttcacttgcttcatctcaggcaaaagctccccctgatgactcctgcaatcctcgatccgtctatgaaaatttcagactctggcaacattataagccgctggctcgccggcacttgccacagtctccggatacagaagcactttcgtgttttctcattccggtacttcggtcacttgccagacgcaagcctacgatgacgctggaggaagggctgtggagagccatgcgggagtggcagcacacctcaaactttgatcgaatgatcttctatgagatggcagagaaatttcttgaattcgaggctgaggaggagatgcagatccagaagtcccagtggatgaagggaccccagtgcctgcctccacctgccaccccccgcctggagccgagaggccccccagcccccgaggtcgtcaaacagccagtatatctcccaagcaaggcaggacctaaagctccgaccgcgtgtctaccccctcctcggcctcagagacctgtgacgaaagcccggcgcccaccgcctcgcccccacaggagagccgagaccaaggccagacttcctcccccgaggcctcagaggcccgcagaaaccaaggtccctgaggagattccccctgaagtcgttcaggagtatgtggacattatggaggagctcttgggcccttcactgggggcaaccggtgagcccgagaagcaacgcgaggagggaaaagtcaagcagccccaagaggaggattggacccccccagaccccggcttacttagttacatcgacaaactttgttcgcaaaaggacttcgtgacaaaggtagaggcagtcatccacccacagtttcttgaagagcttctgtctcctgacccccagatggacttcttggccctgtcccaggatctcgagcaggaggagggattgaccttggcccagggcgcgccgtcagacgctcctgggacagaccggtgctag

SEQ ID NO: 336174 - DNA, 1674 bp, Artificial Sequence
  derived and/or modified sequence
atgtttcaggagcctgtgtattttcagatttttctgttccagctggactctggcgcctcaggggagccagggcacagcctgggcctgacattgggattttcccactgtggaaattgtcagaccgctgtggtttctgcccaaccagagggtatggcctcaaacggcgcctatccggccttaggccccggcgtgaccgccaatcccgggacgtcactgtcggtgttcaccgccctgccattcactacacccgcccctggccccgcccatggcccacttctggttacggcgggcgccccgccaggcgggccattggttctgtccaacttcccctcaacccccctggtaacagaacaggacggatgcggcccaagtggagccggcgcctccaacgtattcgtgcaaatgcggactgaggttgggcctgtcaaggctgcccaggctcagaccctagtgctaactcagacacctctggtgtggcaagctccgggggctctgtgtgggggggtggtctgtccacctccactgctcctcgctgctgcccctgttgtacccgtgatggccgcacaggtagtcggcgggacccaggcctgtgaaggaggatggtcccagggactgccacttccacctccacccccacctgcggctcagttgcctcccatcgttagtcagggcaacgcaggaccatggccacagggggcccatggcgaaggctccctcgcttcctctcaggccaaggctcctccagacgactcctgcaacccccggtctgtctacgagaacttcaggctatggcaacattacaagccactggcgcggaggcatctgccacagagcccggatacagaggcactcagctgctttctgattcccgttctcagaagcctggcccggcgtaaacctaccatgacactggaggagggactgtggagggctatgcgcgagtggcaacacacttccaactttgaccgaatgattttctacgagatggccgagaaatttcttgagtttgaggctgaggaggagatgcagatccagaaatcacagtggatgaaggggccccaatgtctcccaccccctgccactcctcgactggaaccccggggaccgccggctccagaggtggttaagcagcccgtctacttgccatcaaaagcggggccaaaagctcccactgcttgcctgccaccgccacgaccccagcgccctgtgaccaaggctcggcggccacccccccggcctcatcgacgggctgaaaccaaagctcggctcccccccccccgccctcagagacccgcggagaccaaggtgcctgaagagattccaccagaggtagtccaagagtatgtagatataatggaagagcttttggggccgtcgctgggggccactggtgagcccgagaaacagcgcgaagagggtgaggttaaacagccacaggaagaagactggactcctccggaccctggtttgctgtcatacacagacaagctgtgttcacagaaagacttcgtgaccaaggtcgaagctgtgatccacccgcagtttctagaggagctactcagccccgatccacaaatggattttctggcgctgtcgcaggaacttgagcaggaggaaggtctcaccctggcacagggggcgccctctgatgcccctggaacagacagatgctag

SEQ ID NO: 336175 - DNA, 2273 bp, Artificial Sequence
  derived and/or modified sequence
ggatttctggtctcggtgctgtaggtcacatagccactctttcctggattgaggctttccagcaaaggggctgggacgtaaggctggcctgctggtgtggacagagattccagcaacatgcatgacctgggggtacaaggattgcttcctaaacaatgataagcacacagccacctaatagtctggatcggctgagaccatcctgatttcaaacacccagtccccttgccttcctaagaacccctgtgtttctcagactgaaaatgtgttttgaactttgttcacgaagtgaggccgctgttgaaattcgtcaagactgggaaagagccaaagtgggaaggagcatgggttgattggcacaaaagtaggtctgctgataaagaatggaagtaaaggggccatcaggtagaagcttttgctgtgagtcagaaggacaatttaaaagttgcctaaagaggcacacgccatctctgctgctgccttccagttggaagggaaactcaggttcttgcctaatggccaaagcccttcacagaatgtcccccacccctaacagctgcccactgcccctccccctctgcagaatgtctggggtcctatgttccaggaacctgtttactttcaaattttccctgtttcagttggactcaggagcatctggtgagccaggtcactctctgggtcttacccttggcttttctcattgcggaaactgccagacagcggtggtcagtgcccagcctgaggggatggcttcaaatggagcatacccagcgctgggaccgggcgtgaccgcgaaccctggcacctccctgtctgtgttcacggctctgcccttcaccacacccgctcccggcccagcacacgggccgctccttgtgactgcaggggctcctccaggcggccctctggtgctgtctaccctccccagcacacctctggtgacagaacaggatggctgcggcccgagtggggccggggcttccaacgtctttgtccagatgaggacagaggtggggcctgtgaaggccgctcaggcgcagaccttggtcctaactcaggcccccctcgtctggcaggctccaggcgccctctgcggaggtgttgtgtgtccacctcccctactcctggcagctgctcctgtggtgcctgttatggctgcccaggtggttgggggcacccaggcctgtgagggaggctggtcccagggccttcctcttccaccaccaccaccaccggctgcccagctgccccccattgtgtcccaagggaatgctgggccatggccacaaggggctcacggagagggcagcctggcttcctcccaggccaaggccccgccagatgactcctgtaaccccaggagtgtctatgagaacttccgactctggcagcactacaagcccctggcccggaggcaccttccccagagtcctgacaccgaagcgctttcgtgcttcctcatcccagttctccgatccctggcccggcggaagcccaccatgaccctggaggagggactgtggcgggccatgcgggaatggcagcacacgagcaactttgaccggatgatcttctacgagatggcggaaaagttcctggagtttgaggctgaggaggagatgcagattcagaaatcgcaatggatgaaggggccccagtgcctgcctcctccagccacaccgaggcttgaacctcgaggacccccggcccctgaggtggtcaagcagccagtgtaccttcccagcaaggccggccccaaggccccgactgcctgcctgccaccacccaggccccagaggccagtgaccaaggcccgccggccaccaccccggccccaccggcgagcagagaccaaggcccgcctgccaccacccaggccccagagaccagcagagaccaaggtccctgaggagatccccccagaagtggtgcaggagtatgtggacatcatggaggagctgctggggccttccctcggggccacgggggagcccgagaaacaacgggaagagggcgaagtgaagcagccacaggaagaggactggacgcccccagacccgggcctcctgagctacactgacaagctgtgttcccagaaagacttcgtcaccaaggtggaggccgtcattcatccccaattcctggaagaattgctttccccagatccacagatggatttcttggccctaagccaggagctggagcaggaggaaggactcacccttgcccagggagccccttcagatgctccagggactgacagatgctga

SEQ ID NO: 336176 - DNA, 3970 bp, Artificial Sequence
  derived and/or modified sequence
ggctttccagcaaaggggctgggacgtaaggctggcctgctggtgtggacagagattccagcaacatgcatgacctgggggtacaaggattgcttcctaaacaatgataagcacacagccacctaatagtctggatcggctgagaccatcctgatttcaaacacccagtccccttgccttcctaagaacccctgtgtttctcagactgaaaatgtgttttgaactttgttcacgaagtgaggccgctgttgaaattcgtcaagactgggaaagagccaaagtgggaaggagcatgggttgattggcacaaaagtaggtctgctgataaagaatggaagtaaaggggccatcaggtagaagcttttgctgtgagtcagaaggacaatttaaaagttgcctaaagaggcacacgccatctctgctgctgccttccagttggaagggaaactcaggttcttgcctaatggccgaagcccttcacagaacgtcccccacccctaacagctgcccactgcccctccccctctgcagaatgtctggggtcctatgttccaggaacctgtttactttcaaattttccctgtttcagttggactcaggagcatctggtgagccaggtcactctctgggtcttacccttggcttttcttattgcggaaactgccagacggcggtggtcagtgcccagcctgaggggatggcttcgaatggagcatacccagtgctgggaccgggcgtgaccgcgaaccctggcacctccctgtctgtgttcacggctctgcccttcaccacacccgctcccggcccagcacacgggccgctccttgtgactgcaggggctcctccaggcggccctctggtgctgtctaccttccccagcacacctctggtgacagaacaggatggctgcggcccgagtggggccggggcttccaacgtctttgtccagatgaggacagaggtggggcctgtgaaggccgctcaggcgcagaccttggtcctaactcaggcccccctcgtctggcaggctccaggcgccctctgcggaggtgttgtgtgtccacctcccctactcctggcagctgctcctgtggtgcctgttatggctgcccaggtggttgggggcacccaggcctgtgagggaggctggtcccagggccttcctcttccaccaccaccaccaccggctgcccagctgccccccattgtgtcccaagggaatgctgggccatggccacaaggggctcatggagagagcagcctggcttcctcccaggccaaggccccgccagatgactcctgtaaccccaggagtgtctatgagaacttccgactctggcagcactacaagcccctggcccggaggcaccttccccagagtcctgacaccgaagcgctttcgtgcttcctcatcccagttctccgatcgctggcccggcggaagcccaccatgaccctggaggagggactgtggcgggccatgcgggaatggcagcacacgagcaactttgaccggatgatcttctacgagatggcggaaaagttcctggagtttgaggctgaggaggagatgcagattcagaaatcgcaatggatgaaggggccccagtgcctgcctcctccagccacaccgaggcttgaacctcgaggacccccggcccctgaggtggtcaagcagccagtgtaccttcccagcaaggccggccccaaggccccgactgcctgcctgccaccacccaggccccagaggccagtgaccaaggcccgccggccaccaccccggccccaccggcgagcagagaccaaggcccgcctgccaccacccaggccccagagaccagcagagaccaaggtccctgaggagatccccccagaagtggtgcaggagtatgtggacatcatggaggagctgctggggccttccctcggggccacgggggagcccgagaaacaacgggaagagggcaaagtgaagcagccacaggaagaggactggacgcccccagacccgggcctcctgagctacattgacaagctgtgttcccagaaagacttcgtcaccaaggtggaggccgtcattcatccccaattcctggaagaattgctttccccagatccacagatggatttcttggccctaagccaggacctggagcaggaggaaggactcacccttgcccagggagccccttcagatgctccagggactgacagatgctgaggaagccctgatccctcccactaccgactcacaaggccctgcctgctttagggaggcttcttggggccccccatcgtcatcagcatccctggaaaatcctgggattggagagagctggctggctcttgttctgctcggtgggagctgaggagaaggcagccacctgcaacatggacatggggagaggaggctgctcctgcttaaccctcatcaggaagagcgcgggcactgggctgaggggagacgttgaggtgaccatccacacaggtgtgtttgggatacgatgatgggtggggagcaggggaagtccttctgcctgtttctgggcaggagagagtcttgtccaactagctaaagcagatgctccttgctgtggccacagggactggcctcggggccctcaaggtcctgcatggagccccccacagctatgattcccttcccatatgatgactgaactcatgtggaattgatgtagacacagatttacattggtttctaaaacagttccctcccaacacaccatcaccaatgggaacaaacatgtccagtccatcaggcgcagggtgggtgtttctgctggttccagggcccggaggagctggggcccaggccaagaggggccgagggtcagccgcccttctgccaggcacagaccccaagggcagagcaggggctgcctgggatgtggcattggctgtctgggaagtgacctgggagttgggggctaggtgttcgccaaagggagacttccagagtctacgagtgagatgaggactgcatcaggagagggaccgaggctggggaggatgctctgctctttcccaggttgtcctgtcctcccaatctctgctgaactgccctcaccccatgggccaacttctgccccccttacccctaacccacctcttagaatctcagatcccagcatggacaggacccggcacccaccctggttccctcctggccaacaccttcttctccacggtctgagttctgattcctcccccagggcgcttattggctcaggacccctgtgactgccagggcactggtcccagcactgcctgcgtgcagagctgtggtcacggcgctgggggctggcccagcagcagaggctggtggggcaaagctgtctggtacacggtggcctggcccctcggccaagtgacaaagggagccatgtttgggtcctctctggccccatctgcccacagaacacagcagtcagcctgacagatgcccctctgccccgtcccttctgctcgatgtgggcagtgtcggaggcctgctgtcttctgtggcctttgggaaggagagtttatcttggcagggcttccccagctcagtgcacatcaggccctcggggaaaatgtggggagcgaagagtcactggtgggtgatgtgggcagctcccgtgactcctctacattcagggccatcctcaagagataaggtagcactgcccctttgcagggtttaggaatgttaagtgagccgtgtttgaagggaacatggtccatactctggcgtgtgtgggtgcccagccaacttcctcacctaagggtgaaagtgacaccttggggctcctgctggttaccccactggctgttgtctatcccactgtccctgtccttgtcttggctgagccattcctaggaagcagaacttgtgcttcctccacctctgtgtcccacctgagccctacaatctgcccctaaatgggcacagtggggctgactggggggc

SEQ ID NO: 336177 - DNA, 2273 bp, Artificial Sequence
  derived and/or modified sequence
ggatttctggtctcggtgctgtaggtcacatagccactctttcctggattgaggctttccagcaaaggggctgggacgtaaggctggcctgctggtgtggacagagattccagcaacatgcatgacctgggggtacaaggattgcttcctaaacaatgataagcacacagccacctaatagtctggatcggctgagaccatcctgatttcaaacacccagtccccttgccttcctaagaacccctgtgtttctcagactgaaaatgtgttttgaactttgttcacgaagtgaggccgctgttgaaattcgtcaagactgggaaagagccaaagtgggaaggagcatgggttgattggcacaaaagtaggtctgctgataaagaatggaagtaaaggggccatcaggtagaagcttttgctgtgagtcagaaggacaatttaaaagttgcctaaagaggcacacgccatctctgctgctgccttccagttggaagggaaactcaggttcttgcctaatggccgaagcccttcacagaacgtcccccacccctaacagctgcccactgcccctccccctctgcagaatgtctggggtcctatgttccaggaacctgtttactttcaaattttccctgtttcagttggactcaggagcatctggtgagccaggtcactctctgggtcttacccttggcttttcttattgcggaaactgccagacggcggtggtcagtgcccagcctgaggggatggcttcgaatggagcatacccagtgctgggaccgggcgtgaccgcgaaccctggcacctccctgtctgtgttcacggctctgcccttcaccacacccgctcccggcccagcacacgggccgctccttgtgactgcaggggctcctccaggcggccctctggtgctgtctaccttccccagcacacctctggtgacagaacaggatggctgcggcccgagtggggccggggcttccaacgtctttgtccagatgaggacagaggtggggcctgtgaaggccgctcaggcgcagaccttggtcctaactcaggcccccctcgtctggcaggctccaggcgccctctgcggaggtgttgtgtgtccacctcccctactcctggcagctgctcctgtggtgcctgttatggctgcccaggtggttgggggcacccaggcctgtgagggaggctggtcccagggccttcctcttccaccaccaccaccaccggctgcccagctgccccccattgtgtcccaagggaatgctgggccatggccacaaggggctcatggagagagcagcctggcttcctcccaggccaaggccccgccagatgactcctgtaaccccaggagtgtctatgagaacttccgactctggcagcactacaagcccctggcccggaggcaccttccccagagtcctgacaccgaagcgctttcgtgcttcctcatcccagttctccgatcgctggcccggcggaagcccaccatgaccctggaggagggactgtggcgggccatgcgggaatggcagcacacgagcaactttgaccggatgatcttctacgagatggcggaaaagttcctggagtttgaggctgaggaggagatgcagattcagaaatcgcaatggatgaaggggccccagtgcctgcctcctccagccacaccgaggcttgaacctcgaggacccccggcccctgaggtggtcaagcagccagtgtaccttcccagcaaggccggccccaaggccccgactgcctgcctgccaccacccaggccccagaggccagtgaccaaggcccgccggccaccaccccggccccaccggcgagcagagaccaaggcccgcctgccaccacccaggccccagagaccagcagagaccaaggtccctgaggagatccccccagaagtggtgcaggagtatgtggacatcatggaggagctgctggggccttccctcggggccacgggggagcccgagaaacaacgggaagagggcaaagtgaagcagccacaggaagaggactggacgcccccagacccgggcctcctgagctacattgacaagctgtgttcccagaaagacttcgtcaccaaggtggaggccgtcattcatccccaattcctggaagaattgctttccccagatccacagatggatttcttggccctaagccaggacctggagcaggaggaaggactcacccttgcccagggagccccttcagatgctccagggactgacagatgctga

SEQ ID NO: 336178 - DNA, 5543 bp, Artificial Sequence
  derived and/or modified sequence
ggctttccagcaaaggggctgggacgtaaggctggcctgctggtgtggacagagattccagcaacatgcatgacctgggggtacaaggattgcttcctaaacaatgataagcacacagccacctaatagtctggatcggctgagaccatcctgatttcaaacacccagtccccttgccttcctaagaacccctgtgtttctcagactgaaaatgtgttttgaactttgttcacgaagtgaggccgctgttgaaattcgtcaagactgggaaagagccaaagtgggaaggagcatgggttgattggcacaaaagtaggtctgctgataaagaatggaagtaaaggggccatcaggtagaagcttttgctgtgagtcagaaggacaatttaaaagttgcctaaagaggcacacgccatctctgctgctgccttccagttggaagggaaactcaggttcttgcctaatggccgaagcccttcacagaatgtcccccacccctaacagctgcccactgcccctccccctctgcagaatgtctggggtcctatgttccaggaacctgtttactttcaaattttcctgtttcagttggactcaggagcatctggtgagccaggtcactctctgggtcttacccttggcttttctcattgtggaaactgccagacagcggtagtcagtgcccagcctgaggggatggcttcaaatggagcatacccagcgctgggaccgggcgtgaccgcgaaccctggcacctccctgtctgtgttcacggctctgcccttcaccacacccgctcccggcccagcacacgggccgctccttgtgactgcaggggctcctccaggcggccctctggtgctgtctaacttccccagcacacctctggtgacagaacaggatggctgcggcccgagtggggccggggcttccaacgtctttgtccagatgaggacagaggtggggcctgtgaaggccgctcaggcgcagaccttggtcttaactcagacccccctcgtctggcaggctccaggcgccctctgcggaggtgttgtgtgtccacctcccctactcctggcagctgctcctgtggtgcctgttatggctgcccaggtggttgggggcacccaggcctgtgagggaggctggtcccagggccttcctcttccaccaccaccaccaccggctgcccagctgccccccattgtgtcccaagggaatgctgggccatggccacaaggggctcacggagagggcagcctggcttcctcccaggccaaggccccgccagatgactcctgtaaccccaggagtgtctatgagaacttccgactctggcagcactacaagcccctggcccggaggcaccttccccagagtcctgacaccgaagcgctttcgtgcttcctcatcccagttctccgatccctggcccggcggaagcccaccatgaccctggaggagggactgtggcgggccatgcgggaatggcagcacacgagcaactttgaccggatgatcttctacgagatggcggaaaagttcctggagtttgaggctgaggaggagatgcagattcagaaatcgcaatggatgaaggggccccagtgcctgcctcctccagccacaccgaggcttgaacctcgaggacccccggcccctgaggtggtcaagcagccagtgtaccttcccagcaaggccggccccaaggccccgactgcctgcctgccaccacccaggccccagaggccagtgaccaaggcccgccggccaccaccccggccccaccggcgagcagagaccaaggcccgcctgccaccacccaggccccagagaccagcagagaccaaggtccctgaggagatccccccagaagtggtgcaggagtatgtggacatcatggaggagctgctggggccttctctcggggccacgggggagcccgagaaacaacgggaagagggcgaagtgaagcagccacaggaagaggactggacgcccccagacccgggcctcctgagctacactgacaagctgtgttcccagaaagacttcgtcaccaaggtggaggccgtcattcatccccaattcctggaagaattgctttccccagatccacagatggatttcttggccctaagccaggagctggagcaggaggaaggactcacccttgcccagggagccccttcagatgctccagggactgacagatgctgaggaagccctgatccctcccaccacccactcacaaggccctgcctgctttagggaggcttcttggggccccctcatcgttatcagcatccctggaaaatcctgggattggagagagctggctggctcttgttctgctcggtgggagctgaggagaaggcagccgcctgcaacatggacatggggagaggaggctgctcctgcttaaccctcatcaggaagagcgcgggcactgggctgaggggagacgttgaggtgaccatccacacaggtgtgtttgggatacgatgatgggtggggagcaggggaagtccttctgcctgtttctgggcaggagagagtcttgtccaactagctaaagcagatgctccttgctgtggccacagggactggcctcggggccctcaaggtcctgcatggagccccccacagctatgattcccttcccatatgatgactgaactcatgtggaattgatgtagacacagatttacattggtttctaaaacagttccctcccaacacaccatcaccaatgggaacaagcatgtccagtccatcaggcgcagggtgggggtttctgctggttccagggcccggaggagctggggcccaggccaagaggggccgagggtcagccgcccttctgccaggcacagaccccaagggcagagcaggggctgcctgggatgtggcattggctgtctgggaagtgccctgggagttgggggctaggtgttcgccaaagggagacttccagagtctatgagtgagatgaggactgcatcaggagagggaccgaggctggggaggatgctctgctctttcccaggttgtcctgtcttcccaatctctgctgaactgccctcaccccatgggccaactctgccccccttacccctaacccacctcttagaatctcagatcccagcgtggacaggacccggcacccaccctggttccctcctggccaacaccttcttctccacggtctgagttctgattcctcccccagggcgcttattggctcaggacccctgtgactgccagggcactggtcccagcactgcctgcgtgcagagctgtggtcacggccctgggggctggcccagcagcagaggctggtggggcaaagctgtctggtacacggtggcctggcccctcggccaagtgacaaagggagccatgtttgggtcctctctggccccatctgcccacagaacacagcagtcagcctgacagatgcccctctgccccgtcccttctgctcgatgtgggcagtgtcggaggcctgctgtcttctgtggcctttgggaaggagagtttatcttggcagggcttccccagctcagtgcacgtcaggccctcggggaaaatgtggggagcgaagagtcactggtgggtgatgtgggcagctcccgtgactcctctacattcacggccatcctcaggagataaggtagcactgcccctttgcagggtttaggaatgttaagtgagccgtgtttgaagggaacatggtccatactctggcgtgtgtgggtgcccagccaacttcctcacctaagggtgaaagtgacaccttggggctcctgctggttaccccactggctgttgtctatcccactgtccctgtccttgtcttggctgagccattcctaggaagcagaacttgtgcttcctccacctctgtgtcccacctgagccctacaatctgcccctaaatgggcacagtggggctgactggggggctctggtagactgaacatacgtcccccgcccagttcctgtgctgaagccctaacccccaacgtgatggtatttggaaatggggcctttgggagttattcagggttagaagagaccatgagggtggggccctaatgatgggattagggccctggtaagaagcagagaccccagagctctctctctccctgacacgaggacacactgagaaggcggccatctgcaagccagagagagagccctcaccagaaccttgcccactgggatgctaacctcggacttccagcctccagactgtgacaaatacatttctttttttaatatgtgccaccacccccaagtctatggccctttgtccgagcagccctatgtgactaggacaaagtccataatctcaagaacttccttcatgactggtatctggaaaccgtgcatcagagccacgggaaagaaaggctcagccctttacaactgtcagcacacctccaccccaagtgcagtgtatcacacatgaaccaggagagcctgggacacagtgaaaaggaatctgtaaatacccatgatgtcatcgcatccacacttggggaagccatgcagcttgctcacagcaggtgctgggggtgtgctgaggctcttggtcggcttggcctccctgctcacacacccaggtcactctctgggaaccagtgcggctggggtggcccctggcaggtttgcctccagagacccctcccttcaccattggatgacagatccccgaagaagccatagcctcctgggaaactccatctgacaacgtgagcaaggcttgcccccgttagtgaacatgctgtgctttctgacagctatgaggatggacttgatccaggtggctgcccttttgtagctcactttgattctaacttcagcgttgcatgatgccctatgaatggaatatacaatgtgtgtctttcacatctgtcttctttcacttagaataatatttccaatggcatctacatttttagtatgtatcattacatcaaacctttttgttgctgaataatattccattaatggatatactaaaatttatccatttatcagttaagaacgtttgggtttttttcactttttggctattgtgaataacacttctaagaacatttgtgtacaaggtttcctggggatgtatgtttccatttctcatggctacatacctaagagtgaaattggtggaccatatggaaactctgtgtttaaccatttcagaaggtgccagactgttcccagtgtacatgaaccattttatatacccactagctgtgtgagggtcccagcgtctctccatattcgagccaacatttattatcaactctctttttgataaagtcatcctagtggttctgaagttgcatctcatcgtagtttgcatttgtgtttctctgatgttgaacctctttcacgtacctattcgccacttgtatatcttctttggagcaatgtgtactcaacatttagtaatttttaactggtttgtgttttgtcattgagttataagaattctttatatattccagataaaaatgctttacaag

SEQ ID NO: 336179 - DNA, 1890 bp, Artificial Sequence
  derived and/or modified sequence
atggaggtgaagggccccagcggccgctccttctgctgtgagagcgagggccagttcaagagctgcctgaagaggcacacccccagcctgctgctgcccagctcctggaagggcaacagcggcagctgcctgatggccaaggccctgcacaggatgagccccacccccaacagctgccccctgcccctgcccctgtgcaggatgtctggagtgctgtgcagcaggaacctcttcaccttcaagttcagcctcttccagctggacagcggggccagcggggagcccggccacagcctgggcctgaccctgggcttcagccactgcggcaactgccagacagctgtggtgtctgcccagcctgagggcatggccagcaatggagcctacccagccctgggccctggggtgacagccaaccctggcaccagcctgtctgtgttcaccgccctgcccttcaccaccccagcccctggccctgcccacggccccctgctggtgacagctggggcccctcctgggggccccctggtgctgagcaccctgcccagcacccccctggtgacagagcaggacggctgcggccccagcggggccggggccagcaatgtgtttgtgcagatgaggacagaggtgggccctgtgaaggccgcccaggcccagaccctggtgctgacccaggcccccctggtgtggcaggcccctggggccctgtgtggcggcgtggtgtgccccccacccctgctgctggccgccgcccctgtggtgcctgtgatggccgcccaggtggtgggcggcacccaggcctgtgagggcggctggagccagggcctgcccctgcccccacctcctcctcctgctgcccagctgccccccatcgtgtcccagggcaatgccggcccctggccccagggcgcccacggggagggcagcctggccagcagccaggccaaggcccccccagatgacagctgcaaccccaggtctgtgtatgagaacttccggctgtggcagcactacaagcccctggcccggcggcacctgccccagagcccagacacagaggccctgagctgcttcctgatccctgtgctgcggagcctggcccggaggaagcccaccatgaccctggaggagggcctgtggagggccatgagggagtggcagcacaccagcaactttgacaggatgatcttctatgagatggccgagaagttcctggagtttgaggccgaggaggagatgcagatccagaagagccagtggatgaagggcccccagtgcctgcccccaccagccaccccccggctggagccccggggccccccagcccctgaggtggtgaagcagcctgtgtacctgcccagcaaggccggccccaaggcccccacagcctgcctgcccccaccccggccccagaggcctgtgaccaaggcccggcggcccccaccccggccccacagaagagctgagaccaaggcccggctgcccccaccccggccccagaggcctgctgagaccaaggtgcctgaggagatccccccagaggtggtgcaggagtatgtggacatcatggaggagctgctgggccccagcctgggcgccactggagagcctgagaagcagcgggaggagggggaggtgaagcagccccaggaggaggactggaccccaccagaccccggcctgctgagctacacagacaagctgtgcagccagaaggactttgtgaccaaggtggaggccgtcatccacccccagttcctggaggagctgctgagcccagacccccagatggacttcctggccctgagccaggagctggagcaggaggagggcctgaccctggcccagggcgcccccagtgatgcccctggaacagaccgctgctag

SEQ ID NO: 336180 - DNA, 1689 bp, Artificial Sequence
  derived and/or modified sequence
atgtctggagtgctgtgcagcaggaacctcttcaccttcaagttcagcctcttccagctggacagcggggccagcggggagcccggccacagcctgggcctgaccctgggcttctcctactgcggcaactgccagacagctgtggtgtctgcccagcctgagggcatggccagcaatggagcctaccctgtgctgggccctggggtgacagccaaccctggcaccagcctgagcgtcttcaccgccctgcccttcaccaccccagcccctggccctgcccacggccccctgctggtgacagctggggcccctcctgggggccccctggtgctgagcaccttccccagcacccccctggtgacagagcaggacggctgcggccccagcggggccggggccagcaatgtgtttgtgcagatgaggacagaggtgggccctgtgaaggccgcccaggcccagaccctggtgctgacccaggcccccctggtgtggcaggcccctggggccctgtgtggcggcgtggtgtgccccccacccctgctgctggccgccgcccctgtggtgcctgtgatggccgcccaggtggtgggcggcacccaggcctgtgagggcggctggagccagggcctgcccctgcccccacctcctcctcctgctgcccagctgccccccatcgtgtcccagggcaatgccggcccctggccccagggcgcccatggagagagcagcctggccagcagccaggccaaggcccccccagatgacagctgcaaccccaggtctgtgtatgagaacttccggctgtggcagcactacaagcccctggcccggcggcacctgccccagagcccagacacagaggccctgagctgcttcctgatccctgtgctgcggagcctggcccggaggaagcccaccatgaccctggaggagggcctgtggagggccatgagggagtggcagcacaccagcaactttgacaggatgatcttctatgagatggccgagaagttcctggagtttgaagctgaggaggagatgcagatccagaagagccagtggatgaagggcccccagtgcctgcccccaccagccaccccccggctggagccccggggccccccagcccctgaggtggtgaagcagcctgtgtacctgcccagcaaggccggccccaaggcccccacagcctgcctgcccccaccccggccccagaggcctgtgaccaaggcccggcggcccccaccccggccccaccggcgggcagagaccaaggcccggctgcccccaccccggccccagaggcctgctgagaccaaggtgcctgaggagatccccccagaggtggtgcaggagtatgtggacatcatggaggagctgctgggccccagcctgggcgccaccggggagcctgagaagcagcgggaggagggcaaggtgaagcagccccaggaggaggactggaccccaccagaccccggcctgctgagctacatcgacaagctgtgcagccagaaggactttgtgaccaaggtggaggccgtcatccacccccagttcctggaggagctgctgagcccagacccccagatggacttcctggccctgagccaggacctggagcaggaggagggcctgaccctggcccagggcgcccccagtgatgcccctggaacagaccgctgctag

SEQ ID NO: 336181 - DNA, 1890 bp, Artificial Sequence
  derived and/or modified sequence
atggaggtgaagggccccagcggccgctccttctgctgtgagagcgagggccagttcaagagctgcctgaagaggcacacccccagcctgctgctgcccagctcctggaagggcaacagcggcagctgcctgatggccgaggccctgcacaggaccagccccacccccaacagctgccccctgcccctgcccctgtgcaggatgtctggagtgctgtgcagcaggaacctcttcaccttcaagttcagcctcttccagctggacagcggggccagcggggagcccggccacagcctgggcctgaccctgggcttctcctactgcggcaactgccagacagctgtggtgtctgcccagcctgagggcatggccagcaatggagcctaccctgtgctgggccctggggtgacagccaaccctggcaccagcctgtctgtgttcaccgccctgcccttcaccaccccagcccctggccctgcccacggccccctgctggtgacagctggggcccctcctgggggccccctggtgctgagcaccttccccagcacccccctggtgacagagcaggacggctgcggccccagcggggccggggccagcaatgtgtttgtgcagatgaggacagaggtgggccctgtgaaggccgcccaggcccagaccctggtgctgacccaggcccccctggtgtggcaggcccctggggccctgtgtggcggcgtggtgtgccccccacccctgctgctggccgccgcccctgtggtgcctgtgatggccgcccaggtggtgggcggcacccaggcctgtgagggcggctggagccagggcctgcccctgcccccacctcctcctcctgctgcccagctgccccccatcgtgtcccagggcaatgccggcccctggccccagggcgcccacggggagagcagcctggccagcagccaggccaaggcccccccagatgacagctgcaaccccaggtctgtgtatgagaacttccggctgtggcagcactacaagcccctggcccggcggcacctgccccagagcccagacacagaggccctgagctgcttcctgatccctgtgctgcggagcctggcccggaggaagcccaccatgaccctggaggagggcctgtggagggccatgagggagtggcagcacaccagcaactttgacaggatgatcttctatgagatggccgagaagttcctggagtttgaggccgaggaggagatgcagatccagaagagccagtggatgaagggcccccagtgcctgcccccaccagccaccccccggctggagccccggggccccccagcccctgaggtggtgaagcagcctgtgtacctgcccagcaaggccggccccaaggcccccacagcctgcctgcccccaccccggccccagaggcctgtgaccaaggcccggcggcccccaccccggccccacagaagagctgagaccaaggcccggctgcccccaccccggccccagaggcctgctgagaccaaggtgcctgaggagatccccccagaggtggtgcaggagtatgtggacatcatggaggagctgctgggccccagcctgggcgccactggagagcctgagaagcagcgggaggagggcaaggtgaagcagccccaggaggaggactggaccccaccagaccccggcctgctgagctacatcgacaagctgtgcagccagaaggactttgtgaccaaggtggaggccgtcatccacccccagttcctggaggagctgctgagcccagacccccagatggacttcctggccctgagccaggacctggagcaggaggagggcctgaccctggcccagggcgcccccagtgatgcccctggaacagaccgctgctag

SEQ ID NO: 336182 - DNA, 1674 bp, Artificial Sequence
  derived and/or modified sequence
atgttccaggagcctgtgtacttccagatcttcctgttccagctggacagcggggccagcggggagcccggccacagcctgggcctgaccctgggcttcagccactgcggcaactgccagacagctgtggtgtctgcccagcctgagggcatggccagcaatggagcctacccagccctgggccctggggtgacagccaaccctggcaccagcctgtctgtgttcaccgccctgcccttcaccaccccagcccctggccctgcccacggccccctgctggtgacagctggggcccctcctgggggccccctggtgctgagcaacttccccagcacccccctggtgacagagcaggacggctgcggccccagcggggccggggccagcaatgtgtttgtgcagatgaggacagaggtgggccctgtgaaggccgcccaggcccagaccctggtgctgacccagacccccctggtgtggcaggcccctggggccctgtgtggcggcgtggtgtgccccccacccctgctgctggccgccgcccctgtggtgcctgtgatggccgcccaggtggtgggcggcacccaggcctgtgagggcggctggagccagggcctgcccctgcccccacctcctcctcctgctgcccagctgccccccatcgtgtcccagggcaatgccggcccctggccccagggcgcccacggggagggcagcctggccagcagccaggccaaggcccccccagatgacagctgcaaccccaggtctgtgtatgagaacttccggctgtggcagcactacaagcccctggcccggcggcacctgccccagagcccagacacagaggccctgagctgcttcctgatccctgtgctgcggagcctggcccggaggaagcccaccatgaccctggaggagggcctgtggagggccatgagggagtggcagcacaccagcaactttgacaggatgatcttctatgagatggccgagaagttcctggagtttgaggccgaggaggagatgcagatccagaagagccagtggatgaagggcccccagtgcctgcccccaccagccaccccccggctggagccccggggccccccagcccctgaggtggtgaagcagcctgtgtacctgcccagcaaggccggccccaaggcccccacagcctgcctgcccccaccccggccccagaggcctgtgaccaaggcccggcggcccccaccccggccccacagaagagctgagaccaaggcccggctgcccccaccccggccccagaggcctgctgagaccaaggtgcctgaggagatccccccagaggtggtgcaggagtatgtggacatcatggaggagctgctgggccccagcctgggcgccactggagagcctgagaagcagcgggaggagggggaggtgaagcagccccaggaggaggactggaccccaccagaccccggcctgctgagctacacagacaagctgtgcagccagaaggactttgtgaccaaggtggaggccgtcatccacccccagttcctggaggagctgctgagcccagacccccagatggacttcctggccctgagccaggagctggagcaggaggagggcctgaccctggcccagggcgcccccagtgatgcccctggaacagaccgctgctag

SEQ ID NO: 336183 - DNA, 1890 bp, Artificial Sequence
  derived and/or modified sequence
atggaggtgaagggccccagcggccggagcttctgctgcgagagcgagggccagttcaagtcctgcctgaagcgccatacccccagcctgttacttccgagctcatggaagggaaacagcggttcctgcttgatggctaaagcgctgcaccgaatgagtcccactcctaatagttgcccactccctcttcccctgtgccgaatgagtggggttctctgctcccgaaatctgttcaccttcaagttttccctgttccaactggatagtggagccagcggagagcctgggcatagcctgggcctgaccctcggctttagccactgtggaaattgccagaccgccgtagtaagtgcccagcccgaaggtatggcttcaaatggcgcctatcccgccctcggtcctggagtcactgccaatccagggacgagcttgtcagtctttacagcccttccattcactacccccgcccctggaccggcccacggccccctgcttgtgacagcaggtgcacctccgggcggcccactcgtcctgagtacattaccatctactccgctcgttaccgaacaagacggctgcggaccaagtggagccggagccagcaatgtgttcgtacaaatgagaacagaggtggggcccgttaaagccgctcaagcccaaacactggttttaactcaagctcctctcgtgtggcaggctcctggtgcattgtgcggcggcgtggtgtgccccccccccttgctgctggccgccgccccggtagtgccagttatggcagcacaggtagtgggtggcacacaagcctgtgagggcggctggtctcagggcctgcccctgccaccccctccgcctccagcagctcaactccctcctattgtcagccagggcaatgccggcccatggccgcaaggcgctcatggcgagggatctctcgcttcctcacaggccaaggctcctcctgacgattcgtgtaaccccagatcagtgtatgagaatttccgcttatggcaacactacaagcctcttgccagaagacatctccctcaatcccccgacacggaggctttatcttgcttcttgatcccagtattgagaagccttgcccggaggaaaccaacaatgactttagaggagggcctctggcgagcaatgcgtgagtggcagcacacttcgaattttgataggatgattttctacgaaatggcagaaaaattcttggaattcgaggctgaggaggaaatgcagatacagaagagccagtggatgaagggaccgcagtgtctccctccaccagcaaccccccgcctggaacccagagggccccctgcccctgaggttgtgaagcagccggtttacttacccagtaaggctggacctaaggcgcccactgcctgtctgccacctcctaggccccagcgaccggtgactaaagcaagacggccccctcctcggccccatcgccgggcggaaactaaagcacgtttgccaccaccacgccctcaaaggcccgctgagactaaggtgcccgaagaaatacctcccgaggtggttcaagagtacgtggacattatggaggaactgctggggcccagcctgggcgccactggcgagccagagaaacagcgggaggaaggagaggtgaaacagccccaggaagaggactggaccccccctgatccgggactcttaagctacaccgataagctctgcagccagaaagactttgtgacgaaggtcgaagccgttatccacccccagttccttgaggagctgttaagcccagacccacaaatggactttctggctttatcacaggagttggagcaagaagaaggcctgaccctcgcacagggagcaccctctgatgccccaggcactgacagatgctag

SEQ ID NO: 336184 - DNA, 1689 bp, Artificial Sequence
  derived and/or modified sequence
atgagcggcgtgctgtgcagccggaacctgttcaccttcaagttctctctattccagttggacagtggggcaagcggagaacccgggcatagtttggggttgaccctgggattttcatactgtggaaattgccagaccgctgtcgtcagtgcacaacctgagggcatggcctccaatggagcttatccagtgcttggacccggcgttactgccaaccccggaacgagtttgagtgtgtttactgcacttccctttactacccctgcaccaggcccagctcatgggcctctgctagtcacagcgggcgcacccccaggcggtcccctcgttctgtctactttcccgagcacgccgctggtgacagagcaggacggatgtggaccttcaggcgccggtgcctccaatgtgtttgtgcagatgcgaaccgaagtgggtcccgtgaaggcagcgcaagcacagacgcttgttctgacgcaggctcctttagtgtggcaagctccgggggctctctgtggcggtgttgtgtgcccgcccccccttcttttagcggccgcgccagttgtccccgtcatggccgcacaggtggtgggggggacccaggcttgcgagggcggctggtctcagggcctgcccctgccacccccacccccccctgctgcacagctgccaccaatcgtaagccaggggaatgctggcccttggccacagggggctcatggggagagctcactggcctcctcccaagccaaggccccgcctgatgacagctgcaatcctcggagcgtttacgagaatttccgactctggcaacattataaacccctggcgagaagacacttgccccagtctccagataccgaggccctgtcctgttttctgatccccgtgctgcgatcactcgcaagacgcaagcccaccatgaccctggaggaaggattatggcgggccatgcgcgagtggcaacacacctcaaacttcgaccggatgattttctacgagatggccgagaaattcctggaatttgaagcagaggaagagatgcaaatccagaaaagccagtggatgaaaggcccccaatgccttccaccccccgcgactccaaggctcgaaccgcgagggccgccggctccagaggtggttaagcaacctgtgtatctgccaagcaaggcaggacccaaagctcctaccgcgtgcctacctccgcctcggcctcagcgcccagtgaccaaggcacgtaggcctccaccaaggccacatcgacgcgctgagactaaagcaagactgcccccacctcggccgcagaggccggccgagaccaaggtgccagaggagatccctcctgaggtggtgcaggagtatgtcgacatcatggaggagctccttggcccctcattgggggccaccggcgagcccgagaagcagagagaggaaggtaaggtgaagcagcctcaggaggaagattggaccccccctgatccaggacttctgagctatatcgataagctttgctctcagaaggactttgttactaaggttgaagccgtcatacaccctcagttcctggaggaactgctgtcaccggacccccaaatggatttccttgctctctctcaggacctggagcaggaagaggggctgactctggcccagggagccccatctgacgcccctggcaccgatcgatgctag

SEQ ID NO: 336185 - DNA, 1890 bp, Artificial Sequence
  derived and/or modified sequence
atggaggtgaagggccccagcggccggagcttctgctgcgagagcgagggccagttcaaatcctgcctcaagagacacaccccttccttgctgctcccgagttcctggaaaggcaattcgggaagctgcctgatggcagaagcacttcacagaacttccccaactcccaattcctgcccactccccctgccactgtgcagaatgtccggcgtcctttgtagtcgcaatctgttcacctttaagttcagtttgttccagctcgatagcggagctagcggagagccgggtcactcgctaggcctcaccttgggcttctcatactgtggcaattgtcaaaccgcagtggtgagcgctcagcccgaaggaatggcaagcaacggtgcatatccagtactgggccccggcgtgaccgccaatccagggacttctctctccgtctttactgccctgcctttcacgacccctgccccgggtccagcccatggacctctcctcgtcaccgcaggagcccctcccggcggacctttagtcctatccaccttccccagcacccctctggtcaccgagcaggacggttgtgggcccagtggtgcgggggcttcaaacgtctttgtgcagatgcgaaccgaggtcggacccgtgaaggccgctcaggctcagaccctcgtcctgacacaggctccactggtctggcaggctcccggagccctgtgtggtggagtggtgtgtccacctcctctactgctagcagctgccccagtcgttcctgtaatggctgctcaggtcgtgggtggtacccaggcatgcgagggcgggtggtcacagggactgccactgcccccccctccgccaccggctgcccagctgccaccaattgttagccaggggaatgccggtccatggccgcagggcgcgcacggggaaagttcactggccagttcccaagcgaaagccccccccgacgatagctgcaatccgcgctccgtctatgagaatttccggctgtggcaacactacaaacctttggcaagacgccacttgccccagtctccagatactgaggccctgtcatgcttcttaattcctgtccttaggtcactggcccgcagaaagccgaccatgacgctcgaagaggggctgtggagagcgatgcgcgaatggcagcacacctcaaatttcgaccggatgatcttttatgaaatggcggagaagttcctggagttcgaggccgaggaagagatgcagatccaaaagtcgcagtggatgaaaggcccgcaatgtctgccaccacccgccacgcctagattggaaccacggggcccccccgctccagaggtcgtgaaacaacccgtgtacctgccttccaaggctggcccgaaagccccaacggcatgtcttcctcctcctcggcctcagaggccggtgacaaaggcacgacggccccctccgcggccccaccgaagagccgaaaccaaagcgaggctgcctcctcctcggccccagaggcctgcagagaccaaggttcccgaagagattcctccagaggtggtgcaggagtatgtggatatcatggaagaattgctgggtccctctctcggtgctactggagaacctgagaagcagcgtgaagagggaaaagttaagcagccccaggaagaggactggacaccgccagacccaggcttgctcagctacatcgataaattgtgctcccaaaaggatttcgtcaccaaagtggaggcagttatccatccccagttcctggaggagctactgagccctgaccctcagatggacttcctggcactttcccaggacctagagcaggaagagggactgaccctggcccagggagcaccctcagacgctccgggaaccgatcgttgctag

SEQ ID NO: 336186 - DNA, 1674 bp, Artificial Sequence
  derived and/or modified sequence
atgttccaggagcccgtgtacttccagatcttcctgttccagctggactctggggcctccggtgagccaggtcacagtctgggacttaccttggggttttcgcactgcggcaattgccaaacagcggtggtgtccgcccagcccgaggggatggctagcaacggggcctatcccgctcttggccctggagtcacagccaatccagggacctctttaagtgttttcaccgctcttcctttcacaacgcccgcccctggtcccgcccacggccctctgctggtgaccgcaggagccccacccggcgggcctctcgtcctaagtaactttccgtctacacctttggttacagaacaggacggttgtggcccttccggtgccggtgcgtccaatgtgttcgtccaaatgagaactgaggtgggtcctgtaaaagcagcacaagcccagacactcgtactgactcagacacccctagtctggcaggccccgggagccctatgtggcggagtcgtgtgccccccccccttgttgctggcagccgccccagtggtgcccgtgatggctgcccaggtggtgggggggactcaggcatgcgaagggggatggagccaaggactcccactgcctcctccccctcccccggccgcccaacttccgccgattgtgtcacagggcaacgccgggccctggccccagggggctcacggggagggtagtctggcgtcctcccaggccaaggctccccccgatgacagctgcaatccacggtctgtgtatgaaaattttcggctgtggcaacattacaagcctctggcgcgccgtcatctgccgcagtcccctgacaccgaggcactcagttgtttcctgattcctgtgcttagatcactggctagaagaaagccaactatgaccctggaagagggattatggcgggccatgcgggagtggcagcacacatcaaattttgacaggatgatattttacgaaatggccgagaagtttctggagtttgaagctgaggaagagatgcagatccagaaatcacagtggatgaagggtcctcagtgcctcccgccgcccgctacaccaagactggaaccaaggggaccgccagcaccagaggtggtaaagcagccggtgtatctgccttcaaaagccggacccaaggcacccaccgcctgcctgccgccaccgaggccacagcggcccgtcaccaaggcgcgtcggccaccgccaagacctcataggagggcggagactaaggctcgcctccccccgcccaggccccagagaccggctgagaccaaagttccagaagaaattccaccggaagtggtccaggagtacgtcgacataatggaggagctgctgggtccctcattgggcgccactggcgagccggagaaacagcgcgaggagggcgaggtcaaacagccccaggaagaagactggactccccctgatcctggcctcctgtcttacaccgacaagctgtgtagtcagaaggattttgtcactaaggtcgaggcagtgatacacccccaatttctcgaagagctactgagcccagacccacagatggattttctggcactttcccaggagctcgagcaggaagaaggccttacgctcgcccaaggggctccatctgacgctcccggtactgatcgttgctag

SEQ ID NO: 336187 - DNA, 1890 bp, Artificial Sequence
  derived and/or modified sequence
atggaggtcaaaggcccatctggcagaagcttttgctgtgagtccgaaggacagttcaagtcgtgtttaaaacgacacacaccgtcactgctacttccatcctcttggaagggaaatagtggaagctgtcttatggcaaaggccttgcaccgtatgagtcccacccccaatagctgcccgctgcctttgcccttgtgtcggatgtctggggttctgtgctctcgaaacctctttacgtttaagttctccttgtttcagctggacagtggagcctccggcgagccaggccacagcctaggccttaccttggggttttctcattgtgggaactgccaaacagcagtagttagtgctcagcccgaagggatggcatcaaatggagcttatcctgcccttggtcccggagtgacagcaaatcctggaacatccctgagcgtgttcacggccctgccatttacgactcctgcccctggccctgctcacggaccgctcttggtgaccgcgggagcacccccagggggacctttagtcctcagtacactgccctctacacctctagtcaccgagcaagatggttgcggaccaagcggtgccggagccagtaacgtgtttgtacagatgcgcaccgaggtgggtcccgtgaaggccgctcaggctcagacgctcgtgttaactcaggctccattggtgtggcaggcgcctggagctctctgtggtggagttgtgtgtcccccaccgctgctgctggcagccgcaccggtggttccggtgatggcggctcaagtcgttgggggaacgcaggcttgcgaaggtggatggtctcaaggcctgccattgcctccgccaccacccccagctgctcagctccctccaatagttagccaaggcaatgcaggaccatggccacagggcgcacacggtgaaggcagtttagcctcatcgcaggcgaaggctcccccagacgattcgtgcaaccctagaagtgtgtacgaaaatttcagactgtggcagcactacaagccgctcgcgaggcggcacttaccacagtcccctgacaccgaggcgctcagctgctttctcatacctgttctcaggtccctggcaaggcgaaaacctacaatgaccttggaggagggcctctggcgggctatgcgtgagtggcagcatacctcaaatttcgatcggatgatcttctacgagatggccgagaaatttctggagtttgaggcggaagaggaaatgcagatacagaaaagccaatggatgaaaggaccccaatgtctgccgcctccagctaccccacgactggaacctcgaggcccacccgcacctgaagttgtgaaacaaccagtctacctcccatcaaaggcaggaccgaaggcgcctactgcctgtcttcctccacctagacctcagcggcctgtgaccaaggcaagaaggcccccacctcgccctcaccggcgagcagaaacaaaggccagattgcccccaccgagaccacaaaggccagcagagactaaagttcctgaggagatcccaccagaggtggtgcaagagtacgtggacatcatggaggaactactcgggcctagcttgggggcaacaggggaaccggagaaacaacgagaggagggtgaagtgaagcagccccaggaagaggactggacccctccggacccaggcctgcttagttacaccgataagctgtgcagccagaaagattttgtcacaaaagtggaggcagtgatacacccccaattcttagaagagctcctgtctccagatccccagatggactttctcgcactgtctcaagaacttgaacaggaggaagggttgactctggctcagggagctccatcggacgccccaggaacagacaggtgttag

SEQ ID NO: 336188 - DNA, 1689 bp, Artificial Sequence
  derived and/or modified sequence
atgtcaggagttctgtgttcacgaaatctgtttactttcaaattctctctatttcaacttgacagcggggcttccggagagcccggtcattctctcggtctgaccctgggattctcctattgtggcaattgccagactgcagtggtaagcgctcagccagaaggcatggccagcaacggtgcgtatccagtgctgggcccaggagtaacggccaaccccggtactagtcttagcgtgttcaccgcgctccccttcacaacacctgccccaggaccggctcatggccctctgcttgtgaccgcaggtgctcccccaggtggtccgctcgtgctaagcacattcccctcgacccctctggtgactgagcaggatggatgtggcccaagcggcgctggtgcttcaaatgttttcgttcaaatgcgcaccgaagttgggcctgtcaaagcagcccaggctcagaccctggtgcttacccaggccccactcgtgtggcaagctcccggagctctgtgcggaggtgtcgtgtgccccccacccctactgctagccgcagccccagtcgttcctgtgatggcagcccaagtcgtgggcggaacccaggcatgcgagggcggatggagtcagggactgcctctaccccctcctcctcccccagcagcccagctcccaccaatagtgtcacaagggaatgccggtccctggccacagggcgctcacggtgaatcttccctcgcctcatcacaggcgaaggctcctccagacgacagttgcaaccccaggtctgtctacgagaactttagactttggcaacactataagccacttgctagaaggcatctgcctcaaagcccagataccgaggctctatcatgctttctgatccctgtactacgcagcctggcacgcagaaaacctactatgactttggaggaggggctttggcgcgcaatgcgagaatggcagcatacctccaatttcgatcggatgatcttttacgagatggccgagaagttcctggagttcgaagctgaagaggagatgcagattcaaaaatcccagtggatgaaaggtccccagtgccttcctccgccagccacccccaggctcgagcccagggggccacccgcacccgaggtagtaaagcagccggtgtaccttcccagtaaggccggtccaaaggcgccaacggcatgcctgccaccacccagaccacagcgacctgtaaccaaagcgaggagaccaccccctaggccgcaccggagagctgaaacaaaggctagattgcccccaccgagaccccagaggccagccgagacaaaagtgccagaggagatccctccagaggtggtccaagagtatgtggacatcatggaggagttgctaggcccttccttgggtgctacgggcgagcccgagaagcagagggaggaaggcaaggtgaaacagcctcaggaggaagattggacacccccagatcctggtctgctctcttacattgacaagctgtgttctcagaaagattttgtgacaaaagtcgaggccgttatacatccacagttcctcgaagaactgttaagtcctgatcctcagatggacttcctcgctcttagtcaggaccttgaacaggaggagggccttaccctggcacagggtgccccttccgatgccccagggaccgaccgttgctag

SEQ ID NO: 336189 - DNA, 1890 bp, Artificial Sequence
  derived and/or modified sequence
atggaggttaaaggccctagcggtcgaagcttttgctgtgagtcagaaggtcagttcaaatcgtgcctgaaacgccatactccaagcctccttttaccaagctcctggaaaggaaatagtggatcttgcttgatggctgaagccctccacaggaccagcccaacacccaacagttgtcctcttcccctaccactctgccgaatgagtggtgtgctttgtagccgaaacttatttacttttaaatttagtctgtttcagctcgattcgggagcaagtggtgaacctgggcactccctcggtctgacactgggatttagctattgtggcaactgtcagacagcagttgtaagcgcgcaaccagagggaatggcttccaatggcgcataccccgtcctaggccctggcgttaccgccaatcctggtacatccctaagtgtctttacagcactacctttcactacccccgctcccggtccggctcacggtccgttgctagtaaccgctggggctccgccaggcggtccactagtgctttcaacattccccagcaccccactggtcacagagcaagatggatgtggtcctagcggcgctggggcttctaatgtgtttgtgcagatgcggaccgaagtggggccagtgaaagccgcacaggctcaaacactcgtattgacccaggctccgctcgtgtggcaggcaccgggtgctctgtgcggaggcgtggtatgtcctcctccactgttattggcggctgcgccagtggtgccagtcatggccgctcaggtggtggggggaactcaagcctgtgaggggggatggtcacagggccttcccctgccaccgcctcctcctcccgctgcccagctacctcctatcgtctcacagggaaacgccggaccctggccgcagggcgcacatggtgagagctccctggcctcatcacaagcaaaggcccctccggacgatagctgtaatccgaggtctgtgtatgagaacttcaggctgtggcagcattataagcccttggcaagaaggcatctgccacagtcaccggatactgaggctctgtcttgctttctgatcccggtcctgaggtcactcgctaggagaaagcctacaatgacgctggaggagggcctctggcgggctatgcgagagtggcagcacacaagcaatttcgaccgtatgatcttctacgagatggcggaaaaattcctggagtttgaggcagaggaggagatgcaaatacagaagtctcagtggatgaagggcccacagtgcctccctccgcctgctacaccccgactggaacccaggggtccaccagcacccgaagtggtgaagcagccagtatatctgccctcaaaagccggacccaaggctccaacggcctgcctgcctcccccacgcccacagagacccgttaccaaagcccgacgccctccccctaggccacacaggcgagctgaaacaaaggcccgtttgcctccgccacggcctcagaggcctgctgagaccaaagtcccagaagagattcctcccgaagtggtacaagagtacgtggatatcatggaggagctacttggcccaagtctgggtgccactggagagccggaaaagcaaagagaggaaggcaaagtcaaacagccccaggaagaggactggacccctcctgacccgggtctgttgtcgtacatcgacaaattgtgctcccagaaggactttgtgactaaagtggaggctgttattcacccgcagtttctcgaagaattgttgtcacccgacccccaaatggattttttagccctttctcaggatctggagcaggaagaaggtttaaccttggcacagggggcaccatcggacgctccaggcactgacaggtgttag

SEQ ID NO: 336190 - DNA, 1674 bp, Artificial Sequence
  derived and/or modified sequence
atgttccaggaaccagtctacttccagattttcctatttcagcttgattccggggcatccggagagccaggccactctttaggactcaccctgggcttttctcactgtgggaattgccagactgctgtggtgtctgcccagcccgagggcatggccagtaatggagcctaccctgccctgggtccaggggtaacagccaatcctggcacaagtctgtccgtgtttaccgcacttccatttaccactcccgctcctgggcctgcacatggacccctgctagtgacagcaggcgctcctccgggaggaccactggtactgagtaatttcccttcgacccctttagtgacggagcaagacggatgcggccctagcggagctggagctagcaatgtttttgtgcagatgcgcacagaggttggccctgttaaagccgcacaggcgcagactctagtgctcactcagacacccttggtttggcaggccccaggggctctgtgtggcggtgtcgtgtgcccgcctcccctcttgctagccgcagccccagtcgtgcctgtcatggctgctcaggtcgtaggagggacacaggcctgtgagggtggttggtcccaaggcttacctctacctccaccccctcctccggcagcacaactgccacccatagtcagccaagggaacgccggaccatggccacagggcgctcacggagaggggtcgcttgccagctcccaggctaaagcccctcccgacgattcatgcaaccccaggtctgtgtatgagaactttaggctctggcagcattataagcccctggccaggagacatttgccccaatcccccgataccgaggcgctctcatgtttcttaattccggtcctgcgcagcctggctcgcagaaaacccaccatgacactggaggaggggctttggcgggcaatgcgcgaatggcaacatacgtcgaatttcgacagaatgattttttatgaaatggctgagaagttcttagaattcgaggccgaagaggagatgcagatacaaaagagccaatggatgaagggccctcagtgcctgcctcctcctgccaccccgcgactggagcccaggggcccaccagcaccagaggtggtgaaacaacctgtttacctcccttctaaggccggacccaaagctcctacagcctgcctgccgccacccaggcctcagaggcccgttaccaaggctcgacggccaccacctcgaccacataggagagctgagactaaggcacgcctccccccacccagaccacagagaccagcggagaccaaggtacccgaagagatcccccctgaagtggtgcaggagtacgtggacataatggaagagcttctgggtcccagcctgggggctactggtgaacccgaaaagcaaagagaagagggcgaggtgaaacagcctcaagaggaagattggactcctcccgacccgggtctgctcagctacacggataaattgtgctcgcagaaggatttcgttaccaaggtcgaagctgtcattcacccgcaattcttggaagagctcctgtcccccgacccccaaatggacttcctggccctcagccaggagcttgagcaggaagaggggctgaccttagctcaaggggcaccttcagacgcaccaggcactgatcgttgttag

SEQ ID NO: 336191 - protein, 282 aa, Artificial Sequence
  derived and/or modified sequence
MATHGQTCARPMCIPPSYADLGKAARDIFNKGFGFGLVKLDVKTKSCSGVEFSTSGSSNTDTGKVTGTLETKYKWCEYGLTFTEKWNTDNTLGTEIAIEDQICQGLKLTFDTTFSPNTGKKSGKIKSSYKRECINLGCDVDFDFAGPAIHGSAVFGYEGWLAGYQMTFDSAKSKLTRNNFAVGYRTGDFQLHTNVNDGTEFGGSIYQKVCEDLDTSVNLAWTSGTNCTRFGIAAKYQLDPTASISAKVNNSSLIGVGYTQTLRPGVKLTLSALVDGKSINAG

SEQ ID NO: 336192 - protein, 294 aa, Artificial Sequence
  derived and/or modified sequence
MATHGQTCARPMCIPPSYADLGKAARDIFNKGFGFGLVKLDVKTKSCSGVEFSTSGSSNTDTGKVTGTLETKYKWCEYGLTFTEKWNTDNTLGTEIAIEDQICQGLKLTFDTTFSPNTGKKSGKIKSSYKRECINLGCDVDFDFAGPAIHGSAVFGYEGWLAGYQMTFDSAKSKLTRNNFAVGYRTGDFQLHTNVNDGTEFGGSIYQKVCEDLDTSVNLAWTSGTNCTRFGIAAKYQLDPTASISAKVNNSSLIGVGYTQTLRPGVKLTLSALVDGKSINAGGHKVGLALELEA

SEQ ID NO: 336193 - protein, 195 aa, Artificial Sequence
  derived and/or modified sequence
MATHGQTCARPMCIPPSYADLGKAARDIFNKGFGFGLVKLDVKTKSCSGVEFSTSGSSNTDTGKVTGTLETKYKWCEYGLTFTEKWNTDNTLGTEIAIEDQICQGLKLTFDTTFSPNTGKKSGKIKSSYKRECINLGCDVDFDFAGPAIHGSAVFGYEGWLAGYQMTFDSAKSKLTRNNFAVGYRTGDFQLHTNV

SEQ ID NO: 336194 - protein, 204 aa, Artificial Sequence
  derived and/or modified sequence
MATHGQTCARPMCIPPSYADLGKAARDIFNKGFGFGLVKLDVKTKSCSGVEFSTSGSSNTDTGKVTGTLETKYKWCEYGLTFTEKWNTDNTLGTEIAIEDQICQGLKLTFDTTFSPNTGKKSGKIKSSYKRECINLGCDVDFDFAGPAIHGSAVFGYEGWLAGYQMTFDSAKSKLTRNNFAVGYRTGDFQLHTNVNDGTEFGGS

SEQ ID NO: 336195 - DNA, 849 bp, Artificial Sequence
  derived and/or modified sequence
atggccacccacggccagacctgcgccagacccatgtgcatcccccccagctacgccgacctgggcaaggccgccagagacatcttcaacaagggcttcggcttcggcctggtgaagctggacgtgaagaccaagagctgcagcggcgtggagttcagcaccagcggcagcagcaacaccgacaccggcaaggtgaccggcaccctggagaccaagtacaagtggtgcgagtacggcctgaccttcaccgagaagtggaacaccgacaacaccctgggcaccgagatcgccatcgaggaccagatctgccagggcctgaagctgaccttcgacaccaccttcagccccaacaccggcaagaagagcggcaagatcaagagcagctacaagagagagtgcatcaacctgggctgcgacgtggacttcgacttcgccggccccgccatccacggcagcgccgtgttcggctacgagggctggctggccggctaccagatgaccttcgacagcgccaagagcaagctgaccagaaacaacttcgccgtgggctacagaaccggcgacttccagctgcacaccaacgtgaacgacggcaccgagttcggcggcagcatctaccagaaggtgtgcgaggacctggacaccagcgtgaacctggcctggaccagcggcaccaactgcaccagattcggcatcgccgccaagtaccagctggaccccaccgccagcatcagcgccaaggtgaacaacagcagcctgatcggcgtgggctacacccagaccctgagacccggcgtgaagctgaccctgagcgccctggtggacggcaagagcatcaacgccggctag

SEQ ID NO: 336196 - DNA, 885 bp, Artificial Sequence
  derived and/or modified sequence
atggccacccacggccagacctgcgccagacccatgtgcatcccccccagctacgccgacctgggcaaggccgccagagacatcttcaacaagggcttcggcttcggcctggtgaagctggacgtgaagaccaagagctgcagcggcgtggagttcagcaccagcggcagcagcaacaccgacaccggcaaggtgaccggcaccctggagaccaagtacaagtggtgcgagtacggcctgaccttcaccgagaagtggaacaccgacaacaccctgggcaccgagatcgccatcgaggaccagatctgccagggcctgaagctgaccttcgacaccaccttcagccccaacaccggcaagaagagcggcaagatcaagagcagctacaagagagagtgcatcaacctgggctgcgacgtggacttcgacttcgccggccccgccatccacggcagcgccgtgttcggctacgagggctggctggccggctaccagatgaccttcgacagcgccaagagcaagctgaccagaaacaacttcgccgtgggctacagaaccggcgacttccagctgcacaccaacgtgaacgacggcaccgagttcggcggcagcatctaccagaaggtgtgcgaggacctggacaccagcgtgaacctggcctggaccagcggcaccaactgcaccagattcggcatcgccgccaagtaccagctggaccccaccgccagcatcagcgccaaggtgaacaacagcagcctgatcggcgtgggctacacccagaccctgagacccggcgtgaagctgaccctgagcgccctggtggacggcaagagcatcaacgccggcggccacaaggtgggcctggccctggagctggaggcctag

SEQ ID NO: 336197 - DNA, 588 bp, Artificial Sequence
  derived and/or modified sequence
atggccacccacggccagacctgcgccagacccatgtgcatcccccccagctacgccgacctgggcaaggccgccagagacatcttcaacaagggcttcggcttcggcctggtgaagctggacgtgaagaccaagagctgcagcggcgtggagttcagcaccagcggcagcagcaacaccgacaccggcaaggtgaccggcaccctggagaccaagtacaagtggtgcgagtacggcctgaccttcaccgagaagtggaacaccgacaacaccctgggcaccgagatcgccatcgaggaccagatctgccagggcctgaagctgaccttcgacaccaccttcagccccaacaccggcaagaagagcggcaagatcaagagcagctacaagagagagtgcatcaacctgggctgcgacgtggacttcgacttcgccggccccgccatccacggcagcgccgtgttcggctacgagggctggctggccggctaccagatgaccttcgacagcgccaagagcaagctgaccagaaacaacttcgccgtgggctacagaaccggcgacttccagctgcacaccaacgtgtag

SEQ ID NO: 336198 - DNA, 615 bp, Artificial Sequence
  derived and/or modified sequence
atggccacccacggccagacctgcgccagacccatgtgcatcccccccagctacgccgacctgggcaaggccgccagagacatcttcaacaagggcttcggcttcggcctggtgaagctggacgtgaagaccaagagctgcagcggcgtggagttcagcaccagcggcagcagcaacaccgacaccggcaaggtgaccggcaccctggagaccaagtacaagtggtgcgagtacggcctgaccttcaccgagaagtggaacaccgacaacaccctgggcaccgagatcgccatcgaggaccagatctgccagggcctgaagctgaccttcgacaccaccttcagccccaacaccggcaagaagagcggcaagatcaagagcagctacaagagagagtgcatcaacctgggctgcgacgtggacttcgacttcgccggccccgccatccacggcagcgccgtgttcggctacgagggctggctggccggctaccagatgaccttcgacagcgccaagagcaagctgaccagaaacaacttcgccgtgggctacagaaccggcgacttccagctgcacaccaacgtgaacgacggcaccgagttcggcggcagctag

SEQ ID NO: 336199 - DNA, 768 bp, Artificial Sequence
  derived and/or modified sequence
atgctggtgatccccgccacccaggaggccgaggagttcagcaccagcggcagcagcaacaccgacaccggcaaggtgaccggcaccctggagaccaagtacaagtggtgcgagtacggcctgaccttcaccgagaagtggaacaccgacaacaccctgggcaccgagatcgccatcgaggaccagatctgccagggcctgaagctgaccttcgacaccaccttcagccccaacaccggcaagaagagcggcaagatcaagagcagctacaagagagagtgcatcaacctgggctgcgacgtggacttcgacttcgccggccccgccatccacggcagcgccgtgttcggctacgagggctggctggccggctaccagatgaccttcgacagcgccaagagcaagctgaccagaaacaacttcgccgtgggctacagaaccggcgacttccagctgcacaccaacgtgaacgacggcaccgagttcggcggcagcatctaccagaaggtgtgcgaggacctggacaccagcgtgaacctggcctggaccagcggcaccaactgcaccagattcggcatcgccgccaagtaccagctggaccccaccgccagcatcagcgccaaggtgaacaacagcagcctgatcggcgtgggctacacccagaccctgagacccggcgtgaagctgaccctgagcgccctggtggacggcaagagcatcaacgccggcggccacaaggtgggcctggccctggagctggaggcctag

SEQ ID NO: 336200 - DNA, 849 bp, Artificial Sequence
  derived and/or modified sequence
atggccactcatggccagacctgtgcacgacccatgtgtattccaccctcctacgcggatctagggaaggcagcccgtgatattttcaataaggggttcggctttggtctagttaaactggatgtcaagaccaagtcctgctctggggtggaattttcgaccagcggatcatccaacaccgatacaggcaaagtgaccggcaccctggaaaccaagtacaagtggtgtgaatacggactgacttttaccgagaaatggaacacagataatacgctgggaaccgagatcgctatcgaggaccaaatctgccagggtctcaaactcacattcgacacgacattctctcctaatactgggaagaagtcaggcaaaatcaagagcagctataagcgagaatgtatcaatcttggctgcgatgtggacttcgattttgccggcccagctatccatggttctgccgttttcggctacgagggttggctggctgggtatcagatgacgtttgacagcgccaagtccaaactcaccaggaacaattttgccgtgggatacagaaccggtgattttcagcttcatactaatgttaacgacggtaccgagtttgggggttctatctaccaaaaggtttgcgaagatctcgatacaagtgtgaatctggcgtggacaagcggcacgaactgcaccaggtttggcattgcagccaaataccagctggaccctaccgcatcaatctccgccaaagtgaataactctagcctgataggcgtcggttatacacagacgctgcgaccaggcgtgaaactaaccctgtctgctctggtggatgggaagagtattaacgccggatag

SEQ ID NO: 336201 - DNA, 885 bp, Artificial Sequence
  derived and/or modified sequence
atggccacccacggtcagacatgcgccagacccatgtgtatcccccccagctacgctgaccttggtaaggcggccagggacattttcaataaggggtttggcttcgggcttgtcaagctagatgtcaagactaagagttgcagtggcgtggaattttccacttctgggtctagtaatactgacaccggcaaagtgacaggcacactggagacaaagtacaagtggtgcgagtatgggttgactttcacagagaagtggaacacagacaatacactgggaacagaaatcgccatagaagaccagatctgccaggggctgaagctgactttcgacacaaccttctctccgaacacagggaagaagtccggaaaaattaagagctcctataagcgcgagtgcattaacctcggatgtgacgtcgattttgatttcgccggcccagccatccacgggagcgctgtctttgggtacgagggctggcttgcgggctaccagatgacgtttgatagcgcaaagtcaaaattaacccgcaataactttgctgttggatataggactggggattttcagttgcacaccaacgtaaatgatggaaccgagtttggcggaagcatttaccagaaagtatgcgaagatttggacactagcgtaaacctggcatggacctcaggcacgaactgcacccggtttggaatcgccgctaaatatcagctagaccccaccgcaagcatatctgctaaggtcaacaattcatccttgattggcgtcggctacactcagacattacggccaggagttaaattgactttgtccgctctagtggacggtaagtcaataaacgccgggggtcataaagttggactggctctcgaactggaagcctag

SEQ ID NO: 336202 - DNA, 588 bp, Artificial Sequence
  derived and/or modified sequence
atggcgactcacggacaaacctgcgccaggcccatgtgtatcccgccatcctacgccgacttaggcaaagccgcaagagatatcttcaataagggcttcgggtttggcctggtgaaactggacgtcaagaccaagtcctgctccggggttgagttcagcacctccggctcctcaaatactgataccgggaaagtgacaggaaccctggaaacaaagtacaagtggtgtgagtatggtctcaccttcacagagaaatggaatacggataacactctgggaaccgaaattgctattgaggatcagatttgccagggattgaagctgaccttcgatactaccttctccccaaacactgggaaaaaatccgggaaaataaaaagctcatataagcgagaatgtattaaccttggatgtgacgtcgacttcgactttgcaggccctgcaattcatggtagcgctgtgttcgggtacgaaggctggttggctggataccagatgacttttgactcagccaagagcaagcttactcggaataattttgccgtagggtatcggacaggcgatttccagctgcacaccaacgtctag

SEQ ID NO: 336203 - DNA, 615 bp, Artificial Sequence
  derived and/or modified sequence
atggccacccacggccaaacttgtgctcgccccatgtgtatccctccctcttatgcagacttggggaaggcagcaagagacatcttcaacaagggcttcggctttggcctagtgaagcttgacgttaaaaccaaatcctgttccggcgtagagttcagtacatccggttccagcaacacagacacgggaaaagtcactggcacactggaaaccaagtacaagtggtgcgaatacggcctgacgttcacagaaaaatggaatacagataacacgcttggcacagaaattgctatcgaagatcagatttgccagggccttaagctaacgtttgacacgacctttagtcctaacactggcaagaagtcggggaaaattaagtcctcttacaagagagaatgcataaacctaggttgcgacgtggactttgacttcgctgggccagccatccatgggtctgcagtcttcggatacgaagggtggttggccggctatcaaatgacatttgactccgctaagtccaagctgaccagaaacaattttgcagtggggtaccgcaccggtgatttccagctacacaccaacgtaaatgatggcaccgaatttggcggatcctag

SEQ ID NO: 336204 - DNA, 768 bp, Artificial Sequence
  derived and/or modified sequence
atgttggtaatccccgccacccaggaggctgaggagttttcaacctcgggctctagtaatactgacacgggcaaagtgacaggaacgctggaaacaaagtacaagtggtgcgaatacgggctgacgtttactgaaaagtggaatacagacaacactctgggcacagagatcgccattgaagatcagatctgccagggtctgaaactgacttttgatactacgttctcccctaataccggcaaaaaatcggggaaaatcaaatcttcatacaagcgcgaatgcatcaacctgggctgtgatgtagactttgattttgccggcccagccatacatggaagcgctgtcttcggctatgaaggatggctggccggctatcagatgacttttgattcagccaaatcgaagctgactagaaacaactttgcagtcgggtatagaaccggggatttccagctgcacacgaatgtgaacgacggcactgagttcggaggtagcatataccagaaagtctgcgaggatctagacacatcagtgaacctggcttggacttccggcactaattgcacccggtttggtatagctgcaaagtatcaactggaccctacggccagcattagcgcaaaggtcaataactcttcactgattggggtcggatacacacagaccctgaggcctggggtgaaactgacgttgtctgctttggtggatggaaaaagtatcaacgctgggggccacaaggtaggcctggctctggaactggaggcgtag

SEQ ID NO: 336205 - DNA, 885 bp, Artificial Sequence
  derived and/or modified sequence
atggccactcacggccaaacctgcgctcggccaatgtgtataccgccatcttatgccgacctgggtaaagctgcacgggatattttcaacaagggcttcgggtttggcctggttaaactcgatgtcaaaacaaaatcttgtagcggtgtggagtttagcaccagtgggtcatccaatacagacactgggaaagtcactggtactctggagactaagtacaaatggtgcgagtacgggctgacctttacggaaaagtggaacacagataacacattgggcaccgaaatcgccatagaggatcaaatttgccagggcctaaagctgacattcgataccacattctccccaaacaccggaaagaagtctggtaaaattaagtcctcctataaacgcgagtgcattaacctaggttgtgatgttgacttcgattttgctggacccgctattcacggatcagcggtctttgggtacgaggggtggctggctggataccagatgacttttgactcagccaaatcgaagctgactaggaacaactttgcagtgggatataggaccggcgattttcaattgcatacaaatgttaacgacggcactgagtttggaggatccatctatcagaaagtatgtgaggatctcgataccagcgtgaatttagcatggacttctgggactaactgtaccagatttggaatagctgccaagtaccagctcgacccaactgcatctattagtgccaaagtcaacaattccagcctcatcggagtcgggtacacccagactctgaggcctggagtgaagctgacactgagcgcccttgtggacggtaaatctattaatgctgggggacacaaagtagggttggctctcgaacttgaggcatag

SEQ ID NO: 336206 - DNA, 849 bp, Artificial Sequence
  derived and/or modified sequence
atggccacccacggccagacctgtgcccggcccatgtgcatccccccatcctatgctgacctgggcaaggccgcccgggacatcttcaacaagggctttggatttggcctggtgaagctggatgtgaagaccaagagctgcagcggcgtggagttcagcaccagcggcagcagcaacacagacaccgggaaggtgacaggcaccctggagaccaagtacaagtggtgtgaatatggcctgaccttcacagagaagtggaacacagacaacaccctgggcacagagatcgccatcgaggaccagatctgccagggcctgaagctgacctttgacaccaccttcagccccaacacaggcaagaagagcggcaagatcaagagcagctacaagcgggagtgcatcaacctgggctgtgatgtggactttgattttgctggccctgccatccacggcagcgctgtgtttggctatgagggctggctggccggctaccagatgacctttgacagcgccaagagcaagctgaccaggaacaactttgctgtgggctacagaactggagacttccagctgcacaccaacgtgaatgatggaacagaatttggaggcagcatctaccagaaggtgtgtgaggacctggacacctctgtgaacctggcctggaccagcggcaccaactgcacccgcttcggcattgctgccaagtaccagctggaccccacagccagcatcagcgccaaggtgaacaacagcagcctcatcggcgtgggctacacccagaccctgcggcctggggtgaagctgaccctgagcgccctggtggatggcaagagcatcaatgccggctag

SEQ ID NO: 336207 - DNA, 885 bp, Artificial Sequence
  derived and/or modified sequence
atggccacccacggccagacctgtgcccggcccatgtgcatccccccatcctatgctgacctgggcaaggccgcccgggacatcttcaacaagggctttggatttggcctggtgaagctggatgtgaagaccaagagctgcagcggcgtggagttcagcaccagcggcagcagcaacacagacaccgggaaggtgacaggcaccctggagaccaagtacaagtggtgtgaatatggcctgaccttcacagagaagtggaacacagacaacaccctgggcacagagatcgccatcgaggaccagatctgccagggcctgaagctgacctttgacaccaccttcagccccaacacaggcaagaagagcggcaagatcaagagcagctacaagcgggagtgcatcaacctgggctgtgatgtggactttgattttgctggccctgccatccacggcagcgctgtgtttggctatgagggctggctggccggctaccagatgacctttgacagcgccaagagcaagctgaccaggaacaactttgctgtgggctacagaactggagacttccagctgcacaccaacgtgaatgatggaacagaatttggaggcagcatctaccagaaggtgtgtgaggacctggacacctctgtgaacctggcctggaccagcggcaccaactgcacccgcttcggcattgctgccaagtaccagctggaccccacagccagcatcagcgccaaggtgaacaacagcagcctcatcggcgtgggctacacccagaccctgcggcctggggtgaagctgaccctgagcgccctggtggatggcaagagcatcaatgccggcggccacaaggtgggcctggccctggagctggaggcctag

SEQ ID NO: 336208 - DNA, 588 bp, Artificial Sequence
  derived and/or modified sequence
atggccacccacggccagacctgtgcccggcccatgtgcatccccccatcctatgctgacctgggcaaggccgcccgggacatcttcaacaagggctttggatttggcctggtgaagctggatgtgaagaccaagagctgcagcggcgtggagttcagcaccagcggcagcagcaacacagacaccgggaaggtgacaggcaccctggagaccaagtacaagtggtgtgaatatggcctgaccttcacagagaagtggaacacagacaacaccctgggcacagagatcgccatcgaggaccagatctgccagggcctgaagctgacctttgacaccaccttcagccccaacacaggcaagaagagcggcaagatcaagagcagctacaagcgggagtgcatcaacctgggctgtgatgtggactttgattttgctggccctgccatccacggcagcgctgtgtttggctatgagggctggctggccggctaccagatgacctttgacagcgccaagagcaagctgaccaggaacaactttgctgtgggctacagaactggagacttccagctgcacaccaacgtgtag

SEQ ID NO: 336209 - DNA, 615 bp, Artificial Sequence
  derived and/or modified sequence
atggccacccacggccagacctgtgcccggcccatgtgcatccccccatcctatgctgacctgggcaaggccgcccgggacatcttcaacaagggctttggatttggcctggtgaagctggatgtgaagaccaagagctgcagcggcgtggagttcagcaccagcggcagcagcaacacagacaccgggaaggtgacaggcaccctggagaccaagtacaagtggtgtgaatatggcctgaccttcacagagaagtggaacacagacaacaccctgggcacagagatcgccatcgaggaccagatctgccagggcctgaagctgacctttgacaccaccttcagccccaacacaggcaagaagagcggcaagatcaagagcagctacaagcgggagtgcatcaacctgggctgtgatgtggactttgattttgctggccctgccatccacggcagcgctgtgtttggctatgagggctggctggccggctaccagatgacctttgacagcgccaagagcaagctgaccaggaacaactttgctgtgggctacagaactggagacttccagctgcacaccaacgtgaatgatggaacagaatttggaggcagctag

SEQ ID NO: 336210 - DNA, 768 bp, Artificial Sequence
  derived and/or modified sequence
atgctggtgatcccagccacccaggaggccgaggagttcagcaccagcggcagcagcaacacagacaccgggaaggtgacaggcaccctggagaccaagtacaagtggtgtgaatatggcctgaccttcacagagaagtggaacacagacaacaccctgggcacagaaattgccatcgaggaccagatctgccagggcctgaagctgacctttgacaccaccttcagccccaacacaggcaagaagagcggcaagatcaagagcagctacaagcgggagtgcatcaacctgggctgtgatgtggactttgattttgctggccctgccatccacggcagcgctgtgtttggctatgagggctggctggccggctaccagatgacctttgattctgccaagagcaagctgaccaggaacaactttgctgtgggctacagaactggagacttccagctgcacaccaacgtgaatgatggaacagaatttggaggcagcatctaccagaaggtgtgtgaggacctggacacctctgtgaacctggcctggaccagcggcaccaactgcaccaggtttggaattgctgccaagtaccagctggaccccacagccagcatcagcgccaaggtgaacaacagcagcctgattggagtgggctacacccagaccctgcggcctggggtgaagctgaccctgagcgccctggtggatggcaagagcatcaatgctgggggccacaaggtgggcctggccctggagctggaggcctag

SEQ ID NO: 336211 - DNA, 849 bp, Artificial Sequence
  derived and/or modified sequence
atggccacccacggccagacctgcgcccggcccatgtgcatccccccgtcctatgctgacctgggcaaggccgccagggacatttttaataagggcttcggctttggcctcgtgaagttagatgtgaagaccaagagctgctccggggtagaattctccacctcaggatccagtaacactgacactggaaaagtcaccggtacgctcgagactaagtacaaatggtgcgagtatgggctcacatttacggagaagtggaacaccgataataccctcgggacagaaatagctatagaggaccagatctgccaagggttgaagttgacattcgacacaactttttctccaaacacagggaaaaaaagtggtaaaataaagagttcttacaagcgcgaatgcatcaacctgggctgcgatgtggatttcgacttcgctggacctgcgatccatggctcggccgtattcggatatgaaggatggctggcaggttatcagatgactttcgactcagcaaagtcaaaacttacacggaacaatttcgctgtcggttataggacaggagactttcagctgcatactaatgtgaacgacggtacagagttcgggggctcaatttatcagaaagtgtgtgaggatctggatacctcagttaacctggcctggacgagtggtacaaactgtacccggttcgggattgctgctaagtaccagctcgatcccaccgcctcaatctctgccaaagtgaataacagttccttaattggcgtgggctatacacaaactttgagaccaggggtgaaactgactctatcagcccttgtggacgggaaatctattaacgccgggtag

SEQ ID NO: 336212 - DNA, 885 bp, Artificial Sequence
  derived and/or modified sequence
atggccacccacggccagacctgcgcccggcccatgtgcatcccccccagctacgccgacttgggaaaagctgctcgggacattttcaataagggctttggatttggcctcgttaagctcgatgtgaagacgaaatcttgttccggagttgagttttccacctctggttcatctaataccgacaccgggaaggtgacaggcaccctagaaacaaagtataaatggtgtgagtatggccttacattcacggaaaagtggaataccgacaataccttgggaacagagattgccatcgaggaccagatatgtcaagggctcaaactcaccttcgacactactttctccccaaacacaggaaagaaaagcggaaagattaaaagctcttataagagggaatgcatcaatttgggatgtgacgtagatttcgactttgcaggtcctgcaatccatggcagtgccgtctttggctacgaaggctggctggcaggataccagatgacatttgactccgctaagagtaaactgacccggaataactttgccgtcggatacaggaccggggactttcagctacacaccaatgtcaacgatggaaccgagttcggcggatcaatctatcagaaggtgtgcgaggatctcgacacttccgttaacctagcctggacaagcggtactaactgcacaagattcggcattgctgccaaatatcagcttgacccaaccgcaagtatctctgctaaagttaataattcatccctcataggggtaggatacactcagacgctgcgacccggggtcaaacttaccttgagcgccctggtggatggtaagagcatcaacgccggaggacacaaggttggccttgcactcgagctagaggcctag

SEQ ID NO: 336213 - DNA, 588 bp, Artificial Sequence
  derived and/or modified sequence
atggccacccacggccagacctgcgcccggcccatgtgcatccccccttcatacgcagacctgggcaaagcggccagagacatttttaataaagggttcggatttggcctcgtgaagctggacgttaagactaagtcttgttctggcgtggagttctccacctccggaagctctaacactgacacgggaaaggtaaccggtaccctggaaacaaagtacaagtggtgtgaatatggccttacctttacggaaaaatggaacacagataataccctggggacagaaatcgccattgaggatcagatctgtcaggggctgaaacttaccttcgatacgaccttctcccctaacacagggaaaaagtccgggaagattaagtcctcttataagagggaatgcattaacttgggctgtgacgtggatttcgacttcgctggcccggcaatccacggcagcgcggtctttggctatgagggttggctggctggatatcagatgaccttcgactccgcaaagtcaaagctgacccgcaacaatttcgccgttgggtacaggactggtgatttccagctgcacaccaacgtgtag

SEQ ID NO: 336214 - DNA, 615 bp, Artificial Sequence
  derived and/or modified sequence
atggccacccacggccagacctgcgcccggcccatgtgcatccccccaagttacgcagatctcggtaaagccgcccgtgatatttttaataaaggatttggcttcggccttgtcaagctggatgtcaagacaaagtcctgcagcggcgtcgagttctcaacgagcgggtctagcaataccgacaccggcaaagtcacaggaactctcgagaccaagtacaagtggtgcgagtacggtttgacattcactgagaaatggaacacggacaatacactgggcacagagattgcgatcgaggatcagatttgtcaaggcctaaagctcacctttgacacaacattctctccgaataccggcaaaaaaagcgggaaaatcaaaagttcctataaacgggagtgtatcaacctgggatgcgatgtggacttcgattttgccggccccgccatacatgggtctgcagtgtttggctatgaagggtggttagccggttatcagatgacgttcgatagtgcaaagagtaagctcacccgaaacaactttgcagtgggatataggaccggcgatttccagctgcacacaaatgtgaatgacgggacagaatttggtgggtcctag

SEQ ID NO: 336215 - DNA, 768 bp, Artificial Sequence
  derived and/or modified sequence
atgctggtgatccccgccacccaggaggccgaggagttcagcacctctgggagcagcaataccgatactgggaaagttactggcacccttgaaactaagtacaaatggtgcgagtacggcctgacctttactgaaaagtggaatacggacaacacccttggcaccgagatcgccatcgaggaccagatctgtcagggattaaagctaacattcgacactactttctccccaaacacaggcaaaaagtcagggaagattaaatcttcatacaagagagagtgtattaacctcggatgcgacgttgatttcgatttcgctgggcctgctatccatggcagtgccgtttttggctacgaaggatggttagcaggataccaaatgaccttcgattccgctaagtccaagctcacccgaaacaacttcgctgttgggtaccgtactggcgatttccagttgcatacaaatgtgaacgatggcacagagtttggaggcagcatctatcagaaggtctgtgaagatctggacacatcggtgaatttagcctggacctcgggaacgaattgcacacgctttggcatcgctgccaaataccagttagatccaactgcttctatctctgcgaaagtgaacaactcctcactcatcggggtgggttacacacagacgctgcggcctggcgttaagctgaccctgagtgctctggtggatggaaagagcattaatgccggcggccacaaggttggcctcgccctggaactggaggcctag

SEQ ID NO: 336216 - DNA, 885 bp, Artificial Sequence
  derived and/or modified sequence
atggccacccacggccagacctgcgcccggcccatgtgcatcccccctagttacgctgacttaggtaaagctgcacgcgatatttttaacaaggggttcggattcgggcttgtgaagttggacgtaaaaacgaaatcttgcagcggcgtcgagttttccacctccggctcaagcaatacagacaccgggaaagtgacagggaccctcgagaccaagtataagtggtgcgaatatggcctcaccttcacagaaaagtggaatactgacaacactcttggcacagagatagccatcgaagaccagatttgtcaagggctgaagttgacattcgacacaaccttcagtcccaataccggtaaaaagtccggtaagattaagtctagttataagagggagtgcattaacctcggttgcgacgtggattttgatttcgcagggcctgcgattcacggaagtgccgtgtttggttacgagggttggcttgctggttatcagatgacattcgactccgcgaagagcaaactcacccggaataatttcgccgttggttatagaaccggagacttccagctgcacactaatgttaacgatggtacggagttcggaggtagcatctatcagaaagtgtgtgaggacctggacaccagtgtgaacctggcatggacatccggtactaattgcacaaggtttggcatcgctgctaagtaccagttggatccaaccgcaagtatcagcgctaaggtgaataacagctccttaatcggagtcggatacacacagacccttcggcccggtgtcaaattgacgctttctgcactcgtagacgggaaatcaatcaatgcaggaggccacaaggttggcctggcactagagctggaggcttag

SEQ ID NO: 336217 - DNA, 849 bp, Artificial Sequence
  derived and/or modified sequence
atggcgacacacggacagacctgcgccagacctatgtgtattccgcctagttatgccgaccttggcaaagccgctcgtgatatcttcaataagggattcgggtttggccttgtgaagcttgacgtaaaaacaaaaagctgttccggggtggagtttagcacgagtggatcgtccaatacagataccggaaaggtgacaggaactttggaaacaaagtataagtggtgcgaatatggtttgacctttacggagaagtggaataccgacaatacattggggactgaaatcgccatagaagatcagatatgccagggcctcaagctcacctttgatactaccttctcacccaacacgggaaaaaagtccggcaagatcaagtcttcctataagagggagtgcataaacctcggttgtgacgtcgacttcgattttgctggcccagccatccatggatctgctgttttcggatatgagggctggcttgccggataccagatgacttttgattctgcgaagtcgaaactgacccgtaacaatttcgctgttggctaccgcactggcgattttcagctgcataccaatgtgaatgacggcactgaattcggaggatccatctaccagaaagtgtgcgaggatctggatacttcagtcaacctagcatggacaagcggcacaaactgcaccagattcggaatcgctgctaagtatcagctggatcctaccgcctctatctcagccaaggtcaataacagtagcttgatcggagtgggatacacacaaacattgcgccctggcgtgaaactgactttgagtgctcttgtggatggaaaatccattaatgccggatag

SEQ ID NO: 336218 - DNA, 885 bp, Artificial Sequence
  derived and/or modified sequence
atggctacccacgggcagacttgtgcccgtccaatgtgtatccccccatcttacgctgacctggggaaggctgccagagacatcttcaacaaaggcttcgggttcggcctagtcaagctggatgttaaaactaagagttgcagcggggtggaattttcaacatcaggatccagcaacacagacaccggtaaggtgaccggcaccctcgagacaaaatataagtggtgcgaatacggactgactttcaccgagaagtggaatacagacaatacccttggaacagagattgctattgaagaccaaatctgtcaaggactcaagttgacattcgatacaacttttagcccaaacacagggaagaaaagcggtaaaatcaaatctagttataagagggaatgcataaacctcggttgtgacgtggactttgatttcgccggacccgcaattcacggcagtgccgtcttcggctacgaagggtggctggcgggttaccagatgaccttcgactccgccaagagcaagcttactagaaacaactttgccgttggctatagaactggtgatttccagctgcacactaatgtgaatgacggcacagaatttggtggtagcatataccagaaagtctgcgaagacttagatacttctgtgaaccttgcatggacaagcggtacaaactgtactagattcgggattgctgcaaaataccagcttgacccaactgcttctattagcgcgaaagttaacaactcatcgctgatcggagtgggttacactcagaccctccgacctggagtgaagctgacactgagtgccctggtggacggaaagagtatcaacgccggaggacacaaggtcggcctcgccctcgagcttgaggcttag

SEQ ID NO: 336219 - DNA, 588 bp, Artificial Sequence
  derived and/or modified sequence
atggccacacacggtcagacctgcgcccgacctatgtgcatccccccatcatacgctgatttaggcaaggccgctcgagatatttttaataaaggtttcggctttggcttggttaagctggacgtaaaaaccaagtcttgctctggcgttgaattctcgacgagcggctcgagtaacacagatacgggaaaggtgactggcaccctggaaactaaatataaatggtgtgagtacgggttgacatttaccgagaagtggaacaccgacaatacactcggtactgagatcgcgatagaagaccagatctgccagggattgaagctcactttcgacaccacgttttctcccaatacgggtaaaaagtccggaaaaatcaagagttcctacaaacgcgagtgtatcaacctgggatgcgacgttgatttcgatttcgcaggaccggcaatccacggttccgccgtcttcggctatgagggatggcttgccggataccagatgactttcgattctgccaagtctaagttgacaaggaacaacttcgcagtgggttaccgcactggagactttcaactacacaccaacgtttag

SEQ ID NO: 336220 - DNA, 615 bp, Artificial Sequence
  derived and/or modified sequence
atggctacacatggccaaacttgcgcccgtcctatgtgcatccccccaagctacgccgacctcggcaaggcagccagagatatttttaacaagggattcggatttggccttgtcaaactcgatgtaaagacgaagagttgttccggagtggaatttagcacatcaggtagctctaacaccgatacgggaaaggtgaccggcaccctagagacgaaatacaaatggtgtgagtacggccttacatttaccgagaagtggaacaccgacaatactcttggtacagagatcgctatcgaagaccaaatctgccagggacttaaactgacttttgacaccaccttttcaccaaataccggcaaaaaaagtggaaagatcaaatcttcatacaagcgcgaatgcattaaccttggctgcgacgttgatttcgattttgcaggaccagcgatccacggctcagccgtgttcggctacgaggggtggcttgctggctatcagatgacgttcgactctgctaagtctaaacttacccggaacaacttcgctgtaggctaccggactggcgacttccaactgcacaccaatgtcaatgatggaactgaattcgggggttcttag

SEQ ID NO: 336221 - DNA, 768 bp, Artificial Sequence
  derived and/or modified sequence
atgttggtcatccctgctacccaggaggccgaggagttttccacatctggttcaagtaacacagacacaggcaaggtcaccgggacactggagaccaaatataagtggtgcgagtatgggctaactttcaccgagaagtggaacaccgacaatactctgggaacggagatagcgattgaagatcagatctgtcagggtctgaagctgacatttgataccaccttttccccaaataccgggaagaagagcggcaaaattaaatcgagttacaaaagggagtgcataaatcttgggtgcgacgtagactttgattttgcgggacctgccattcatggatctgcagtgtttggatatgagggctggcttgccggataccagatgacctttgatagcgctaagtctaagttgacgaggaacaacttcgcagttggctaccggaccggggacttccagctccatacaaacgtgaacgatgggacagagttcgggggatcaatctatcaaaaggtctgcgaagatctggacaccagcgtcaatctggcctggacctctggaactaactgcaccagatttggtattgccgcaaagtaccagttggaccccactgcatccattagcgctaaagttaataactcttctctcataggggtgggatacactcagaccctcaggcccggagtaaaactcacattgtctgcccttgtggacggtaagagcatcaacgctggtggccacaaagttgggttggcacttgaactggaagcatag

SEQ ID NO: 336222 - DNA, 885 bp, Artificial Sequence
  derived and/or modified sequence
atggctacacacggccagacctgtgcacgccctatgtgtattccacccagctacgcagacctaggcaaagccgctcgagacatattcaataaagggtttggctttggactcgtcaagctcgacgtcaagactaagagctgttccggagtcgaattcagtacctccgggagctccaacaccgatactgggaaagtgactggaactctggaaactaaatacaagtggtgcgagtatggactgactttcacagagaaatggaacacagacaacaccttgggaaccgaaattgctatcgaggaccaaatctgccagggcctaaagttgacatttgacaccaccttctcccccaacacaggcaaaaagagtggcaaaatcaaatcaagttacaagagagagtgtataaacctgggatgtgacgtcgacttcgatttcgctggacctgccatacacgggagtgccgtctttgggtacgaaggctggcttgccggataccagatgacttttgactccgcaaagtcgaagctcacacgaaataatttcgccgtcggttaccggacgggcgactttcagctgcatactaatgttaacgacggtactgaattcggcggatccatttaccagaaagtgtgtgaggacttagatacctccgtcaatctcgcatggacttctggaactaactgcactagattcgggatcgccgcaaagtaccagctggacccgaccgcaagcattagtgccaaagtgaataactcatccctgattggcgtgggttacacacagaccctgaggccaggcgtcaaacttaccctgagcgcactggtagacggtaagagtatcaatgccggtggtcacaaagtgggccttgccttggagctggaggcctag

SEQ ID NO: 336223 - DNA, 931 bp, Artificial Sequence
  derived and/or modified sequence
ggcagtcccaaaaagcctctcaggcacacaacccagcacagcaaggcagtcacaccaagattcccctcttcccgcggcctcgccatggcgacccacggacagacttgcgcgcgtccaatgtgtattcctccatcatatgctgaccttggcaaagctgccagagatattttcaacaaaggatttggttttgggttggtgaaactggatgtgaaaacaaagtcttgcagtggcgtggaattttcaacgtccggttcatctaatacagacactggtaaagttactgggaccttggagaccaaatacaagtggtgtgagtatggtctgactttcacagaaaagtggaacactgataacactctgggaacagaaatcgcaattgaagaccagatttgtcaaggtttgaaactgacatttgatactaccttctcaccaaacacaggaaagaaaagtggtaaaatcaagtcttcttacaagagggagtgtataaaccttggttgtgatgttgactttgattttgctggacctgcaatccatggttcagctgtctttggttatgagggctggcttgctggctaccagatgacctttgacagtgccaaatcaaagctgacaaggaataactttgcagtgggctacaggactggggacttccagctacacactaatgtcaatgatgggacagaatttggaggatcaatttatcagaaagtttgtgaagatcttgacacttcagtaaaccttgcttggacatcaggtaccaactgcactcgttttggcattgcagctaaatatcagttggatcccactgcttccatttctgcaaaagtcaacaactctagcttaattggagtaggctatactcagactctgaggcctggtgtgaagcttacactctctgctctggtagatgggaagagcattaatgctggag

SEQ ID NO: 336224 - DNA, 1557 bp, Artificial Sequence
  derived and/or modified sequence
ggcgcggcggacagccccgggggcagcggcggggtcctgtctgggagaggacagggttgcggcgggcggaacggtgtctccttcacttcgccctccagctgctggagctgcagcccgaccgcgagcgtgccaagcggcttcagcagctagcggagcggtggcggcggcccccctcaggacaccaccagattcccctcttcccgcggcctcgccatggcgacccacggacagacttgcgcgcgtccaatgtgtattcctccatcatatgctgaccttggcaaagctgccagagatattttcaacaaaggatttggttttgggttggtgaaactggatgtgaaaacaaagtcttgcagtggcgtggaattttcaacgtccggttcatctaatacagacactggtaaagttactgggaccttggagaccaaatacaagtggtgtgagtatggtctgactttcacagaaaagtggaacactgataacactctgggaacagaaatcgcaattgaagaccagatttgtcaaggtttgaaactgacatttgatactaccttctcaccaaacacaggaaagaaaagtggtaaaatcaagtcttcttacaagagggagtgtataaaccttggttgtgatgttgactttgattttgctggacctgcaatccatggttcagctgtctttggttatgagggctggcttgctggctaccagatgacctttgacagtgccaaatcaaagctgacaaggaataactttgcagtgggctacaggactggggacttccagctacacactaatgtcaatgatgggacagaatttggaggatcaatttatcagaaagtttgtgaagatcttgacacttcagtaaaccttgcttggacatcaggtaccaactgcactcgttttggcattgcagctaaatatcagttggatcccactgcttccatttctgcaaaagtcaacaactctagcttaattggagtaggctatactcagactctgaggcctggtgtgaagcttacactctctgctctggtagatgggaagagcattaatgctggaggccacaaggttgggctcgccctggagttggaggcttaatccagctgaaagaaacctttgggaatggatatcagaagatttggccttaatatatttccattgtgaccagcagcaggcttttttcccccaagaagatgatcaaaacaaaggatgatctcaacaagagctgtattttaagtatttagacagttctttgttagctggtttctagttggttatctagttaccaatgctgcagtcctgcagtcacctatacattatttaaatgtatttaactgttaaatgcgctacccaccaataatgaaatagacctttatgaaaactgtgcaattgtgtgcatgtttgtttttatgttcctttagaaaacattgactgttaccattgaatgagatggatcagtggatattaagatgaggttacaaattttgttaagttcagccattattacttttggtatcccagaacatgacaaattatgaataaaacaagtatacataa

SEQ ID NO: 336225 - DNA, 681 bp, Artificial Sequence
  derived and/or modified sequence
cccaccgacggacggaggcagcccacctgcaggaccggggcgctgtcggtccacgtggccgctctggagcagattcccctcttcccgcggcctcgccatggcgacccacggacagacttgcgcgcgtccaatgtgtattcctccatcatatgctgaccttggcaaagctgccagagatattttcaacaaaggatttggttttgggttggtgaaactggatgtgaaaacaaagtcttgcagtggcgtggaattttcaacgtccggttcatctaatacagacactggtaaagttactgggaccttggagaccaaatacaagtggtgtgagtatggtctgactttcacagaaaagtggaacactgataacactctgggaacagaaatcgcaattgaagaccagatttgtcaaggtttgaaactgacatttgatactaccttctcaccaaacacaggaaagaaaagtggtaaaatcaagtcttcttacaagagggagtgtataaaccttggttgtgatgttgactttgattttgctggacctgcaatccatggttcagctgtctttggttatgagggctggcttgctggctaccagatgacctttgacagtgccaaatcaaagctgacaaggaataactttgcagtgggctacaggactggggacttccagctacacactaatgt

SEQ ID NO: 336226 - DNA, 738 bp, Artificial Sequence
  derived and/or modified sequence
aagatggccgcgctgccccgcggcccctcgcccctctctgcccgggatctccctttggccctttgaccccagcttaccgcacttcttgtccctcccgcagattcccctcttcccgcggcctcgccatggcgacccacggacagacttgcgcgcgtccaatgtgtattcctccatcatatgctgaccttggcaaagctgccagagatattttcaacaaaggatttggttttgggttggtgaaactggatgtgaaaacaaagtcttgcagtggcgtggaattttcaacgtccggttcatctaatacagacactggtaaagttactgggaccttggagaccaaatacaagtggtgtgagtatggtctgactttcacagaaaagtggaacactgataacactctgggaacagaaatcgcaattgaagaccagatttgtcaaggtttgaaactgacatttgatactaccttctcaccaaacacaggaaagaaaagtggtaaaatcaagtcttcttacaagagggagtgtataaaccttggttgtgatgttgactttgattttgctggacctgcaatccatggttcagctgtctttggttatgagggctggcttgctggctaccagatgacctttgacagtgccaaatcaaagctgacaaggaataactttgcagtgggctacaggactggggacttccagctacacactaatgtcaatgatgggacagaatttggaggatcaa

SEQ ID NO: 336227 - DNA, 1581 bp, Artificial Sequence
  derived and/or modified sequence
tccttcacttcgccctccagctgctggagctgcagcccgaccgcgagcgtgccaagcggcttcagcagctagcggagcggtggcggcggcccccctcaggacaccaccagattcccctcttcccgcggcctcgccatggcgacccacggacagacttgcgcgcgtccaatgtgtattcctccatcatatgctgaccttggcaaagctgccagagatattttcaacaaaggatttggttttgggttggtgaaactggatgtgaaaacaaagtcttgcagtggcgtgatatcacaatttctggctgtagtctctttattattttcacatcagctgtcttccttaggcttggcgtggtgatgcttgtgatcccagctactcaggaggctgaggaattttcaacgtccggttcatctaatacagacactggtaaagttactgggaccttggagaccaaatacaagtggtgtgagtatggtctgactttcacagaaaagtggaacactgataacactctgggaacagaaatcgcaattgaagaccagatttgtcaaggtttgaaactgacatttgatactaccttctcaccaaacacaggaaagaaaagtggtaaaatcaagtcttcttacaagagggagtgtataaaccttggttgtgatgttgactttgattttgctggacctgcaatccatggttcagctgtctttggttatgagggctggcttgctggctaccagatgacctttgacagtgccaaatcaaagctgacaaggaataactttgcagtgggctacaggactggggacttccagctacacactaatgtcaatgatgggacagaatttggaggatcaatttatcagaaagtttgtgaagatcttgacacttcagtaaaccttgcttggacatcaggtaccaactgcactcgttttggcattgcagctaaatatcagttggatcccactgcttccatttctgcaaaagtcaacaactctagcttaattggagtaggctatactcagactctgaggcctggtgtgaagcttacactctctgctctggtagatgggaagagcattaatgctggaggccacaaggttgggctcgccctggagttggaggcttaatccagctgaaagaaacctttgggaatggatatcagaagatttggccttaatatatttccattgtgaccagcagcaggcttttttcccccaagaagatgatcaaaacaaaggatgatctcaacaagagctgtattttaagtatttagacagttctttgttagctggtttctagttggttatctagttaccaatgctgcagtcctgcagtcacctatacattatttaaatgtatttaactgttaaatgcgctacccaccaataatgaaatagacctttatgaaaactgtgcaattgtgtgcatgtttgtttttatgttcctttagaaaacattgactgttaccattgaatgagatggatcagtggatattaagatgaggttacaaattttgttaagttcagccattattacttttggtatcccagaacatgacaaattatgaataaaacaagtatacat

SEQ ID NO: 336228 - DNA, 1424 bp, Artificial Sequence
  derived and/or modified sequence
ggcagtcccaaaaagcctctcaggcacacaacccagcacagcaaggcagtcacaccaagattcccctcttcccgcggcctcgccatggcgacccacggacagacttgcgcgcgtccaatgtgtattcctccatcatatgctgaccttggcaaagctgccagagatattttcaacaaaggatttggttttgggttggtgaaactggatgtgaaaacaaagtcttgcagtggcgtggaattttcaacgtccggttcatctaatacagacactggtaaagttactgggaccttggagaccaaatacaagtggtgtgagtatggtctgactttcacagaaaagtggaacactgataacactctgggaacagaaatcgcaattgaagaccagatttgtcaaggtttgaaactgacatttgatactaccttctcaccaaacacaggaaagaaaagtggtaaaatcaagtcttcttacaagagggagtgtataaaccttggttgtgatgttgactttgattttgctggacctgcaatccatggttcagctgtctttggttatgagggctggcttgctggctaccagatgacctttgacagtgccaaatcaaagctgacaaggaataactttgcagtgggctacaggactggggacttccagctacacactaatgtcaatgatgggacagaatttggaggatcaatttatcagaaagtttgtgaagatcttgacacttcagtaaaccttgcttggacatcaggtaccaactgcactcgttttggcattgcagctaaatatcagttggatcccactgcttccatttctgcaaaagtcaacaactctagcttaattggagtaggctatactcagactctgaggcctggtgtgaagcttacactctctgctctggtagatgggaagagcattaatgctggaggccacaaggttgggctcgccctggagttggaggcttaatccagctgaaagaaacctttgggaatggatatcagaagatttggccttaatatatttccattgtgaccagcagcaggcttttttcccccaagaagatgatcaaaacaaaggatgatctcaacaagagctgtattttaagtatttagacagttctttgttagctggtttctagttggttatctagttaccaatgctgcagtcctgcagtcacctatacattatttaaatgtatttaactgttaaatgcgctacccaccaataatgaaatagacctttatgaaaactgtgcaattgtgtgcatgtttgtttttatgttcctttagaaaacattgactgttaccattgaatgagatggatcagtggatattaagatgaggttacaaattttgttaagttcagccattattacttttggtatcccagaacatgacaaattatgaataaaacaagtatac

SEQ ID NO: 336229 - protein, 303 aa, Artificial Sequence
  derived and/or modified sequence
MPPKVTSELLRQLRQAMRNSEYVTEPIQAYIIPSGDAHQSEYIAPCDCRRAFVSGFDGSAGTAIITEEHAAMWTDGRYFLQAAKQMDSNWTLMKMGLKDTPTQEDWLVSVLPEGSRVGVDPLIIPTDYWKKMAKVLRSAGHHLIPVKENLVDKIWTDRPERPCKPLLTLGLDYTGISWKDKVADLRLKMAERNVMWFVVTALDEIAWLFNLRGSDVEHNPVFFSYAIIGLETIMLFIDGDRIDAPSVKEHLLLDLGLEAEYRIQVHPYKSILSELKALCADLSPREKVWVSDKASYAVSETIP

SEQ ID NO: 336230 - DNA, 912 bp, Artificial Sequence
  derived and/or modified sequence
atgccccccaaggtgaccagcgagctgctgagacagctgagacaggccatgagaaacagcgagtacgtgaccgagcccatccaggcctacatcatccccagcggcgacgcccaccagagcgagtacatcgccccctgcgactgcagaagagccttcgtgagcggcttcgacggcagcgccggcaccgccatcatcaccgaggagcacgccgccatgtggaccgacggcagatacttcctgcaggccgccaagcagatggacagcaactggaccctgatgaagatgggcctgaaggacacccccacccaggaggactggctggtgagcgtgctgcccgagggcagcagagtgggcgtggaccccctgatcatccccaccgactactggaagaagatggccaaggtgctgagaagcgccggccaccacctgatccccgtgaaggagaacctggtggacaagatctggaccgacagacccgagagaccctgcaagcccctgctgaccctgggcctggactacaccggcatcagctggaaggacaaggtggccgacctgagactgaagatggccgagagaaacgtgatgtggttcgtggtgaccgccctggacgagatcgcctggctgttcaacctgagaggcagcgacgtggagcacaaccccgtgttcttcagctacgccatcatcggcctggagaccatcatgctgttcatcgacggcgacagaatcgacgcccccagcgtgaaggagcacctgctgctggacctgggcctggaggccgagtacagaatccaggtgcacccctacaagagcatcctgagcgagctgaaggccctgtgcgccgacctgagccccagagagaaggtgtgggtgagcgacaaggccagctacgccgtgagcgagaccatcccctag

SEQ ID NO: 336231 - DNA, 912 bp, Artificial Sequence
  derived and/or modified sequence
atgccccccaaggtgacctccgaacttctgaggcagctgcgccaggccatgcggaacagcgagtacgtcacagaacccatccaggcgtacattatcccaagtggggacgctcaccagtctgagtacatcgcaccatgcgactgccgccgcgcctttgtgtctgggtttgatgggagtgccgggaccgccataattaccgaagagcatgcagccatgtggactgacggccggtactttctccaggcagctaagcagatggactcaaattggacactgatgaaaatggggctcaaagacactcctacgcaggaggactggctggtcagtgttctgcccgagggatctcgagtgggggtggatccactcatcatccccacagactactggaaaaaaatggcgaaggtactgagatcagccggacatcacctgatacccgttaaagagaatcttgttgacaaaatatggactgaccgccccgaaagaccgtgcaagccacttctcacgcttgggctggactatacagggatttcttggaaagacaaggtcgcagatctccggcttaagatggctgaaagaaatgtgatgtggtttgtcgttactgcactggacgagatagcctggctatttaacctgagagggtcagatgtggagcacaatcccgtgttcttttcatatgcaattattggcctggagaccatcatgttgtttatcgatggcgacagaatcgatgctccctctgtgaaggaacacctcctccttgacttgggattggaggctgagtatcgtattcaagtgcatccctacaagtctattttgtctgagctgaaggcactgtgcgctgatctgtccccccgtgaaaaggtctgggtttccgataaagcctcttacgccgtgtccgaaacaattccttag

SEQ ID NO: 336232 - DNA, 912 bp, Artificial Sequence
  derived and/or modified sequence
atgccacccaaggtgaccagcgagctgctgcggcagctgcggcaggccatgaggaacagtgaatatgtgacagagcccatccaggcctacatcatccccagcggagatgcccaccagagcgagtacatcgccccctgtgactgcagaagagcctttgtgtctggctttgatggcagcgctggaacagccatcatcacagaggagcacgccgccatgtggacagatggccgctacttcctgcaggccgccaagcagatggacagcaactggaccctgatgaagatgggcctgaaggacacccccacccaggaggactggctggtgtctgtgctgcctgagggcagccgggtgggcgtggaccccctcatcatccccacagactactggaagaagatggccaaggtgctgcggtctgctggccaccacctgatccctgtgaaggagaacctggtggacaagatctggacagacaggcctgagcggccctgcaagcccctgctgaccctgggcctggactacacaggcatctcctggaaggacaaggtggccgacctgcggctgaagatggccgagagaaatgtgatgtggtttgtggtgacagccctggatgaaattgcctggctgttcaacctgcggggcagtgatgtggagcacaaccctgtgttcttctcctatgccatcatcggcctggagaccatcatgctgttcattgatggagacagaattgatgcccccagcgtgaaggagcacctgctgctggacctgggcctggaggccgagtaccgcatccaggtgcacccctacaagagcatcctgtctgagctgaaggccctgtgtgccgacctgagcccccgggagaaggtgtgggtgtctgacaaggccagctatgctgtgtctgagaccatcccctag

SEQ ID NO: 336233 - DNA, 912 bp, Artificial Sequence
  derived and/or modified sequence
atgccccccaaggtgaccagcgagctgctgcggcagctgcggcaggctatgagaaatagtgagtacgtgactgagccaattcaagcctacatcatcccctcaggagatgcacatcagtctgagtacatcgcaccctgtgactgtcgccgcgcgttcgtttctggctttgatggcagtgctgggaccgctataatcacggaggagcatgcagctatgtggactgacgggcgttatttcttacaggccgccaagcagatggatagtaactggaccttgatgaaaatggggctgaaggatacccccacacaggaagactggctcgttagtgtgctccccgaaggtagtcgtgttggggtcgacccactgatcatcccaactgactattggaaaaaaatggccaaagtcctgcgttctgctggacatcacttaatacctgtcaaggagaatcttgttgacaagatctggaccgatcgtccagagcggccttgtaagcctcttctcactctcggcctggattacaccggtatctcctggaaagacaaggtagccgacctccggctcaaaatggccgaaagaaatgtgatgtggttcgtggtgaccgccctggacgagatcgcctggctattcaatttgaggggcagcgacgtggagcacaacccagtgttttttagttacgccataattgggctggaaacaattatgctattcatagatggggacagaatcgatgccccatccgtgaaggagcaccttctgttggacctcggcttggaggccgagtatagaattcaagttcacccatataagagcatcttgtccgaactaaaagcgctatgtgccgatctgagtcctagggagaaggtgtgggtcagcgataaagctagttatgccgtgtcggagacaattccttag

SEQ ID NO: 336234 - DNA, 912 bp, Artificial Sequence
  derived and/or modified sequence
atgccccctaaagtcacatctgaactgctgaggcagctgaggcaggccatgaggaactcagagtatgtcaccgagccaatccaggcttacatcatcccctccggcgacgcccatcagtcagagtatatcgcaccatgtgattgccgcagggctttcgtgagcggctttgatgggagcgccggaacagctattatcactgaggaacatgccgctatgtggactgatggcaggtattttctacaagcagctaaacagatggatagcaattggactcttatgaagatggggttaaaagacactccgactcaggaggactggttagtatcagtgcttccagaaggatctagagtgggcgtcgatccactgatcattcccacggactattggaagaagatggccaaggtcctgcggagcgcagggcaccatctaataccggtgaaggagaacctggtggacaaaatctggaccgacagacctgaacgaccctgtaaacctcttttgaccctggggcttgactacaccggaatctcctggaaagataaagtggctgacctccgactaaagatggctgagcgcaatgtgatgtggttcgtagtcacggctctcgatgagattgcatggctattcaatctaaggggaagtgacgtcgaacacaacccggtctttttttcatacgcaataatcggactggagacaatcatgctcttcattgatggcgatcgcatcgacgctcccagcgtcaaagaacacctgctgttagacttgggactggaggccgagtatcggattcaagtccacccatacaagtctattctcagcgagctgaaagcactgtgcgccgatctttcaccacgcgagaaagtttgggtgtcggataaggcgtcctacgcggtgtccgaaactatcccttag

SEQ ID NO: 336235 - DNA, 1006 bp, Artificial Sequence
  derived and/or modified sequence
gcgggtgatcagctggtctgcgctcccctgacgtgggctggggcacgtcaccgccgaatggcagcctccagaaagccaccgcgagtaagacggcagaatgcctccaaaggtgacttcagagctgcttcggcagctgagacaagccatgaggaactctgagtatgtgaccgaaccgatccaggcctacatcatcccatcgggagatgctcatcagagtgagtatattgctccatgtgactgtcggcgggcttttgtctctggattcgatggctctgcgggcacagccatcatcacagaagagcatgcagccatgtggactgacgggcgctactttctccaggctgccaagcaaatggacagcaactggacacttatgaagatgggtctgaaggacacaccaactcaggaagactggctggtgagtgtgcttcctgaaggatccagggttggtgtggaccccttgatcattcctacagattattggaagaaaatggccaaagttctgagaagtgccggccatcacctcattcctgtcaaggagaacctcgttgacaaaatctggacagaccgtcctgagcgcccttgcaagcctctcctcacactgggcctggattacacaggcatctcctggaaggacaaggttgcagaccttcggttgaaaatggctgagaggaacgtcatgtggtttgtggtcactgccttggatgagattgcgtggctatttaatctccgaggatcagatgtggagcacaatccagtatttttctcctacgcaatcataggactagagacgatcatgctcttcattgatggtgaccgcatagacgcccccagtgtgaaggagcacctgcttcttgacttgggtctggaagccgaatacaggatccaggtgcatccctacaagtccatcctgagcgagctcaaggccctgtgtgctgacctctccccaagggagaaggtgtgggtcagtgacaaggccagctatgctgtgagcgagaccatcccc

SEQ ID NO: 336236 - DNA, 627 bp, Artificial Sequence
  derived and/or modified sequence
taaccccgacctccgatcactcggagccaatcatacttgaccctgtgggaggagaagcaacagaggaagaaggaaaagtccgggtcacctggcgagaagggcgctctgcagaggtccaagaccctgatgaacctcttcttcaaggggggcaggcaaggaagactggcccgcgacggtcggagagaagcatggacattggacagcgggagcctggcgaagacatatcccaggcttgacattgaaaaggctggcggggtcggtccagtccagaagtttgtgacatggcgcctgaggagggatcaagagagaggcagagccttgctttcggctcgctcaggctccccctcgagtcaactgcccaacgtcgacgagcaggtacaggcatgggaatctagacggcccctcatccaagatctggcacagaggctgctgacggacgacgaggtcctggctgtgacgcgccactgctcgcggtacgtgcacgagggcgggatcgaggacctcgtccgtcctctcttggccatcctggatcgccctgaaaagctgttattactgcaggatatcaggagcgtggtcgctcccactgatctaggcaggttcgattctatggtgatgttggtggaatag

SEQ ID NO: 336237 - DNA, 627 bp, Artificial Sequence
  derived and/or modified sequence
tgaccccggccccccatcaccaggagccagagctacctgaccctgtgggaggagaagcagcagaggaagaaggagaagagcggcagccctggagagaagggggccctgcagaggagcaagaccctgatgaacctcttcttcaagggcggccggcagggccgcctggccagagatggccggcgggaggcctggaccctggacagcggcagcctggccaagacctacccccggctggacatcgagaaggccggcggcgtgggccctgtgcagaagtttgtgacctggaggctgcggcgggaccaggagcggggccgggccctgctgagcgcccggagcggcagccccagcagccagctgcccaacgtggatgagcaggtgcaggcctgggagagccggcggcccctcatccaggacctggcccagaggctgctgacagatgatgaggtgctggccgtgaccaggcactgcagccgctacgtgcatgaaggaggcatcgaggacctggtgcggcccctgctggccatcctggacaggcctgagaagctgctgctgctgcaggacatccgctctgtggtggcccccacagacctgggccgctttgacagcatggtgatgctggtggagtag

SEQ ID NO: 336238 - DNA, 627 bp, Artificial Sequence
  derived and/or modified sequence
tgaccccggccccccatcacccggagccagagctacctgaccctgtgggaagagaagcagcagaggaaaaaagagaagagtggctcacctggcgaaaaaggagccctgcaaaggagcaagacactgatgaacctcttctttaaaggcggccgccagggaaggctcgcccgcgacgggagaagggaggcctggaccttggacagtggttcccttgccaagacatacccccggcttgatatcgagaaagcaggcggagtaggccccgtgcaaaagttcgtgacctggcgcctgcgtagagaccaggagcgggggcgggcacttttatctgcgcggagtggctcaccgtcaagtcagctgcccaacgtggatgagcaggtccaggcctgggagagcaggagacctctgatccaggacctggcccagagattacttactgacgatgaggtcctcgcagtgacccgccactgctccagatacgtccacgaaggaggaatcgaggacttagtcagacctttgttggcgattctcgatcgtccagagaagcttcttttactgcaggacattcgctctgtagtagcaccgactgacctggggagattcgactcaatggtcatgctggtagaatag

SEQ ID NO: 336239 - DNA, 624 bp, Artificial Sequence
  derived and/or modified sequence
gaccccggccccccatcacgcgctcccagagctatctgaccttgtgggaggagaagcagcagcggaagaaggagaagtcggggtcccctggggagaagggtgccctgcagcgctccaagacgctgatgaacctcttcttcaagggagggcggcaggggaggctagcgcgggacgggcgcagagaggcctggacactggacagcgggagcctggccaaaacttaccctcgcctggacatagagaaagcagggggcgtgggcccggtacagaagtttgtcacctggagactgagacgtgaccaggagaggggccgggccctgctgtctgccaggtctgggagtccctccagccagctgcctaatgtggatgagcaggttcaggcctgggagagccggcggcccctcattcaggacctggcccagaggctgctgactgatgacgaggtgctggctgtcacccgccactgctcccggtatgtgcacgagggaggcatagaggacctggtgaggcccctgctggccatcctcgacaggccggagaagctgctactgctgcaggacatcaggagtgtggtggcccccacagacctgggccgcttcgacagcatggtgatgcttgtggagc

SEQ ID NO: 336240 - DNA, 627 bp, Artificial Sequence
  derived and/or modified sequence
tgaccacgaccacctatcacaaggagccagagctacctcaccctgtgggaagagaaacagcagagaaagaaagaaaagagtggatcccccggtgagaaaggagccctacagcggtcaaagaccttgatgaacctgtttttcaaggggggtagacagggcagattggcaagagacggcagaagggaggcctggaccttggatagtggctccctggcaaagacctacccaagacttgatatcgaaaaagctggtggagtgggcccagtacagaaattcgttacttggcgtctgcggagggaccaggagagaggtagggccttgctgagcgcaaggtctggatcaccctcttcccagcttcctaacgtggacgagcaggtgcaagcctgggagtccaggcggcctctgattcaggatctggcacaaaggctgcttacagatgatgaggtgctggctgtcaccaggcactgctcacgctatgttcacgagggtggtatcgaagacctcgtgcgacctctgctcgccatcttggacaggcctgaaaaactcctgctgctgcaggacatccgctcggtagtggcccctacagatcttggacgcttcgatagcatggtgatgctggtcgagtag

SEQ ID NO: 336241 - DNA, 627 bp, Artificial Sequence
  derived and/or modified sequence
tgacccagaccccccatcaccagaagccagagctacctgaccctgtgggaggagaagcagcagagaaagaaggagaagagcggcagccccggcgagaagggcgccctgcagagaagcaagaccctgatgaacctgttcttcaagggcggcagacagggcagactggccagagacggcagaagagaggcctggaccctggacagcggcagcctggccaagacctaccccagactggacatcgagaaggccggcggcgtgggccccgtgcagaagttcgtgacctggagactgagaagagaccaggagagaggcagagccctgctgagcgccagaagcggcagccccagcagccagctgcccaacgtggacgagcaggtgcaggcctgggagagcagaagacccctgatccaggacctggcccagagactgctgaccgacgacgaggtgctggccgtgaccagacactgcagcagatacgtgcacgagggcggcatcgaggacctggtgagacccctgctggccatcctggacagacccgagaagctgctgctgctgcaggacatcagaagcgtggtggcccccaccgacctgggcagattcgacagcatggtgatgctggtggagtag

SEQ ID NO: 336242 - DNA, 414 bp, Artificial Sequence
  derived and/or modified sequence
atggccgccctgagcagagccctgggccccctgagaacccccgccccccccctgtggatcggcctgttcctggtggccaccggcagccagcagagcctggcccagcccctgcccggcaacaccaccgaggccacccccagaagcctgagagccagcggcagcctgtgcggcccccacgccaaggccccctacctgtgcgaggccacccacgagcccgccgccgccagaatcagagcccaggtgcccgacaccagatggagcagagtgggcggccagagattctacagcagagtgctgagccccctgcacagaggccccagcggccacaccgaggccagcgcccagagaagccacatgggcaagctgaaggagccccagccccaggaccacaagcccggcctgggcgccagctag

SEQ ID NO: 336243 - DNA, 1521 bp, Artificial Sequence
  derived and/or modified sequence
atggaacagctcgatgtcttcattagcataaaacctaaacctaagcagccatccaagtcagtgatcgtcaaaagcgttgagcgcaacgccctcaatatgtacgaagcacgaaaatgcctcctggggctggagtcttcaggggttactattgcgactagccccagcccagcttcatgcccagcaggactggcttgtccctctttggacatactggccagtgcaggactgggactgaccgggcttgggcttctgggtccgactactctctctctgaataccagcactacgccaaacagcctgctgaacgccttaaacagcagcgtttcaccactgcaatccccctcttctgggacaccatctcccactctctgggcgcccccattggctaacacttcttccgctactggcttcagtgcaattccacatcttatgatccccagcactgctcaggccactctgactaacatcctccttagcggagttcccacctatggccacacggccccatctccccctcccgggctcactccggtagacgtgcacattaattctatgcagactgagggcaaaaagatctcagctgccctgaatgggcacgctcagtcacctgacataaagtatggcgccatttccacctccagccttggggaaaaagtcctttctgccaaccatggtgacccgtccatccaaaccagcggatctgagcagacgtcacctaagtctagtccgaccgaaggatgcaacgatgctttcgtcgaagttggcatgccccgcagcccctcacactcaggtaacgcgggagatctgaagcaaatgatgtgcccatccaaggtgagctgtgccaagaggcagaccgttgagctgttacaaggcactaagaactcccacctgcactctacagacaggctcctaagtgatccggagttgtccgcgaccgagtcgccattagcggataagaaagctcccggatcagaacgagccgctgagcgtgccgctgctgcacagcagaacagcgagagagcacatctggcacccagaagctcttatgtcaacatgcaagcattcgattacgagcaaaaaaagctgctagccacaaaggccatgctcaaaaagccggtcgtcaccgaggtgagaactcctaccaatacatggtccggactgggattttctaaatctatgcccgctgaaactataaaggagttgcggcgtgcaaaccacgtgtcttacaaaccaaccatgactactacatatgagggaagtagcatgagcctgagtaggtctaacagccgagagcatttagggggggggtctgaatcggataattggcgggacaggaacggcataggccctgggtctcatagcgaatttgcagcaagtatcggttcaccaaaaagaaagcaaaacaaatcttcagagagatgtgtgctgtgtactcttctcgggattccaaggctggagtgtgtgtatcttggctggagcattacggactgtgggctatctgatttcaagtgccttgtgtag

SEQ ID NO: 336244 - DNA, 1521 bp, Artificial Sequence
  derived and/or modified sequence
atggagcagctggatgtgttcatcagcatcaagcccaagcccaagcagcccagcaagagcgtcatcgtgaagtctgtggagagaaatgccctgaacatgtatgaggccaggaagtgcctgctgggcctggagagcagcggcgtgaccatcgccaccagccccagccctgccagctgcccagctggcctggcctgccccagcctggacatcctggccagcgctggcctgggcctgaccggcctgggcctgctgggccccaccaccctgagcctgaacaccagcaccacccccaacagcctgctgaatgccctgaacagctctgtgagccccctgcagagccccagcagcggcacccccagccccaccctgtgggccccacccctggccaacaccagcagcgccaccggcttcagcgccatcccccacctgatgatccccagcacagcccaggccaccctgaccaacatcctgctgtctggagtgcccacctacggccacacagcccccagccccccacctggcctgacccctgtggatgtgcacatcaacagcatgcagacagagggcaagaagatctctgctgccctgaatggacatgcccagagcccagacatcaagtatggagccatcagcaccagcagcctgggggagaaggtgctgagcgccaaccacggggaccccagcatccagaccagcggcagcgagcagaccagccccaagagcagccccacagagggctgcaatgatgcctttgtggaggtgggcatgcccaggagccccagccacagcggaaatgctggggacctgaagcagatgatgtgccccagcaaggtgtcctgtgccaagaggcagacagtggagctgctgcagggcaccaagaacagccacctgcacagcacagaccggctgctgagtgaccctgagctgagcgccacagagagccccctggccgacaagaaggcccctggcagcgagagagctgctgagagagctgctgctgcccagcagaacagcgagcgggcccacctggcccccaggagcagctatgtgaacatgcaggcctttgattatgagcagaagaagctgctggccaccaaggccatgctgaagaagcctgtggtgacagaggtgaggacccccaccaacacctggagcggcctgggcttcagcaagtccatgcctgctgagaccatcaaggagctgcggcgggccaaccacgtgtcctacaagcccaccatgaccaccacctatgagggcagctccatgagcctgagccgcagcaacagccgggagcacctgggcggcggcagcgagagtgacaactggagggacagaaatggcatcggccctggcagccacagcgagtttgctgccagcatcggcagccccaagaggaagcagaacaagagcagcgagcgctgtgtgctgtgcaccctgctgggcatcccccggctggagtgtgtgtacctgggctggagcatcacagactgtggcctgagtgacttcaagtgcctggtgtag

SEQ ID NO: 336245 - DNA, 1521 bp, Artificial Sequence
  derived and/or modified sequence
atggagcagctggacgtgttcatcagcatcaagcccaagcccaagcagccctccaaatccgtgatcgtaaagtccgtcgagcgcaacgccctaaatatgtacgaagctagaaagtgtctgctgggcctggagagctccggagtgacaatcgccactagtccgtctccagccagctgcccagccggactcgcatgcccatctttggacatcctcgctagcgccggtcttggtctgacagggctcggtttactcggccccactaccctgagcctgaacaccagtaccacaccgaactctttactgaatgctctgaactcaagcgtgtcccctcttcagagcccgagtagcggtaccccatcccccacactgtgggctccccctttggccaatacttcctcagccacaggcttctctgccattcctcacttaatgatcccttcaaccgcccaggccacgctgacaaatattctgctctctggggtacccacctatggacacaccgcaccatctcctccccctggattgacccccgtcgacgtccacataaattccatgcaaactgaaggcaagaagatttccgccgccttgaatgggcacgcccagtcaccagacatcaagtatggcgccatctctacctcctccctcggagaaaaggtgttaagtgcgaaccatggcgacccttccattcagaccagtgggtccgaacaaacttccccgaagagctcaccaactgagggctgtaacgatgccttcgtagaggttggaatgccgcggagcccctcacactctggtaacgcaggggatctcaagcaaatgatgtgtccctcaaaagtgtcctgcgcgaaacgccagaccgtggagctcttgcaggggacaaagaacagccatctgcattccactgatcgactgctcagtgatcccgagctgtcagcgaccgagtctccgctcgccgataaaaaagcccctggatccgagcgagccgcagagagagccgctgcagcccagcagaattctgaaagggcgcacttggctcctcgctcttcttatgttaatatgcaagccttcgactacgagcagaagaaactgttggctacgaaggccatgctgaaaaagccagtcgtgacagaggtgaggacacctacaaatacatggtctggattagggttcagcaagtctatgcctgcagagactatcaaagaactgaggagggctaaccatgtgagttataaaccaactatgacaacaacttatgaagggagcagtatgagtctcagcaggagcaattcccgagagcacctggggggtgggtccgagagtgacaattggagggatcgcaatgggattgggcctggtagccacagcgagttcgccgcctcaatcggtagtcccaagagaaagcagaacaagagcagcgaacggtgcgtactttgcacattattgggcatcccaaggctggagtgtgtctatcttgggtggagcatcacagactgcggactgagtgatttcaaatgcctggtttag

SEQ ID NO: 336246 - DNA, 1521 bp, Artificial Sequence
  derived and/or modified sequence
atggaacagctggacgtttttatctccatcaaacccaagcccaagcagcccagtaagtccgtgattgtaaagagtgtggagcgcaatgctctaaacatgtacgaggcgcgaaaatgcttgcttgggctcgaaagcagcggcgtgacaatcgccacatctccctcccccgcatcgtgccctgccggtctagcttgcccctcattggacatactggcttctgctggcctgggcttaactggactcggtctgttagggccaaccaccttgtcactgaatacctcaactacccccaacagcctgcttaacgcgttgaactcttctgtgtcgccactgcagtcaccttcttccggcaccccctctcctaccctttgggctccccctttggccaacacctcttcagccactggattcagcgccatcccccatttaatgatcccctccactgcgcaggcaacactaactaatatcctgctgagcggtgtgcctacctacggccataccgccccttcccccccaccaggcctgacacctgtggatgttcacatcaatagcatgcagaccgagggtaagaagatatcggccgctcttaacggccacgcccagtctcccgacataaagtacggggcaatatcaacgtccagcctcggggagaaggttctctccgcaaaccacggagatccctccattcagacctccgggtcagagcagaccagccctaagtcctctcctactgaagggtgtaacgacgcttttgtcgaggtcggtatgccgagaagtccatctcacagcggcaatgctggagatctgaaacagatgatgtgtccctccaaggtctcttgcgcaaagagacagacagtggaactgctccaaggtaccaaaaacagccaccttcatagcacagatcgactcctgagcgacccggagctctctgctactgagagccccctagcagacaagaaagccccaggctccgagcgggctgcagagcgcgcagccgcagcacagcaaaactcagagagggcccacctggctccaaggtccagttatgtaaacatgcaggcctttgattacgaacagaagaaactcctagcaacgaaggccatgctgaagaagcctgtggttactgaagttcgcacccccacaaatacatggagcggattgggatttagcaagtcgatgcctgctgaaactattaaagagctgcgcagggcgaatcacgtgtcgtacaagcccaccatgaccaccacgtatgagggaagttcaatgtctctctcaagaagcaacagtagggaacacctcggaggaggttccgagagtgacaattggcgggatcggaatggcataggacctggcagtcactcagagttcgctgcgtccattggttccccaaaacgtaaacagaataaatcttctgaaagatgtgttctgtgcacacttctgggcattcctcgccttgagtgcgtgtacctaggttggtccattaccgactgtgggctttcagactttaaatgcttggtgtag

SEQ ID NO: 336247 - DNA, 1763 bp, Artificial Sequence
  derived and/or modified sequence
gatccacaattcattgcgcagttgatggaacagcttgatgtcttcatcagtattaaaccaaagcccaaacagccaagcaagtctgtgattgtgaaaagtgttgagcgaaatgccttaaatatgtatgaagcaaggaaatgtctcctcggacttgaaagcagtggggttaccatagcaaccagtccatccccagcatcctgccctgccggcctggcatgtcccagcctggatatcttagcttcagcaggccttggactcactggactaggtcttttgggacccaccaccttatctctgaacacttcaacaaccccaaactcactcttgaatgctcttaatagctcagtcagtcctttgcaaagtccaagttctggtacacccagccccacattatgggcacccccacttgctaatacttcaagtgccacaggtttttctgctataccacaccttatgattccatctactgcccaagccacattaactaatattttgttgtctggagtgcccacctatgggcacacagctccatctccccctcctggcttgactcctgttgatgtccatatcaacagtatgcagaccgaaggcaaaaaaatctctgctgctttaaatggacatgcacagtctccagatataaaatatggtgcaatatccacttcatcacttggagaaaaagtgctgagtgcaaatcacggggatccgtccatccagacaagtgggtctgagcagacatctcccaaatcaagccccactgaaggttgtaatgatgcttttgttgaagtaggcatgcctcgaagtccttcccattctgggaatgctggtgacttgaaacagatgatgtgtccctccaaggtttcctgtgccaaaaggcagacagtggaactattgcaaggcacgaaaaactcacacttacacagcactgacaggttgctctcagaccctgaactgagtgctaccgaaagccctttggctgacaagaaggctccagggagtgagcgcgctgcagagagggcagcagctgcccagcaaaactccgaaagggcccaccttgctccacggtcatcatatgtcaacatgcaggcatttgactatgaacagaagaagctattagccaccaaagctatgttaaagaaaccagtggtgacggaggtcagaacgcccacaaatacctggagtggcctgggtttttctaaatccatgccagctgaaactatcaaggagttgagaagggccaatcatgtgtcctataagcccacaatgacaaccacttatgagggctcatccatgtccctttcacggtccaacagtcgtgagcacttgggaggtggaagcgaatctgataactggagagaccgaaatggaattggacctggaagtcatagtgaatttgcagcttctattggcagccctaagcgtaaacaaaacaaatcaagtgagcgttgtgttttatgcacacttttaggtatccccagattagaatgtgtttatttgggttggagtatcactgactgtggcctctctgacttcaagtgcttggtgtaattcacatgccatctcctctgtgaagcctccttgtttctcccagtgaagcaggccacctggttctctttcctctcactccattttgtgcgtgctttcactctagcacttgccataccaaagggcaattatttatctacctatctgtatctccttgtgaaatttgtgctccacaaaccaaagactgtatttgttcattttataaacatttatgaagtgtc

SEQ ID NO: 336248 - DNA, 1521 bp, Artificial Sequence
  derived and/or modified sequence
atggagcagctggacgtgttcatcagcatcaagcccaagcccaagcagcccagcaagagcgtgatcgtgaagagcgtggagagaaacgccctgaacatgtacgaggccagaaagtgcctgctgggcctggagagcagcggcgtgaccatcgccaccagccccagccccgccagctgccccgccggcctggcctgccccagcctggacatcctggccagcgccggcctgggcctgaccggcctgggcctgctgggccccaccaccctgagcctgaacaccagcaccacccccaacagcctgctgaacgccctgaacagcagcgtgagccccctgcagagccccagcagcggcacccccagccccaccctgtgggccccccccctggccaacaccagcagcgccaccggcttcagcgccatcccccacctgatgatccccagcaccgcccaggccaccctgaccaacatcctgctgagcggcgtgcccacctacggccacaccgcccccagccccccccccggcctgacccccgtggacgtgcacatcaacagcatgcagaccgagggcaagaagatcagcgccgccctgaacggccacgcccagagccccgacatcaagtacggcgccatcagcaccagcagcctgggcgagaaggtgctgagcgccaaccacggcgaccccagcatccagaccagcggcagcgagcagaccagccccaagagcagccccaccgagggctgcaacgacgccttcgtggaggtgggcatgcccagaagccccagccacagcggcaacgccggcgacctgaagcagatgatgtgccccagcaaggtgagctgcgccaagagacagaccgtggagctgctgcagggcaccaagaacagccacctgcacagcaccgacagactgctgagcgaccccgagctgagcgccaccgagagccccctggccgacaagaaggcccccggcagcgagagagccgccgagagagccgccgccgcccagcagaacagcgagagagcccacctggcccccagaagcagctacgtgaacatgcaggccttcgactacgagcagaagaagctgctggccaccaaggccatgctgaagaagcccgtggtgaccgaggtgagaacccccaccaacacctggagcggcctgggcttcagcaagagcatgcccgccgagaccatcaaggagctgagaagagccaaccacgtgagctacaagcccaccatgaccaccacctacgagggcagcagcatgagcctgagcagaagcaacagcagagagcacctgggcggcggcagcgagagcgacaactggagagacagaaacggcatcggccccggcagccacagcgagttcgccgccagcatcggcagccccaagagaaagcagaacaagagcagcgagagatgcgtgctgtgcaccctgctgggcatccccagactggagtgcgtgtacctgggctggagcatcaccgactgcggcctgagcgacttcaagtgcctggtgtag

SEQ ID NO: 336249 - DNA, 2211 bp, Artificial Sequence
  derived and/or modified sequence
atgttcgccgtgcacctgatggccttctacttcagcaagctgaaggaggaccagatcaagaaggtggacagattcctgtaccacatgagactgagcgacgacaccctgctggacatcatgagaagattcagagccgagatggagaagggcctggccaaggacaccaaccccaccgccgccgtgaagatgctgcccaccttcgtgagagccatccccgacggcagcgagaacggcgagttcctgagcctggacctgggcggcagcaagttcagagtgctgaaggtgcaggtggccgaggagggcaagagacacgtgcagatggagagccagttctaccccacccccaacgagatcatcagaggcaacggcaccgagctgttcgagtacgtggccgactgcctggccgacttcatgaagaccaaggacctgaagcacaagaagctgcccctgggcctgaccttcagcttcccctgcagacagaccaagctggaggagggcgtgctgctgagctggaccaagaagttcaaggccagaggcgtgcaggacaccgacgtggtgagcagactgaccaaggccatgagaagacacaaggacatggacgtggacatcctggccctggtgaacgacaccgtgggcaccatgatgacctgcgcctacgacgacccctactgcgaggtgggcgtgatcatcggcaccggcaccaacgcctgctacatggaggacatgagcaacatcgacctggtggagggcgacgagggcagaatgtgcatcaacaccgagtggggcgccttcggcgacgacggcgccctggaggacatcagaaccgagttcgacagagagctggacctgggcagcctgaaccccggcaagcagctgttcgagaagatgatcagcggcctgtacctgggcgagctggtgagactgatcctgctgaagatggccaaggccggcctgctgttcggcggcgagaagagcagcgccctgcacaccaagggcaagatcgagaccagacacgtggccgccatggagaagtacaaggagggcctggccaacaccagagagatcctggtggacctgggcctggagcccagcgaggccgactgcatcgccgtgcagcacgtgtgcaccatcgtgagcttcagaagcgccaacctgtgcgccgccgccctggccgccatcctgaccagactgagagagaacaagaaggtggagagactgagaaccaccgtgggcatggacggcaccctgtacaagatccacccccagtaccccaagagactgcacaaggtggtgagaaagctggtgcccagctgcgacgtgagattcctgctgagcgagagcggcagcaccaagggcgccgccatggtgaccgccgtggccagcagagtgcaggcccagagaaagcagatcgacagagtgctggccctgttccagctgaccagagagcagctggtggacgtgcaggccaagatgagagccgagctggagtacggcctgaagaagaagagccacggcctggccaccgtgagaatgctgcccacctacgtgtgcggcctgcccgacggcaccgagaagggcaagttcctggccctggacctgggcggcaccaacttcagagtgctgctggtgaagatcagaagcggcagaagaagcgtgagaatgtacaacaagatcttcgccatccccctggagatcatgcagggcaccggcgaggagctgttcgaccacatcgtgcagtgcatcgccgacttcctggactacatgggcctgaagggcgccagcctgcccctgggcttcaccttcagcttcccctgcagacagatgagcatcgacaagggcaccctgatcggctggaccaagggcttcaaggccaccgactgcgagggcgaggacgtggtggacatgctgagagaggccatcaagagaagaaacgagttcgacctggacatcgtggccgtggtgaacgacaccgtgggcaccatgatgacctgcggctacgaggaccccaactgcgagatcggcctgatcgccggcaccggcagcaacatgtgctacatggaggacatgagaaacatcgagatggtggagggcggcgagggcaagatgtgcatctgcttcagcttctgcctgtggttcgtgctgcaggtgctgatcgtggtgctgagaatcgtgagatacagaaagagcagcaagctgatcaagaagttctag

SEQ ID NO: 336250 - DNA, 2211 bp, Artificial Sequence
  derived and/or modified sequence
atgtttgcagtccacctcatggcgttttatttttcaaaactgaaagaagatcagatcaagaaggtggatcgctttctataccatatgcggttaagcgatgacacacttttggatattatgcgtcgcttcagggctgagatggaaaagggactggccaaggatactaaccccacagccgctgtaaagatgctaccaactttcgttcgcgctattcccgacggctccgagaatggcgagttcttgagcttggaccttggtggatccaagtttcgcgtgttgaaagtgcaagtcgccgaagaaggaaagcggcatgtgcaaatggagtcgcagttttatcccactcccaacgagatcatcaggggtaatggcacggagctgtttgaatacgtcgccgactgcctagcagacttcatgaaaaccaaagatttgaagcacaaaaaactgcctctgggtttgactttctcattcccctgtagacagacaaagttggaagaaggcgtgctgctgagctggacaaaaaaattcaaagctagaggcgtgcaggacacagacgtggtgtcccgattgaccaaagccatgaggcggcacaaggatatggacgtggacatcctggcacttgtgaacgacaccgtcggcacaatgatgacatgcgcatacgacgacccttattgcgaggttggagttatcattggcacgggtactaacgcctgctatatggaggatatgagcaacatagatctggtggaaggagatgagggcaggatgtgcattaatacagagtggggtgcttttggcgacgacggcgctctcgaggatatcaggacggagtttgacagggaattagacctcgggtccctgaaccctgggaagcaattatttgaaaagatgatctccggactttatctcggcgagcttgtgagactcattctattgaagatggctaaggccgggctactattcggtggcgagaaaagctccgcactccacacaaaggggaaaatagaaaccagacatgtcgcagcgatggaaaaatacaaggaaggattggcaaacacccgggagattctagtagacctaggactagagccttccgaggcagattgcatcgctgttcagcacgtttgtaccatcgtctcatttagaagcgctaatctgtgcgcggccgctcttgcagccattctaactaggctgcgagaaaataagaaggttgaacgccttaggaccacagtgggaatggacggcacattatacaaaatccacccacagtaccctaagcgtctacacaaggtggtccgtaaactggtcccaagttgtgacgttaggtttctgctcagcgaatctgggtccaccaagggtgccgccatggtcactgctgtggcctctagggtgcaggctcagagaaaacagatagaccgtgtcttagcgctgttccagctgactcgcgaacagctggtcgatgtgcaggccaaaatgcgcgccgaactggagtacggactgaagaaaaagtctcatggcttagccaccgtgcgtatgctgccaacttacgtttgtggattgccagacggcactgaaaagggtaagttccttgccctagacctcggtggaactaactttagggtgctgcttgttaaaattcgctccgggcgcaggagtgtacgcatgtacaacaagatctttgccattccactggaaatcatgcaaggaaccggtgaggagttgttcgaccatatcgtacagtgcatagccgatttcctggactacatgggtctgaagggcgcctccctgcctctgggattcaccttctcattcccatgccggcagatgtcaattgacaaagggactttaatagggtggactaaggggttcaaagctacagactgtgagggagaggatgttgtggacatgttacgggaggctataaagcgacgaaatgaatttgacttggacatcgtcgcagtggtcaatgatactgtaggaaccatgatgacgtgcgggtatgaagatcccaattgtgaaatcggactgattgcgggcaccggcagcaacatgtgttatatggaagacatgcggaacattgagatggtcgagggcggggaaggaaaaatgtgcatttgtttctccttctgtttatggtttgtgctccaagtgcttatagtggtgctgagaatagtgaggtaccgaaagtcttctaagttgatcaagaaattttag

SEQ ID NO: 336251 - DNA, 2344 bp, Artificial Sequence
  derived and/or modified sequence
atttagtccgcaacacctcgctccccaggaggtctgccagcctggactggaagcgtgcaacactccagagtcgtaggagtgaacactgcacaggaatctctgcccatctcaggagaaaccaaacttggggaaaatgtttgcggtccacttgatggcattttacttcagcaagctgaaggaggaccagatcaagaaggtggacaggttcctgtatcacatgcggctctccgatgacacccttttggacatcatgaggcggttccgggctgagatggagaagggcctggcaaaggacaccaaccccacggctgcagtgaagatgttgcccaccttcgtcagggccattcccgatggttccgaaaatggggagttcctttccctggatctcggagggtccaagttccgagtgctgaaggtgcaagtcgctgaagaggggaagcgacacgtgcagatggagagtcagttctacccaacgcccaatgaaatcatccgcgggaacggcacagagctgtttgaatatgtagctgactgtctggcagatttcatgaagaccaaagatttaaagcataagaaattgccccttggcctaactttttctttcccctgtcgacagactaaactggaagagggtgtcctactttcgtggacaaaaaagtttaaggcacgaggagttcaggacacggatgtggtgagccgtctgaccaaagccatgagaagacacaaggacatggacgtggacatcctggccctggtcaatgacaccgtggggaccatgatgacctgtgcctatgacgacccctactgcgaagttggtgtcatcatcggaactggcaccaatgcgtgttacatggaggacatgagcaacattgacctggtggagggcgacgagggcaggatgtgcatcaacacagagtggggggccttcggggacgacggggccctggaggacattcgcactgagttcgacagggagctggacctcggctctctcaacccaggaaagcaactgttcgagaagatgatcagtggcctgtacctgggggagcttgtcaggcttatcttgctgaagatggccaaggctggcctcctgtttggtggtgagaaatcttctgctctccacactaagggcaagatcgaaacacggcacgtggctgccatggagaagtataaagaaggccttgctaatacaagagagatcctggtggacctgggtctggaaccgtctgaggctgactgcattgccgtccagcatgtctgtaccatcgtctccttccgctcggccaatctctgtgcagcagctctggcggccatcctgacacgcctccgggagaacaagaaggtggaacggctccggaccacagtgggcatggacggcaccctctacaagatacaccctcagtacccaaaacgcctgcacaaggtggtgaggaaactggtcccaagctgtgatgtccgcttcctcctgtcagagagtggcagcaccaagggggccgccatggtgaccgcggtggcctcccgcgtgcaggcccagcggaagcagatcgacagggtgctggctttgttccagctgacccgagagcagctcgtggacgtgcaggccaagatgcgggctgagctggagtatgggctgaagaagaagagccacgggctggccacggtcaggatgctgcccacctacgtctgcgggctgccggacggcacagagaaaggaaagtttctcgccctggatcttgggggaaccaacttccgggtcctcctggtgaagatcagaagtggacggaggtcagtgcgaatgtacaacaagatcttcgccatccccctggagatcatgcagggcactggtgaggagctctttgatcacattgtgcagtgcatcgccgacttcctggactacatgggcctcaagggagcctccctacctttgggcttcacattctcatttccctgcaggcagatgagcattgacaagggaacactcatagggtggaccaaaggtttcaaggccactgactgtgaaggggaggacgtggtggacatgctcagggaagccatcaagaggagaaacgagtttgacctggacattgttgcagtcgtgaatgatacagtggggaccatgatgacctgtggctatgaagatcctaattgtgagattggcctgattgcaggaacaggcagcaacatgtgctacatggaggacatgaggaacatcgagatggtggaggggggtgaagggaagatgtgcatctgtttttcattttgcctgtggtttgtgttgcaggtgttgatagttgttttaaggattgttaggtataggaaatccagtaaattaataaaaaaattttga

SEQ ID NO: 336252 - DNA, 2211 bp, Artificial Sequence
  derived and/or modified sequence
atgtttgctgtgcacctgatggccttctacttcagcaagctgaaggaggaccagatcaagaaggtggaccgcttcctgtaccacatgaggctgagtgatgacaccctgctggacatcatgaggcgcttccgggcagagatggagaagggcctggccaaggacaccaaccccacagctgctgtgaagatgctgcccacctttgtgcgggccatcccagatggctctgaaaatggagagttcctgagcctggacctgggcggcagcaagttccgggtgctgaaggtgcaggtggccgaggagggcaagagacatgtgcagatggagagccagttctaccccaccccaaatgagatcatcagaggaaatggaacagagctgtttgaatatgtggccgactgcctggccgacttcatgaagaccaaggacctgaagcacaagaagctgcccctgggcctgaccttctccttcccctgccggcagaccaagctggaggagggcgtgctgctgtcctggaccaagaagttcaaggcccggggcgtgcaggacacagatgtggtgtcccggctgaccaaggccatgaggaggcacaaggacatggatgtggacatcctggccctggtgaatgacacagtgggcaccatgatgacctgtgcctatgatgacccctactgtgaggtgggcgtcatcatcggcaccggcaccaatgcctgctacatggaggacatgagcaacatcgacctggtggagggagatgagggccgcatgtgcatcaacacagagtggggcgcctttggagatgatggagccctggaggacatcagaacagaatttgaccgggagctggacctgggcagcctgaaccctgggaagcagctgtttgagaagatgatcagcggcctgtacctgggggagctggtgcggctcatcctgctgaagatggccaaggccggcctgctgtttggaggagagaagagcagcgccctgcacaccaagggcaagattgagaccaggcatgtggccgccatggagaagtacaaggagggcctggccaacacccgggagatcctggtggacctgggcctggagcccagcgaggccgactgcatcgctgtgcagcacgtgtgcaccatcgtgtccttccgcagcgccaacctgtgtgccgccgccctggccgccatcctgacccggctgcgggagaacaagaaggtggagcggctgcggaccaccgtgggcatggatggcaccctgtacaagatccacccccagtaccccaagaggctgcacaaggtggtgaggaagctggtgcccagctgtgatgtgcgcttcctgctgtctgagagcggcagcaccaagggagctgccatggtgacagctgtggccagccgggtgcaggcccagaggaagcagattgacagagtgctggccctcttccagctgacccgggagcagctggtggatgtgcaggccaagatgagagctgagctggagtatggcctgaagaagaagagccacggcctggccaccgtgaggatgctgcccacctacgtgtgtggcctgcctgatggaacagagaagggcaagttcctggccctggacctgggcggcaccaacttccgggtgctgctggtgaagatccgctctggaagaagatctgtgaggatgtacaacaagatctttgccatccccctggagatcatgcagggcactggagaggagctgtttgaccacatcgtgcagtgcatcgctgacttcctggactacatgggcctgaagggggccagcctgcccctgggcttcaccttctccttcccctgccggcagatgagcattgacaagggcaccctcatcggctggaccaagggcttcaaggccacagactgtgagggggaggatgtggtggacatgctgcgggaggccatcaagagaagaaatgaatttgacctggacatcgtggccgtggtgaatgacacagtgggcaccatgatgacctgtggctatgaggaccccaactgtgaaattggcctgattgctggcaccggcagcaacatgtgctacatggaggacatgaggaacatcgagatggtggagggcggggagggcaagatgtgcatctgcttctccttctgcctgtggtttgtgctgcaggtgctgattgtggtgctgagaattgtgcgctacaggaagagcagcaagctgatcaagaagttctag

SEQ ID NO: 336253 - DNA, 2211 bp, Artificial Sequence
  derived and/or modified sequence
atgttcgccgtgcacctgatggccttctacttcagcaagctgaaggaggatcagatcaaaaaggtggatagattcttataccatatgcgcttgtcagacgatacactgctggacatcatgcgcagattccgagcagaaatggagaaggggctcgctaaggatacaaatcctaccgccgccgtcaaaatgctaccgaccttcgtgagagcaattcccgatggttctgaaaatggtgagtttttaagccttgacctaggcggatcaaagtttagagtgctgaaggtccaggtggcagaagagggcaaacgccacgtacagatggagtcacaattttatccaactcctaacgaaataatccgtggtaacggcaccgagttgtttgaatacgtggctgattgtctcgccgattttatgaagacaaaggatctcaagcacaagaaactgcccttgggattaacattctcattcccgtgtcggcagaccaagttggaggaaggggtgctactgtcctggactaaaaaatttaaggctagaggagttcaggataccgacgtagtgtctcggttgactaaagctatgcggaggcataaggacatggacgttgacattctcgctcttgtaaacgacaccgtagggaccatgatgacgtgtgcatacgacgatccttactgtgaggtgggggtgatcataggtaccggaactaacgcctgctacatggaagacatgagtaacatcgacctggtggagggcgatgagggcaggatgtgcatcaataccgaatggggagcgtttggcgatgacggcgctctggaagatattagaactgaattcgaccgagaactggatctaggttctcttaacccgggaaagcagctttttgagaagatgatctctggtctgtatcttggagagctggttcgtctcatccttctgaagatggccaaggcaggcctgttgtttgggggggaaaaaagtagcgcactccacaccaaagggaaaatcgagacacgccatgttgccgccatggaaaagtacaaggaaggattggccaatacgcgagaaattctggtcgacctcggcttggagccatccgaggctgattgcatcgcagtccagcacgtgtgcaccattgttagcttccgttcagccaacttatgtgccgccgccctagctgccatattgaccaggctacgggagaacaaaaaggtcgagaggctgagaacaacagtgggtatggatggcaccctgtacaagatccatccccagtacccaaagcgcctccataaggtggttagaaagcttgttccctcatgcgacgtccggttcctgttaagcgagtccggatcgactaaaggcgctgccatggtaacggcggtcgcgtccagggttcaagctcaacggaagcagatcgaccgagttctggcactgtttcagttgacccgggaacagctggtggatgtgcaagccaagatgagagccgagctggaatatggactgaagaaaaaatcccacggtttggcaaccgtgagaatgttaccgacttatgtgtgtggactgccagacggcacagagaaaggaaaattcctggcactggacttaggcggcaccaatttccgggtactgctagtgaagattaggagcgggcgtcggagcgtacggatgtacaacaaaatctttgcaattcccctggagatcatgcaaggaacaggcgaagagctgttcgaccacatcgtccagtgtatcgccgattttttagactatatgggtctgaaaggagcatccctacccctaggcttcactttttcttttccttgtcgtcagatgagcatagataaggggacactcatcggttggacaaaaggtttcaaagccacggattgcgagggagaggacgtagtcgatatgttacgcgaagctattaaaaggaggaacgagtttgacctcgatatcgtggcggtagtcaacgataccgtcgggactatgatgacttgtggatatgaagaccccaactgtgaaatcgggttgatcgcgggcaccgggtcaaacatgtgctacatggaggatatgaggaacattgaaatggttgaggggggggaaggaaaaatgtgtatatgttttagtttttgtctctggttcgttctgcaagtgctcatcgtcgtattgcggatcgtaaggtaccgcaagtcctctaagttgattaagaagttctag

SEQ ID NO: 336254 - DNA, 2211 bp, Artificial Sequence
  derived and/or modified sequence
atgttcgccgtacatctgatggcattctacttctccaagctcaaggaagatcagattaagaaagttgatcgcttcctataccacatgcgcctctccgacgatacactgctcgacattatgaggaggttccgggctgagatggagaaaggcctcgctaaagacactaacccaacagccgctgtgaaaatgctcccaaccttcgtccgggctattcccgacggctccgaaaacggcgaattcctctcccttgacctcggtggttcaaagtttagggtcctcaaagttcaggtggcggaggaaggcaagcgtcatgtgcagatggagtcccagttctatcccacgcctaacgagatcattaggggtaatggcacagagcttttcgagtatgtcgccgactgcctggccgattttatgaaaactaaagaccttaaacataagaagctgccactcggacttacgttctcgtttccctgtcggcagacaaagcttgaagagggcgtgctgctttcttggaccaaaaaatttaaggcacggggagtccaagataccgacgtcgtgtccaggctcactaaggctatgcggaggcataaggacatggatgtggatatactggccctcgtcaacgacactgtgggaaccatgatgacctgtgcctatgacgacccctactgtgaggtgggggttataatcgggacaggcactaacgcttgctacatggaagacatgagtaacattgatctggtggagggggatgaaggcaggatgtgtattaacaccgagtggggagctttcggtgacgacggggcacttgaggacatcaggaccgagtttgatcgagaacttgacctgggatctctgaaccccggaaaacagctatttgagaagatgattagcggtctgtaccttggcgagctggtgaggctgatactgctgaaaatggctaaggccggtcttctcttcggtggcgagaagagttccgctctgcacacgaaaggcaagatcgagacccgtcacgtcgcagccatggaaaagtacaaggagggcctcgccaatacaagagagatactggttgacctaggactggaacccagtgaagctgattgcatcgcagtgcagcacgtgtgtacaatcgtcagttttcggtccgccaatctatgcgcagccgctctggcagcaattctcacacgccttcgggagaataagaaagttgagcgccttcgtacaacagtgggtatggatggtaccctctataagattcatccgcagtacccgaagcgcttgcacaaggtagtgcgcaagttagtgccttcatgcgacgttagattcctgcttagcgagagcggtagcactaaaggagccgctatggtgacagcagtcgcatctcgcgttcaggcccaaagaaagcagatcgatcgcgtcctggccttattccagctgacacgtgagcagctggtcgatgtgcaagctaagatgcgggctgaactggagtacggcttgaagaagaagagccacggactcgctaccgtccggatgctgcctacatatgtctgcggcctgccagacggaacagaaaaaggaaagtttctcgccctggacctcggtggcacaaacttccgcgtgcttttagttaagattcgcagcggcagacggagcgtgaggatgtacaacaagatcttcgcaattcctttagagattatgcagggtacaggagaggagctttttgatcacatcgtgcagtgcatcgcagacttcctggactacatgggtctcaaaggtgcctcacttccgctcggttttacattcagctttccgtgcaggcagatgtccatcgataaagggacgttaatagggtggacaaagggtttcaaagccaccgactgcgaaggtgaggatgtggtggacatgttgcgtgaggctattaagcgcaggaatgagttcgacctcgacatcgtggccgtggtgaacgacaccgtggggacaatgatgacatgcgggtacgaggaccccaattgtgagataggactgatagccggtacagggtctaacatgtgctatatggaggacatgcgaaatattgaaatggtggaaggcggagaaggaaagatgtgcatatgcttctcattttgcctgtggttcgtcttgcaggtcctgattgttgtgttacggatcgttaggtacagaaaaagtagtaagctcattaaaaagttttag

SEQ ID NO: 336255 - DNA, 76 bp, Artificial Sequence
  derived and/or modified sequence
gaatcgaatggaatcaacatcaaacggaaaaaaacggaattatcgaatggaatcgaaaagaatcatcgaatggacc

SEQ ID NO: 336256 - DNA, 330 bp, Artificial Sequence
  derived and/or modified sequence
atggccgacagactgtacaccgagctgaccgagaacctgaagagctacaacggccaccccaccgacagaagatgcaccctgaacgagaacagaacctgcacctgccagggcatcgaccccgagacctgcggcgccagcttcagcttcggctgcagctggagcatgtacttcaacggctgcaagttcggcagaagccccagccccagaagattcagaatcgaccccagcagccccctgcacacctactacgagagaatcaccaagggcagaaaccccgagagaagatacatgaagcccgagagaatcagccccggccacgaggccatgtag

SEQ ID NO: 336257 - DNA, 330 bp, Artificial Sequence
  derived and/or modified sequence
atggccgaccgattgtacactgaactcacagaaaatcttaagagctataatggtcaccccactgatagacgatgcacactgaatgagaatcgtacatgcacctgccaggggatcgatcccgagacatgcggcgccagcttttcatttggctgctcttggagtatgtattttaatggatgcaaattcggaaggtctccatctccccgccgctttaggatagatcctagtagcccactgcacacctactacgaacgcattactaagggccggaacccggaaaggagatatatgaagccagaacgcatttcacccggtcatgaggctatgtag

SEQ ID NO: 336258 - DNA, 330 bp, Artificial Sequence
  derived and/or modified sequence
atggctgaccggctgtacacagagctgacagagaacctgaagagctacaacggccaccccacagaccggcgctgcaccctgaatgaaaatagaacctgcacctgccagggcatcgaccctgagacctgtggggccagcttctcctttggctgctcctggagcatgtacttcaacggctgcaagtttggccgcagccccagcccccggcgcttcagaattgaccccagcagccccctgcacacctactatgagcgcatcaccaagggcaggaaccctgagcggcgctacatgaagccagagcgcatcagccctggccacgaggccatgtag

SEQ ID NO: 336259 - DNA, 330 bp, Artificial Sequence
  derived and/or modified sequence
atggccgaccggctgtacaccgagctgaccgagaacctgaagagctacaatggacacccaacggataggcgatgtacgctcaatgaaaatcgcacctgtacatgccaaggcattgaccctgagacttgtggcgcctcattctcctttggttgtagctggtccatgtactttaatggctgtaaattcggtcgtagccccagccccaggagatttaggatcgacccttctagccccctgcacacctactatgagagaattaccaagggccggaacccggagagacgttatatgaaacccgaaaggatcagccctggccatgaggcaatgtag

SEQ ID NO: 336260 - DNA, 330 bp, Artificial Sequence
  derived and/or modified sequence
atggctgaccgcctgtatacagagctgaccgagaacttgaaaagttataacggtcaccccacagatcgccgatgtacactcaacgagaatcgaacatgcacatgccagggcattgatcccgagacgtgtggggcaagtttcagcttcggttgtagctggtccatgtatttcaacggctgcaaattcggaaggagtccatctcccagacgcttcagaatcgatccctcatcccccctgcatacctactacgagcgcattaccaaaggtcggaacccagaaagacggtacatgaagcctgaacgcatcagcccgggacacgaagcgatgtag

SEQ ID NO: 336261 - protein, 109 aa, Artificial Sequence
  derived and/or modified sequence
MADRLYTELTENLKSYNGHPTDRRCTLNENRTCTCQGIDPETCGASFSFGCSWSMYFNGCKFGRSPSPRRFRIDPSSPLHTYYERITKGRNPERRYMKPERISPGHEAM

SEQ ID NO: 336262 - DNA, 668 bp, Artificial Sequence
  derived and/or modified sequence
aagattctgaactgcccacctgcagctgtcttgatcgagttatacaaaaagacaaaggcccatattatacacaccttggggcaggaccaagtgttgctgctgtcagggaaatcatggagaataggtatggtcaaaaaggaaacgcaataaggatagaaatagtagtgtacaccggtaaagaagggaaaagctctcatgggtgtccaattgctaagtgggttttaagaagaagcagtgatgaagaaaaagttctttgtttggtccggcagcgtacaggccaccactgtccaactgctgtgatggtggtgctcatcatggtgtgggatggcatccctcttccaatggccgaccggctatacacagagctcacagagaatctaaagtcatacaatgggcaccctaccgacagaagatgcaccctcaatgaaaatcgtacctgtacatgtcaaggaattgatccagagacttgtggagcttcattctcttttggctgttcatggagtatgtactttaatggctgtaagtttggtagaagcccaagccccagaagatttagaattgatccaagctctcccttacatacctactatgaaagaattactaaaggacgtaatccagaaagaagatatatgaaaccggaacgaatcagtccgggacacgaggccatg

SEQ ID NO: 336263 - protein, 332 aa, Artificial Sequence
  derived and/or modified sequence
MAAATAAAALAAADPPPAMPQAAGAGGPTTRRDFYWLRSFLAGGIAGCCAKTTVAPLDRVKVLLQAHNHHYKHLGVFSALRAVPQKEGFLGLYKGNGAMMIRIFPYGAIQFMAFEHYKTLITTKLGISGHVHRLMAGSMAGMTAVICTYPLDMVRVRLAFQVKGEHSYTGIIHAFKTIYAKEGGFFGFYRGLMPTILGMAPYAGVSFFTFGTLKSVGLSHAPTLLGRPSSDNPNVLVLKTHVNLLCGGVAGAIAQTISYPFDVTRRRMQLGTVLPEFEKCLTMRDTMKYVYGHHGIRKGLYRGLSLNYIRCIPSQAVAFTTYELMKQFFHLN

SEQ ID NO: 336264 - DNA, 999 bp, Artificial Sequence
  derived and/or modified sequence
atggcagctgccacagccgctgcggcccttgccgccgccgacccaccccccgccatgccccaggcagccggggccggaggccctacgacgcggcgcgacttttattggctgcggagctttctcgcggggggcatcgccggctgctgtgcaaagacaactgtggcccccctggatcgggttaaggtactgcttcaggcgcataaccatcactataagcacttaggcgtcttctccgcactgagggctgtgccccagaaagagggcttcctgggcctgtataagggaaacggcgcaatgatgataagaatttttccttacggtgcaattcaatttatggcttttgagcactataagactctgatcaccaccaagctcggcatatctgggcacgttcatcggttaatggcaggaagcatggctggcatgacagccgtgatctgtacatatcccctggacatggtgagggtccgactcgcctttcaagtgaaaggggaacacagctacaccggcatcatccacgcctttaaaacgatatacgcaaaagagggcggcttctttggcttttaccgcggccttatgccaactattctggggatggctccatacgctggagtctctttttttacatttggcaccctcaagagcgttggactcagccatgcacccacactgctcggaagacctagttccgataatccgaacgttctggttctcaaaacacacgtaaatcttctgtgtggaggggttgccggggccatcgctcaaactatttcttacccatttgatgtcacgaggagaagaatgcagctgggaacggttctgcctgagttcgagaagtgcctgactatgcgtgacacgatgaagtacgtgtacggacaccatggcattaggaaaggtctgtatcgtgggcttagcctaaactacattagatgtattccaagccaggctgttgccttcactacctacgaactgatgaaacaatttttccacctgaactag

SEQ ID NO: 336265 - DNA, 999 bp, Artificial Sequence
  derived and/or modified sequence
atggctgctgccacagctgctgctgccctggccgctgctgaccccccaccagccatgccccaggccgccggggccggcggccccaccacccggcgggacttctactggctgcgctccttcctggccggcggcattgctggctgctgtgccaagaccaccgtggcccccctggacagagtgaaggtgctgctgcaggcccacaaccaccactacaagcacctgggcgtcttcagcgccctgcgggctgtgccccagaaggagggcttcctgggcctgtacaagggaaatggagccatgatgatccgcatcttcccctacggggccatccagttcatggcctttgagcactacaagaccctcatcaccaccaagctgggcatcagcggccacgtgcaccggctgatggccggctccatggccggcatgacagctgtgatctgcacctaccccctggacatggtgcgggtgcggctggccttccaggtgaagggggagcacagctacacaggcatcatccacgccttcaagaccatctatgccaaggagggcggcttcttcggcttctaccggggcctgatgcccaccatcctgggcatggccccctatgccggcgtgtccttcttcaccttcggcaccctgaagtctgtgggcctgagccacgcccccaccctgctgggccggcccagcagtgacaaccccaacgtgctggtgctgaagacccacgtgaacctgctgtgtggcggcgtggccggggccatcgcccagaccatctcctacccctttgatgtgaccaggaggaggatgcagctgggcaccgtgctgcctgagtttgagaagtgcctgaccatgagggacaccatgaagtatgtgtatggccaccacggcatcaggaagggcctgtaccggggcctgagcctgaactacatccgctgcatccccagccaggccgtggccttcaccacctatgagctgatgaagcagttcttccacctgaactag

SEQ ID NO: 336266 - DNA, 999 bp, Artificial Sequence
  derived and/or modified sequence
atggccgccgccaccgccgccgccgccctggccgccgccgaccccccccccgcaatgccccaggctgcaggagccggcggtcccaccactaggagggatttctactggctcagaagctttttggctggtggcattgcaggatgctgcgccaagaccaccgtggccccacttgaccgtgttaaggtgctgttgcaggcccacaatcaccactataaacacttgggggtcttttcagcattgcgtgccgttccacagaaggagggtttcttaggtctgtataagggaaatggcgcgatgatgatcagaatcttcccttatggggccatacagttcatggcctttgaacactacaagaccctgatcactactaagctgggaataagcggacatgttcaccgcctgatggccggatctatggccggtatgaccgcagtgatttgcacatatcctctcgatatggtgcgggtccggcttgctttccaggtaaaaggggaacactcctatacaggcatcatccacgcctttaaaaccatctacgccaaagaggggggtttctttggattttatcggggcctcatgcctactattcttggaatggcaccatatgccggtgtctcctttttcactttcggtaccttaaagtcagtaggattgagccacgcaccaacactcctggggcgaccatcaagtgataaccccaatgtcctggtgttaaagacacatgtaaatctgctgtgtgggggagtcgctggcgccatagcgcagactatatcctacccttttgacgtcacacggcgacgaatgcagctgggcacagtgctgcccgaattcgagaagtgccttaccatgagggacacgatgaaatatgtgtacggacaccacggtataaggaagggactttatcgggggcttagcctgaactacatcagatgtattccgtctcaggctgtggctttcactacatatgaactaatgaagcagtttttccaccttaattag

SEQ ID NO: 336267 - DNA, 999 bp, Artificial Sequence
  derived and/or modified sequence
atggccgcagctaccgcagctgccgcactggccgcagcggatcctccgccagccatgccgcaggcggctggagctgggggacctacaacccggagggatttttattggttacgatcttttctggccggtggcatcgcgggttgttgtgccaagacaacggttgccccactggacagagtgaaggtactgctccaggcccataaccaccattataagcacctcggggtgttttccgctctcagggccgtccctcaaaaggaaggtttcctcggcctttacaagggtaacggtgccatgatgatcagaatatttccatacggcgctattcagttcatggcatttgagcactacaagacactgatcacgacgaagctcgggatcagtggtcatgtgcaccgcttgatggctggcagcatggccggaatgacagccgtgatttgcacataccctctagacatggtgcgcgtgaggctggcatttcaggtcaaaggcgagcactcttacacggggattatccatgccttcaagacaatctatgctaaagagggaggattctttggcttctacagaggtttaatgcctactatattggggatggccccatatgctggcgtctctttttttacctttgggactctgaagtctgtgggtttaagccacgccccaacgctactcggaagaccttcctctgacaaccccaatgtgctcgtgctgaaaacccacgtgaatctcctgtgtggcggtgtggcaggcgctatcgcgcaaaccatctcctaccccttcgacgtgacgcgccgacgaatgcagctggggacagttcttccggagtttgagaaatgtctgacaatgcgggacaccatgaagtatgtgtacggacatcacggtatcagaaaaggattgtacagaggcttgtcactcaactacatcaggtgtattcctagccaggcagtcgcctttaccacctacgagctcatgaagcagttcttccacctcaattag

SEQ ID NO: 336268 - DNA, 1766 bp, Artificial Sequence
  derived and/or modified sequence
gcggggcggtcagcctcctgtcaccgcctgttccggctatggtcccgtccggtgttctgtaagttggcaacctaggctcctgacgcgaccctggtcctgatggcggcggcgacggccgcggcagccctggcggcggccgatccccctcccgcaatgccgcaggcggcaggggccggagggcccacaacccgcagagacttctactggctgcgctcctttctggccggaggtattgctggatgctgtgccaaaacaacagttgctccattggatcgagtaaaggttttattacaagctcacaatcaccattacaagcatttaggagtattttctgcattgcgtgctgttcctcaaaaagaaggattccttggattgtataaaggaaatggtgcaatgatgattcgaatctttccctatggtgcaatccagtttatggcatttgagcattataaaacgttaattactacgaagctgggaatttcaggtcatgtgcacagattaatggctggatccatggcaggtatgacagcagttatctgtacttaccctcttgacatggttagggtccgcctagcattccaggtgaaaggggaacacagctatacaggaattattcatgctttcaaaacaatttatgcaaaggaaggtggtttctttggattttacagaggtctgatgcctactattttaggaatggctccatatgcaggtgtttcattttttacttttggtaccttgaagagtgttgggctttcccatgctcctacccttcttggcagaccttcatcagacaatcctaatgtcttagttttgaaaactcatgtaaacttactttgtggtggtgttgctggagcaatagcgcagacaatatcctacccatttgatgtgactcgtcggcgaatgcaattaggaactgttctgccggaatttgaaaagtgccttaccatgcgggatactatgaagtatgtctatggacaccatggaattcgaaaaggactctatcgtggtttatctcttaattacattcgctgtattccctctcaagcagtggcttttacaacatacgaacttatgaagcagttttttcacctcaactaaaaaaaaattatggttggtttttcttaatacattctcagagggagaaatgaaacattactataattgtggggggaacattacttgaatggggatatttaccctgtcacaagagccactggtattttagtacttgattattttttctttagtcacaaatcagaactgcttaccatactttttgatgccaaacattataccttagaacattgaagaaaatattcctaagctgatgctggctaaaccgctttaaagttttatttggaagtagaactagctttaaaacggggttcaagaggttgccattagctttgtcatgctgttcaaagtttttaattgttatcatggtttttaaaagactgacagtgtttattattattaaaataaacagggttggttatattgcaatagaataatgagaattgaatttttaagttctatgaaacagccagcattgacattttatttttgttatctctcttctcacaattatgctccactggataataggaaaaacacttctttccttcattttttaaataaaattaatgttgtatttaaaaggtagccatgtagagacacaaaaataaatgaagaagctggacatggtgggatgggcatgtggtcccagctactctggaagctgaggtgagaggatcacttgagccctg

SEQ ID NO: 336269 - DNA, 1644 bp, Artificial Sequence
  derived and/or modified sequence
gtaagttggcaacctaggctcctgacgcgaccctggtcctgatggcggcggcgacggccgcggcagccctggcggcggccgatccccctcccgcaatgccgcaggcggcaggggccggagggcccacaacccgcagagacttctactggctgcgctcctttctggccggagaagaagaggagtttacttcaaacagaacctggcaatcggataaataccttcaagtgtctgtctccgtaaaaatgttccagaagaagaggaggttacttcaaacagaacctggcagttggattaataccttgaagtgtctgtctccataaccacattttagcaagattcccagccttcctcaggtattgctggatgctgtgccaaaacaacagttgctccattggatcgagtaaaggttttattacaagctcacaatcaccattacaagcatttaggagtattttctgcattgcgtgctgttcctcaaaaagaaggattccttggattgtataaaggaaatggtgcaatgatgattcgaatctttccctatggtgcaatccagtttatggcatttgagcattataaaacgttaattactacgaagctgggaatttcaggtcatgtgcacagattaatggctggatccatggcaggtatgacagcagttatctgtacttaccctcttgacatggttagggtccgcctagcattccaggtgaaaggggaacacagctatacaggaattattcatgctttcaaaacaatttatgcaaaggaaggtggtttctttggattttacagaggtctgatgcctactattttaggaatggctccatatgcaggtgtttcattttttacttttggtaccttgaagagtgttgggctttcccatgctcctacccttcttggcagaccttcatcagacaatcctaatgtcttagttttgaaaactcatgtaaacttactttgtggtggtgttgctggagcaatagcgcagacaatatcctacccatttgatgtgactcgtcggcgaatgcaattaggaactgttctgccggaatttgaaaagtgccttaccatgcgggatactatgaagtatgtctatggacaccatggaattcgaaaaggactctatcgtggtttatctcttaattacattcgctgtattccctctcaagcagtggcttttacaacatacgaacttatgaagcagttttttcacctcaactaaaaaaaaattatggttggtttttcttaatacattctcagagggagaaatgaaacattactataattgtggggggaacattacttgaatggggatatttaccctgtcacaagagccactggtattttagtacttgattattttttctttagtcacaaatcagaactgcttaccatactttttgatgccaaacattataccttagaacattgaagaaaatattcctaagctgatgctggctaaaccgctttaaagttttatttggaagtagaactagctttaaaacggggttcaagaggttgccattagctttgtcatgctgttcaaagtttttaattgttatcatggtttttaaaagactgacagtgtttattattattaaaataaacagggttggttatattgcaatagaataatgagaattg

SEQ ID NO: 336270 - DNA, 999 bp, Artificial Sequence
  derived and/or modified sequence
atggccgccgccaccgccgccgccgccctggccgccgccgaccccccccccgccatgccccaggccgccggcgccggcggccccaccaccagaagagacttctactggctgagaagcttcctggccggcggcatcgccggctgctgcgccaagaccaccgtggcccccctggacagagtgaaggtgctgctgcaggcccacaaccaccactacaagcacctgggcgtgttcagcgccctgagagccgtgccccagaaggagggcttcctgggcctgtacaagggcaacggcgccatgatgatcagaatcttcccctacggcgccatccagttcatggccttcgagcactacaagaccctgatcaccaccaagctgggcatcagcggccacgtgcacagactgatggccggcagcatggccggcatgaccgccgtgatctgcacctaccccctggacatggtgagagtgagactggccttccaggtgaagggcgagcacagctacaccggcatcatccacgccttcaagaccatctacgccaaggagggcggcttcttcggcttctacagaggcctgatgcccaccatcctgggcatggccccctacgccggcgtgagcttcttcaccttcggcaccctgaagagcgtgggcctgagccacgcccccaccctgctgggcagacccagcagcgacaaccccaacgtgctggtgctgaagacccacgtgaacctgctgtgcggcggcgtggccggcgccatcgcccagaccatcagctaccccttcgacgtgaccagaagaagaatgcagctgggcaccgtgctgcccgagttcgagaagtgcctgaccatgagagacaccatgaagtacgtgtacggccaccacggcatcagaaagggcctgtacagaggcctgagcctgaactacatcagatgcatccccagccaggccgtggccttcaccacctacgagctgatgaagcagttcttccacctgaactag

SEQ ID NO: 336271 - protein, 223 aa, Artificial Sequence
  derived and/or modified sequence
MERKVLPCFLCLFQGVLSDLTKVTRMHGIDPVVLVLMVGVVMFTLGFAGCVGALRENICLLNFFCGTIVLIFFLELAVAVLAFLFQDWVRDRFREFFESNIKSYRDDIDLQNLIDSLQKANQCCGAYGPEDWDLNVYFNCSGASYSREKCGVPFSCCVPDPAQKVVNTQCGYDVRIQLKSKWDESIFTKGCIQALESWLPRNIYIVAGVFIAISLLQIFGIFL

SEQ ID NO: 336272 - protein, 252 aa, Artificial Sequence
  derived and/or modified sequence
MLPPPRPAAALALPVLLLLLVVLTPPPTGARPSPGPDYLRRGWMRLLAEGEGCAPCRPEECAAPRGCLAGRVRDACGCCWECANLEGQLCDLDPSAHFYGHCGEQLECRLDTGGDLSRGEVPEPLCACRSQSPLCGSDGHTYSQICRLQEAARARPDANLTVAHPGPCESGPQIVSHPYDTWRGPRLQTLGTEDTLTTLVGAGGMARAVACGEAPGEHLALQVLCLSGKRRHLWQVGSTGSSEGVPSGGSFW

SEQ ID NO: 336273 - protein, 304 aa, Artificial Sequence
  derived and/or modified sequence
MLPPPRPAAALALPVLLLLLVVLTPPPTGARPSPGPDYLRRGWMRLLAEGEGCAPCRPEECAAPRGCLAGRVRDACGCCWECANLEGQLCDLDPSAHFYGHCGEQLECRLDTGGDLSRGEVPEPLCACRSQSPLCGSDGHTYSQICRLQEAARARPDANLTVAHPGPCESGPQIVSHPYDTWNVTGQDVIFGCEVFAYPMASIEWRKDGLDIQLPGDDPHISVQFRGGPQRFEVTGWLQIQAVRPSDEGTYRCLGRNALGQVEAPASLTVLTPDQLNSTGIPQLRSLNLVPEEEAESEENDDYY

SEQ ID NO: 336274 - DNA, 915 bp, Artificial Sequence
  derived and/or modified sequence
atgctgcccccaccacggccagccgcagctctcgccttgccggtcctactgctgcttttggtcgtcctgaccccacctcctactggagctcgaccctccccaggccctgattatctgcgcaggggatggatgaggctcctggcggagggggagggatgtgccccatgccggccagaggaatgtgctgctccgaggggctgcttggcaggaagagtcagggacgcctgcggctgttgttgggagtgtgccaatttggaagggcagctttgtgatctggaccctagcgctcatttctacgggcattgcggggagcagcttgagtgtcgattggacacgggcggagacctcagccggggagaagttcccgaaccactatgtgcctgtcgatcacagtctcccctgtgcgggagcgacgggcacacctattctcagatttgtagactccaagaagccgcacgtgcccgtcccgatgctaatttaactgtggcccatccagggccatgcgagtccggtccccagatcgtcagtcacccgtatgatacctggaatgtgacaggtcaggacgtgatcttcggctgcgaggttttcgcctaccccatggcgtctattgaatggcggaaagacggccttgatatccagctgccgggagatgatccacacattagcgtgcagtttcggggtgggcctcagaggtttgaggttacgggctggctgcaaatacaggctgtccgtcccagtgacgaaggaacataccgctgtctgggtaggaacgccttgggacaggtggaggctcctgccagcttgacagttttgactccagatcagctcaactccacgggaattcctcaactccgatctcttaatcttgtccctgaagaagaagccgaaagtgaggagaacgatgactattactag

SEQ ID NO: 336275 - DNA, 915 bp, Artificial Sequence
  derived and/or modified sequence
atgttacccccccccagacccgcagcggcgctcgctctccctgtgctgctcttgttactagtcgttctcacaccaccccctacaggagcccggccttcaccaggccccgattacctgcggcgaggatggatgcggctgctagccgaaggcgaaggatgtgctccttgccgacctgaggaatgtgcagctcctaggggctgtctggctggtcgagtccgggatgcttgcggctgttgctgggagtgcgccaacctggagggtcagctgtgtgatctggatccctctgcccacttctacggacactgcggggaacagttggagtgtcgcctcgacaccggaggcgacctcagccgcggagaagtgcccgagccattgtgcgcctgcagaagccaaagtcctctatgcgggtcagacggccacacttattcccaaatatgtcggctgcaggaggctgccagagcccgccccgacgcaaatcttactgtcgcccatcctggcccatgcgagtccggccctcagattgtctcacatccatatgatacatggaacgtgactggccaggatgtgatctttggctgcgaagtgtttgcatatccaatggccagtatcgagtggcgaaaagacggccttgacatccagctgcctggcgatgacccccacattagcgttcagtttcgcggtggtccccagaggttcgaggtgacgggctggctacagatccaggcggtaagaccttctgacgaggggacataccgctgcctcggcaggaatgccctgggccaggtcgaagcgcccgcttccttgaccgtcctcactccagatcagctaaactctacaggtatccctcaactgaggtccctgaatttagtccctgaagaagaagccgagtcagaagaaaatgacgattactactag

SEQ ID NO: 336276 - DNA, 915 bp, Artificial Sequence
  derived and/or modified sequence
atgctgcctcctcctcgtcctgccgccgcgctggcactacccgtgctactgttgctgttggtagttctcactccccctcctacaggcgctcggccaagtcctggccccgattatttgagacgcggatggatgcgcctgctagccgaaggcgaaggatgcgccccctgccgtccagaagagtgtgccgcaccacgtggatgtctcgcaggccgggttagagatgcgtgcggctgctgttgggaatgcgccaatctcgagggtcagctctgtgacctagatccctctgctcacttttatggccactgcggggagcagctggaatgccgcctggacaccggaggcgacctatcgcgaggagaagtaccagagccgctttgcgcatgtagaagtcagagtcctctgtgtggatctgatggacacacctactcccagatttgtcgactgcaggaagccgctagagcaaggcccgacgcaaacttaacggtcgcacatcccggtccatgcgagtccggtcctcagatagtcagtcatccgtacgacacttggaacgtgaccggccaggatgtgattttcgggtgcgaggtttttgcctatcccatggcgtcgatcgaatggagaaaagacggacttgatatccagctccccggtgatgatccccatataagtgtgcaattcagaggaggaccacaaaggttcgaggtgaccggctggctgcagattcaggctgtgagaccaagcgatgaaggaacctatagatgtctggggaggaacgccctgggccaggtggaggcccccgccagtctgactgttctgacacccgaccagctgaacagcaccgggatcccccagttgcgctccctgaacctggtgccagaagaagaagcagagtccgaagagaatgatgattattactag

SEQ ID NO: 336277 - DNA, 915 bp, Artificial Sequence
  derived and/or modified sequence
atgctgcccccccccagacccgccgccgccctggccctgcccgtgctgctgctgctgctggtggtgctgacccccccccccaccggcgccagacccagccccggccccgactacctgagaagaggctggatgagactgctggccgagggcgagggctgcgccccctgcagacccgaggagtgcgccgcccccagaggctgcctggccggcagagtgagagacgcctgcggctgctgctgggagtgcgccaacctggagggccagctgtgcgacctggaccccagcgcccacttctacggccactgcggcgagcagctggagtgcagactggacaccggcggcgacctgagcagaggcgaggtgcccgagcccctgtgcgcctgcagaagccagagccccctgtgcggcagcgacggccacacctacagccagatctgcagactgcaggaggccgccagagccagacccgacgccaacctgaccgtggcccaccccggcccctgcgagagcggcccccagatcgtgagccacccctacgacacctggaacgtgaccggccaggacgtgatcttcggctgcgaggtgttcgcctaccccatggccagcatcgagtggagaaaggacggcctggacatccagctgcccggcgacgacccccacatcagcgtgcagttcagaggcggcccccagagattcgaggtgaccggctggctgcagatccaggccgtgagacccagcgacgagggcacctacagatgcctgggcagaaacgccctgggccaggtggaggcccccgccagcctgaccgtgctgacccccgaccagctgaacagcaccggcatcccccagctgagaagcctgaacctggtgcccgaggaggaggccgagagcgaggagaacgacgactactactag

SEQ ID NO: 336278 - DNA, 915 bp, Artificial Sequence
  derived and/or modified sequence
atgttaccccccccgaggccagccgccgccttggctctccctgtgctgcttttattactcgtggtgcttacccctccccccactggcgcaagaccctctcccggcccagactatttacgacgaggatggatgaggttactggccgaaggcgaagggtgtgcaccttgtcgcccggaggagtgcgccgccccacggggatgtctggcgggccgggtgcgggacgcctgtggatgctgctgggagtgcgcaaacctagaggggcaactttgcgacttggacccaagtgcccatttctacggtcactgcggcgaacagctggaatgccggctagacacgggcggggacctttctagaggtgaggtgccagaaccattgtgtgcgtgtcgatcgcaatcacctctttgtggtagtgacgggcacacctactctcagatttgccgcctgcaggaagcagcccgcgctcggcctgacgctaacttgaccgtggcacatcctggcccgtgcgaatccgggcctcaaattgtgtcacacccatacgacacatggaacgtcacaggacaagacgtcatcttcggttgtgaggttttcgcctaccccatggcatccatcgaatggcggaaggatgggctggatatccagttgccgggggatgatccgcacatctctgtccagttccgcgggggccctcaacgcttcgaagtaacaggctggctacagatccaggccgtgcggccctccgacgagggcacatataggtgtctgggccggaatgcgctcggccaggtcgaagctcctgcatctctcaccgtgctcacccctgaccagctcaattctactggtatcccccaattgcggagcctgaacctggttcccgaagaagaggcagaatccgaggagaatgacgactactattag

SEQ ID NO: 336279 - DNA, 1913 bp, Artificial Sequence
  derived and/or modified sequence
ggctgggggaaatgacccgggagggtcccatgcggctacataaaattggcagccttagaactagtgggaaggcgggtgcgcgaagtcgaggggcggagagagggggccggaggagctgctttctgaatccaagttcgtgggctctctcagaagtcctcaggacggagcagaggtggccggcgggcccggctgactgcgcctctgctttctttccataaccttttctttcggactcgaatcacggctgctgcgaagggtctagttccggacactagggtgcccgaacgcgctgatgccccgagtgctcgcagggcttcccgctaaccatgctgccgccgccgcggcccgcagctgccttggcgctgcctgtgctcctgctactgctggtggtgctgacgccgcccccgaccggcgcaaggccatccccaggcccagattacctgcggcgcggctggatgcggctgctagcggagggcgagggctgcgctccctgccggccagaagagtgcgccgcgccgcggggctgcctggcgggcagggtgcgcgacgcgtgcggctgctgctgggaatgcgccaacctcgagggccagctctgcgacctggaccccagtgctcacttctacgggcactgcggcgagcagcttgagtgccggctggacacaggcggcgacctgagccgcggagaggtgccggaacctctgtgtgcctgtcgttcgcagagtccgctctgcgggtccgacggtcacacctactcccagatctgccgcctgcaggaggcggcccgcgctcggcccgatgccaacctcactgtggcacacccggggccctgcgaatcggggccccagatcgtgtcacatccatatgacacttggaatgtgacagggcaggatgtgatctttggctgtgaagtgtttgcctaccccatggcctccatcgagtggaggaaggatggcttggacatccagctgccaggggatgacccccacatctctgtgcagtttaggggtggaccccagaggtttgaggtgactggctggctgcagatccaggctgtgcgtcccagtgatgagggcacttaccgctgccttggccgcaatgccctgggtcaagtggaggcccctgctagcttgacagtgctcacacctgaccagctgaactctacaggcatcccccagctgcgatcactaaacctggttcctgaggaggaggctgagagtgaagagaatgacgattactactaggtccagagctctggcccatgggggtgggtgagcggctatagtgttcatccctgctcttgaaaagacctggaaaggggagcagggtcccttcatcgactgctttcatgctgtcagtagggatgatcatgggaggcctatttgactccaaggtagcagtgtggtaggatagagacaaaagctggaggagggtagggagagaagctgagaccaggaccggtggggtacaaaggggcccatgcaggagatgccctggccagtaggacctccaacaggttgtttcccaggctggggtgggggcctgagcagacacagaggtgcaggcaccaggattctccacttcttccagccctgctgggccacagttctaactgcccttcctcccaggccctggttcttgctatttcctggtccccaacgtttatctagcttgtttgccctttccccaaactcatcttccagaacttttccctctctcctaagccccagttgcacctactaactgcagtcccttttgctgtctgccgtcttttgtacaagagagagaacagcggagcatgacttagttcagtgcagagagataggtgaggccagctcgagatcttataccactctgtattggacaaaggctagcacagggctaggcaccaataaagatttctaatgatgcacaga

SEQ ID NO: 336280 - DNA, 915 bp, Artificial Sequence
  derived and/or modified sequence
atgctgcccccacccaggcctgctgctgccctggccctgcctgtgctgctgctgctgctggtggtgctgaccccaccacccaccggggcccggcccagccctggccctgactacctgcggcggggctggatgaggctgctggccgagggggagggctgtgccccctgcaggcctgaggagtgtgccgccccccggggctgcctggccggccgggtgagagatgcctgtggctgctgctgggagtgtgccaacctggagggccagctgtgtgacctggaccccagcgcccacttctacggccactgtggggagcagctggagtgccgcctggacaccggcggggacctgagcagaggagaggtgcctgagcccctgtgtgcctgccgcagccagagccccctgtgtggcagtgatggccacacctacagccagatctgccgcctgcaggaggccgcccgggcccggccagatgccaacctgactgtggcccaccctggcccctgtgagagcggcccccagatcgtgagccacccctatgacacctggaatgtgacaggccaggacgtcatcttcggctgtgaggtgtttgcctaccccatggccagcattgagtggaggaaggatggcctggacatccagctgcctggagatgacccccacatctctgtgcagttccggggcggcccccagagatttgaggtgacaggctggctgcagatccaggccgtgcggcccagtgatgagggcacctaccgctgcctgggcagaaatgccctgggccaggtggaggccccagccagcctgactgtgctgaccccagaccagctgaacagcacaggcatcccccagctgcggagcctgaacctggtgcctgaggaggaggccgagagtgaagaaaatgatgactactactag

SEQ ID NO: 336281 - DNA, 915 bp, Artificial Sequence
  derived and/or modified sequence
atgctgccccccccccggcccgccgccgccctggccctgcccgtgctgctgttactcctcgtggtacttacacccccacctacgggagcccggccgagtccagggcccgattatttgcggcgggggtggatgagactcctcgccgaaggggagggatgtgcaccatgccgaccggaagaatgtgctgcgcctcgcggatgtctagccggcagagtgcgggacgcatgtggatgttgctgggagtgtgctaacctggagggccagctgtgcgatctcgacccctccgcccacttttacgggcactgcggggagcaactggaatgtcggctggacacggggggagatttaagtcgtggtgaggtgccagaacccttgtgcgcttgccgttctcagagtccactgtgcgggtcagacggtcacacctattcccagatctgcaggttacaggaggcggcccgcgcacgacccgacgcaaatctcacagtggcccatcccggcccctgcgagtcaggacctcaaatcgtgagtcatccgtacgacacttggaatgtgacagggcaggacgtcatctttgggtgcgaagtgttcgcgtaccccatggctagtatcgaatggcgtaaggatggattagacattcagctgccaggggatgacccgcacatcagcgtgcagtttcgcgggggccctcagcgctttgaggtcacaggctggcttcagatccaggcggtgcgtccgagtgacgaaggcacgtatagatgtctcggcagaaatgcgctgggccaggtcgaagcaccggcttccctgactgttctcactccagatcagttgaatagcacaggcattccacagctgaggagtctcaatctggtgcccgaggaagaggccgagtcagaagaaaacgatgactactactag

SEQ ID NO: 336282 - RNA, 915 nt, Artificial Sequence
  derived and/or modified sequence
auguuacccccccccagacccgcagcggcgcucgcucucccugugcugcucuuguuacuagucguucucacaccacccccuacaggagcccggccuucaccaggccccgauuaccugcggcgaggauggaugcggcugcuagccgaaggcgaaggaugugcuccuugccgaccugaggaaugugcagcuccuaggggcugucuggcuggucgaguccgggaugcuugcggcuguugcugggagugcgccaaccuggagggucagcugugugaucuggaucccucugcccacuucuacggacacugcggggaacaguuggagugucgccucgacaccggaggcgaccucagccgcggagaagugcccgagccauugugcgccugcagaagccaaaguccucuaugcgggucagacggccacacuuauucccaaauaugucggcugcaggaggcugccagagcccgccccgacgcaaaucuuacugucgcccauccuggcccaugcgaguccggcccucagauugucucacauccauaugauacauggaacgugacuggccaggaugugaucuuuggcugcgaaguguuugcauauccaauggccaguaucgaguggcgaaaagacggccuugacauccagcugccuggcgaugacccccacauuagcguucaguuucgcggugguccccagagguucgaggugacgggcuggcuacagauccaggcgguaagaccuucugacgaggggacauaccgcugccucggcaggaaugcccugggccaggucgaagcgcccgcuuccuugaccguccucacuccagaucagcuaaacucuacagguaucccucaacugaggucccugaauuuagucccugaagaagaagccgagucagaagaaaaugacgauuacuacuag

SEQ ID NO: 336283 - RNA, 915 nt, Artificial Sequence
  derived and/or modified sequence
augcugccuccuccucguccugccgccgcgcuggcacuacccgugcuacuguugcuguugguaguucucacucccccuccuacaggcgcucggccaaguccuggccccgauuauuugagacgcggauggaugcgccugcuagccgaaggcgaaggaugcgcccccugccguccagaagagugugccgcaccacguggaugucucgcaggccggguuagagaugcgugcggcugcuguugggaaugcgccaaucucgagggucagcucugugaccuagaucccucugcucacuuuuauggccacugcggggagcagcuggaaugccgccuggacaccggaggcgaccuaucgcgaggagaaguaccagagccgcuuugcgcauguagaagucagaguccucuguguggaucugauggacacaccuacucccagauuugucgacugcaggaagccgcuagagcaaggcccgacgcaaacuuaacggucgcacaucccgguccaugcgaguccgguccucagauagucagucauccguacgacacuuggaacgugaccggccaggaugugauuuucgggugcgagguuuuugccuaucccauggcgucgaucgaauggagaaaagacggacuugauauccagcuccccggugaugauccccauauaagugugcaauucagaggaggaccacaaagguucgaggugaccggcuggcugcagauucaggcugugagaccaagcgaugaaggaaccuauagaugucuggggaggaacgcccugggccagguggaggcccccgccagucugacuguucugacacccgaccagcugaacagcaccgggaucccccaguugcgcucccugaaccuggugccagaagaagaagcagaguccgaagagaaugaugauuauuacuag

SEQ ID NO: 336284 - DNA, 83 bp, Artificial Sequence
  derived and/or modified sequence
caacacacagagattaaaacaaacaaacaaacaatccagccctgacatttatgagtttacagactggtggagaggcagagaag

SEQ ID NO: 336285 - DNA, 543 bp, Artificial Sequence
  derived and/or modified sequence
atggctactaccgccacatgcaccagattcactgacgactaccaactgttcgaggagctagggaaaggcgccttttccgtcgttcgcagatgcgtgaaaaagactagcactcaggagtacgctgccaagatcataaatactaagaaactgtcagcacgggatcatcagaagctggagcgggaagctcgcatttgcaggctgcttaaacaccccaacatcgcaacgatccacggtggcattcacgatgcaagcagtggcgattgcggggtgtttgcgcaagtccagtgccccgaaaaaactgaggggtgccacccgcacgaccacgcatgcctgcaggagctccttagctgtcagaagcccatagagcaagaggtggggtggcgatgccaggcgactgagcagcagcagaaacagtctcgcaagccaagccctcgcgcccgggctctggctgacggacacggagcgacaaatcattgtgggacccagagatatcgatgggaccagggcctgcatcgagagctccagcatcatcacaggcgctag

SEQ ID NO: 336286 - DNA, 543 bp, Artificial Sequence
  derived and/or modified sequence
atggccaccacagccacctgcacccgcttcacagatgactaccagctgtttgaggagctgggcaagggggccttctctgtggtgagaagatgtgtgaagaagaccagcacccaggagtatgctgccaagatcatcaacaccaagaagctgagcgcccgggaccaccagaagctggagcgggaggcccgcatctgccgcctgctgaagcaccccaacatcgccaccatccatggaggcatccatgatgccagcagcggggactgtggggtgtttgcccaggtgcagtgcccagagaagacagagggctgccacccccatgaccacgcctgcctgcaggagctgctgagctgccagaagcccatcgagcaggaggtgggctggcgctgccaggccacagagcagcagcagaagcagagcaggaagcccagcccccgggcccgggccctggctgatggccatggagccaccaaccactgcggcacccagcgctaccgctgggaccagggcctgcaccgggagctgcagcaccaccacagaagatag

SEQ ID NO: 336287 - DNA, 543 bp, Artificial Sequence
  derived and/or modified sequence
atggccaccaccgccacctgcacccggttcaccgacgactaccagttgtttgaagaactcggtaaaggagcatttagtgtggtcagacggtgtgtaaagaagacctccacccaagagtacgccgccaagattattaacacgaaaaagctcagcgcccgcgatcatcaaaaactggaaagggaggctcgtatttgccggcttttgaaacatcccaatatcgcaactattcacggcggaattcatgacgcctcttctggcgactgtggggtcttcgctcaggttcagtgtcctgaaaagacagaaggctgccacccccacgatcatgcatgcttacaggaactgttgtcctgccagaaacccatcgaacaggaggtcggatggagatgtcaagctacagagcaacagcagaagcagtcaaggaaacctagtccccgtgccagagccctggcggatggacatggggccactaaccactgtggcacgcagcggtacagatgggaccagggtctccatcgggagctgcagcaccaccatcggaggtag

SEQ ID NO: 336288 - DNA, 543 bp, Artificial Sequence
  derived and/or modified sequence
atggctacaaccgcaacctgcacacgatttacggacgattaccaacttttcgaagaattagggaagggcgcattttccgtggtgcgccgttgcgtgaagaagacctcaacccaggagtatgctgctaaaatcattaacaccaagaagctgtccgccagagatcaccaaaaacttgaacgggaagcaagaatatgtagactactcaaacacccaaacattgcgaccattcacggcggaatccacgatgctagctctggcgactgtggcgtttttgcccaagtgcagtgtcccgaaaaaaccgaaggctgtcacccccacgatcatgcttgtctccaggaactcctttcatgccagaagcccattgaacaggaggtgggctggcgttgtcaggcaactgagcagcagcagaagcagtcaaggaaaccttctccgagagcccgagccctggccgatggacatggagccaccaatcactgcggtacacagcggtaccgctgggaccagggtctgcacagggaactccagcatcatcaccggaggtag

SEQ ID NO: 336289 - DNA, 543 bp, Artificial Sequence
  derived and/or modified sequence
atggccaccaccgccacctgcaccagattcaccgacgactaccagctgttcgaggagctgggcaagggcgccttcagcgtggtgagaagatgcgtgaagaagaccagcacccaggagtacgccgccaagatcatcaacaccaagaagctgagcgccagagaccaccagaagctggagagagaggccagaatctgcagactgctgaagcaccccaacatcgccaccatccacggcggcatccacgacgccagcagcggcgactgcggcgtgttcgcccaggtgcagtgccccgagaagaccgagggctgccacccccacgaccacgcctgcctgcaggagctgctgagctgccagaagcccatcgagcaggaggtgggctggagatgccaggccaccgagcagcagcagaagcagagcagaaagcccagccccagagccagagccctggccgacggccacggcgccaccaaccactgcggcacccagagatacagatgggaccagggcctgcacagagagctgcagcaccaccacagaagatag

SEQ ID NO: 336290 - DNA, 2406 bp, Artificial Sequence
  derived and/or modified sequence
ctagtcccgattatggttattacagtttgatgaaatgtggctgagatcattggcactgtggagattaagaaatgtgaggtcagagtgttgggtaaattgttcctgcgagtgttaaggttgtcaggataatggtgggaatggggtgaagatgacaactcagcaatgacacaagaagagagtgacacagaaagattcagtagctgagaacttgagcgtagatatgttgtgggcaggagggaaatgatttggatggaagtagccaagtaagtgagaaaggaaagactttccaacaaaacttggcttagctcactcagatccctgagctgcaaacttcttctatacctttcttaccttttccagtgctgctgacttcaccccacttgcagggcatttgtgcagatggttgtttgttgaggaggaatgtgcttaatgttttaggaaccagttacattcaaggatgcctctgtggccttcaccgaggaggagtgaggtcacctggactctgctcccaggaagctgtgcggagctgtgatgctgggcaactacagaaacttggtcttggagacttgaatgaaaattctgtggagaatcttcagcagaaaacacttcaggatctgttacatgagctttcctcctggctagttttggaaggcatggccagtacaattactggaagtcaggattgtattgtgaatcatcgaggggaagtggatggggagcctgaactagatatttccccttgtcaacagtggggagaagcatcttctcctatttccagaaacagggacagtgtgatgactcttcaaagtggttgtttcgaaaacattgaaagtgaaacatatttgcctttgaaagtctcaagccaaatagacacacaagactcttcagtgaagttctgtaagaatgagcctcaggatcatcaggaaagcagacgtctctttgtaatggaagaaagcactgagagaaaagtgataaagggggaaagttgttcagagaaccttcaagttaaactggtgtctgatggacaagaactggcctcgccattgttaaatggtgaggcaacttgccagaatggccagttaaaagaatctttggatcccattgactgtaactgcaaagacattcatggatggaaatcacaggtggtcagttgtagtcagcagagagctcatacagaggagaaaccctgtgaccataataactgtgggaaaatacttaacaccagcccagatggtcatccatatgagaaaatccacactgcagagaaacaatacgaatgtagtcagtgtggtaagaacttcagtcaaagctcagagctactacttcatcagagagaccacacagaagaaaaaccctacaaatgtgagcaatgtgggaagggcttcacaaggagctcgagtctgcttatccatcaggcagtccacacagatgagaagccttataagtgtgacaagtgtgggaagggcttcaccaggagctcaagtctgctcatccatcatgccgtccatacaggcgaaaaaccttataaatgtgacaagtgtgggaagggctttagtcagagctccaaactgcacatccaccagcgagtccacactggagagaagccctatgagtgtgaggagtgtggtatgagcttcagtcagcgctcaaacctgcacatccaccagcgagtacacacaggagagaggccctacaagtgtggtgagtgtgggaagggcttcagtcagagctcgaaccttcacattcaccggtgcatccacacaggagagaagccttaccaatgctatgagtgtgggaagggtttcagccagagctcggatcttcgcatccatctcagagtccacactggagagaagccctatcactgtggcaagtgtgggaagggatttagccagagttccaaactcctcatccaccagagagtacatactggagagaagccctatgagtgcagcaagtgtgggaagggcttcagccagagctccaaccttcacatccaccagcgggttcacaagaaagatcctcgctaactgacattagcccattcaggtcttcacagcgctcatactgtaaaaactgttaaatatttagtatcactcttactttatattctacaaaggagagagatgtaagggttatttagatatgttccctcactgaaaaatcactcattcaaaatatttaagtatcaagcactttgttatgctgtacaatgaatggattgttcttgtttctcagatgggtagagtaaaagtgtctgtactttacaattcaactacatgttctacccagcattttaacggcaagaactttatatttattctcaagcagggcatgtttccctttgttcacattctctgagaaattgaaactctggtttctcttcaaaaaaaaaaaaaaaaaaaa

SEQ ID NO: 336291 - DNA, 2389 bp, Artificial Sequence
  derived and/or modified sequence
ctagtcccgattatggttattacagtttgatgaaatgtggctgagatcattggcactgtggagattaagaaatgtgaggtcagagtgttgggtaaattgttcctgcgagtgttaaggttgtcaggataatggtgggaatggggtgaagatgacaactcagcaatgacacaagaagagagtgacacagaaagattcagtagctgagaacttgagcgtagatatgttgtgggcaggagggaaatgatttggatggaagtagccaagtaagtgagaaaggaaagactttccaacaaaacttggcttagctcactcagatccctgagctgcaaacttcttctatacctttcttaccttttccagtgctgctgacttcaccccacttgcagggcatttgtgcagatggttgtttgttgaggaggaatgtgcttaatgttttaggaaccagttacattcaaggatgcctctgtggccttcaccgaggaggagtgaggtcacctggactctgctcccaggaagctgtgcggagctgtgatgctgggcaactacagaaacttggtcttggagacttgaatgaaaattctgtggagaatcttcagcagaaaacacttcaggatctgttacatgagctttcctcctggctagttttggaaggcatggccagtacaattactggaagtcaggattgtattgtgaatcatcgaggggaagtggatggggagcctgaactagatatttccccttgtcaacagtggggagaagcatcttctcctatttccagaaacagggacagtgtgatgactcttcaaagtggttgtttcgaaaacattgaaagtgaaacatatttgcctttgaaagtctcaagccaaatagacacacaagactcttcagtgaagttctgtaagaatgagcctcaggatcatcaggaaagcagacgtctctttgtaatggaagaaagcactgagagaaaagtgataaagggggaaagttgttcagagaaccttcaagttaaactggtgtctgatggacaagaactggcctcgccattgttaaatggtgaggcaacttgccagaatggccagttaaaagaatctttggatcccattgactgtaactgcaaagacattcatggatggaaatcacaggtggtcagttgtagtcagcagagagctcatacagaggagaaaccctgtgaccataataactgtgggaaaatacttaacaccagcccagatggtcatccatatgagaaaatccacactgcagagaaacaatacgaatgtagtcagtgtggtaagaacttcagtcaaagctcagagctactacttcatcagagagaccacacagaagaaaaaccctacaaatgtgagcaatgtgggaagggcttcacaaggagctcgagtctgcttatccatcaggcagtccacacagatgagaagccttataagtgtgacaagtgtgggaagggcttcaccaggagctcaagtctgctcatccatcatgccgtccatacaggcgaaaaaccttataaatgtgacaagtgtgggaagggctttagtcagagctccaaactgcacatccaccagcgagtccacactggagagaagccctatgagtgtgaggagtgtggtatgagcttcagtcagcgctcaaacctgcacatccaccagcgagtacacacaggagagaggccctacaagtgtggtgagtgtgggaagggcttcagtcagagctcgaaccttcacattcaccggtgcatccacacaggagagaagccttaccaatgctatgagtgtgggaagggtttcagccagagctcggatcttcgcatccatctcagagtccacactggagagaagccctatcactgtggcaagtgtgggaagggatttagccagagttccaaactcctcatccaccagagagtacatactggagagaagccctatgagtgcagcaagtgtgggaagggcttcagccagagctccaaccttcacatccaccagcgggttcacaagaaagatcctcgctaactgacattagcccattcaggtcttcacagcgctcatactgtaaaaactgttaaatatttagtatcactcttactttatattctacaaaggagagagatgtaagggttatttagatatgttccctcactgaaaaatcactcattcaaaatatttaagtatcaagcactttgttatgctgtacaatgaatggattgttcttgtttctcagatgggtagagtaaaagtgtctgtactttacaattcaactacatgttctacccagcattttaacggcaagaactttatatttattctcaagcagggcatgtttccctttgttcacattctctgagaaattgaaactctggtttctcttcaaa

SEQ ID NO: 336292 - DNA, 2067 bp, Artificial Sequence
  derived and/or modified sequence
tgtatttcggggccctaggcgcgcgagcggtcagcatccggaatctggcccctgcaggcgtggggttccacgtgggaggaatccatcccctctgggagtaagaaatgaccagggtccgggaaccagttacattcaaggatgcctctgtggccttcaccgaggaggagtgaggtcacctggactctgctcccaggaagctgtgcggagctgtgatgctgggcaactacagaaacttggtcttggagacttgaatgaaaattctgtggagaatcttcagcagaaaacacttcaggatctgttacatgagctttcctcctggctagttttggaaggcatggccagtacaattactggaagtcaggattgtattgtgaatcatcgaggggaagtggatggggagcctgaactagatatttccccttgtcaacagtggggagaagcatcttctcctatttccagaaacagggacagtgtgatgactcttcaaagtggttgtttcgaaaacattgaaagtgaaacatatttgcctttgaaagtctcaagccaaatagacacacaagactcttcagtgaagttctgtaagaatgagcctcaggatcatcaggaaagcagacgtctctttgtaatggaagaaagcactgagagaaaagtgataaagggggaaagttgttcagagaaccttcaagttaaactggtgtctgatggacaagaactggcctcgccattgttaaatggtgaggcaacttgccagaatggccagttaaaagaatctttggatcccattgactgtaactgcaaagacattcatggatggaaatcacaggtggtcagttgtagtcagcagagagctcatacagaggagaaaccctgtgaccataataactgtgggaaaatacttaacaccagcccagatggtcatccatatgagaaaatccacactgcagagaaacaatacgaatgtagtcagtgtggtaagaacttcagtcaaagctcagagctactacttcatcagagagaccacacagaagaaaaaccctacaaatgtgagcaatgtgggaagggcttcacaaggagctcgagtctgcttatccatcaggcagtccacacagatgagaagccttataagtgtgacaagtgtgggaagggcttcaccaggagctcaagtctgctcatccatcatgccgtccatacaggcgaaaaaccttataaatgtgacaagtgtgggaagggctttagtcagagctccaaactgcacatccaccagcgagtccacactggagagaagccctatgagtgtgaggagtgtggtatgagcttcagtcagcgctcaaacctgcacatccaccagcgagtacacacaggagagaggccctacaagtgtggtgagtgtgggaagggcttcagtcagagctcgaaccttcacattcaccggtgcatccacacaggagagaagccttaccaatgctatgagtgtgggaagggtttcagccagagctcggatcttcgcatccatctcagagtccacactggagagaagccctatcactgtggcaagtgtgggaagggatttagccagagttccaaactcctcatccaccagagagtacatactggagagaagccctatgagtgcagcaagtgtgggaagggcttcagccagagctccaaccttcacatccaccagcgggttcacaagaaagatcctcgctaactgacattagcccattcaggtcttcacagcgctcatactgtaaaaactgttaaatatttagtatcactcttactttatattctacaaaggagagagatgtaagggttatttagatatgttccctcactgaaaaatcactcattcaaaatatttaagtatcaagcactttgttatgctgtacaatgaatggattgttcttgtttctcagatgggtagagtaaaagtgtctgtactttacaattcaactacatgttctacccagcattttaacggcaagaactttatatttattctcaagcagggcatgtttccctttgttcacattctctgagaaattgaaactctggtttctcttc

SEQ ID NO: 336293 - DNA, 2039 bp, Artificial Sequence
  derived and/or modified sequence
gcatccggaatctggcccctgcaggcgtggggttccacgtgggagaggaatccatcccctctgggagtaagaaatgaccagggtccgggaaccagttacattcaaggatgcctctgtggccttcaccgaggaggagtgaggtcacctggactctgctcccaggaagctgtgcggagctgtgatgctgggcaactacagaaacttggtcttggagacttgaatgaaaattctgtggagaatcttcagcagaaaacacttcaggatctgttacatgagctttcctcctggctagttttggaaggcatggccagtacaattactggaagtcaggattgtattgtgaatcatcgaggggaagtggatggggagcctgaactagatatttccccttgtcaacagtggggagaagcatcttctcctatttccagaaacagggacagtgtgatgactcttcaaagtggttgtttcgaaaacattgaaagtgaaacatatttgcctttgaaagtctcaagccaaatagacacacaagactcttcagtgaagttctgtaagaatgagcctcaggatcatcaggaaagcagacgtctctttgtaatggaagaaagcactgagagaaaagtgataaagggggaaagttgttcagagaaccttcaagttaaactggtgtctgatggacaagaactggcctcgccattgttaaatggtgaggcaacttgccagaatggccagttaaaagaatctttggatcccattgactgtaactgcaaagacattcatggatggaaatcacaggtggtcagttgtagtcagcagagagctcatacagaggagaaaccctgtgaccataataactgtgggaaaatacttaacaccagcccagatggtcatccatatgagaaaatccacactgcagagaaacaatacgaatgtagtcagtgtggtaagaacttcagtcaaagctcagagctactacttcatcagagagaccacacagaagaaaaaccctacaaatgtgagcaatgtgggaagggcttcacaaggagctcgagtctgcttatccatcaggcagtccacacagatgagaagccttataagtgtgacaagtgtgggaagggcttcaccaggagctcaagtctgctcatccatcatgccgtccatacaggcgaaaaaccttataaatgtgacaagtgtgggaagggctttagtcagagctccaaactgcacatccaccagcgagtccacactggagagaagccctatgagtgtgaggagtgtggtatgagcttcagtcagcgctcaaacctgcacatccaccagcgagtacacacaggagagaggccctacaagtgtggtgagtgtgggaagggcttcagtcagagctcgaaccttcacattcaccggtgcatccacacaggagagaagccttaccaatgctatgagtgtgggaagggtttcagccagagctcggatcttcgcatccatctcagagtccacactggagagaagccctatcactgtggcaagtgtgggaagggatttagccagagttccaaactcctcatccaccagagagtacatactggagagaagccctatgagtgcagcaagtgtgggaagggcttcagccagagctccaaccttcacatccaccagcgggttcacaagaaagatcctcgctaactgacattagcccattcaggtcttcacagcgctcatactgtaaaaactgttaaatatttagtatcactcttactttatattctacaaaggagagagatgtaagggttatttagatatgttccctcactgaaaaatcactcattcaaaatatttaagtatcaagcactttgttatgctgtacaatgaatggattgttcttgtttctcagatgggtagagtaaaagtgtctgtactttacaattcaactacatgttctacccagcattttaacggcaagaactttatatttattctcaagcagggcatgtttccctttgttcacattctctgagaaattgaaactctggtttctcttcaaa

SEQ ID NO: 336294 - DNA, 2027 bp, Artificial Sequence
  derived and/or modified sequence
ttgtatttcggggccctaggcgcgcgagcggtcagcatccggaatctggcccctgcaggcgtggggttccacgtgggaggaaccagttacattcaaggatgcctctgtggccttcaccgaggaggagtgaggtcacctggactctgctcccaggaagctgtgcggagctgtgatgctgggcaactacagaaacttggtcttggagacttgaatgaaaattctgtggagaatcttcagcagaaaacacttcaggatctgttacatgagctttcctcctggctagttttggaaggcatggccagtacaattactggaagtcaggattgtattgtgaatcatcgaggggaagtggatggggagcctgaactagatatttccccttgtcaacagtggggagaagcatcttctcctatttccagaaacagggacagtgtgatgactcttcaaagtggttgtttcgaaaacattgaaagtgaaacatatttgcctttgaaagtctcaagccaaatagacacacaagactcttcagtgaagttctgtaagaatgagcctcaggatcatcaggaaagcagacgtctctttgtaatggaagaaagcactgagagaaaagtgataaagggggaaagttgttcagagaaccttcaagttaaactggtgtctgatggacaagaactggcctcgccattgttaaatggtgaggcaacttgccagaatggccagttaaaagaatctttggatcccattgactgtaactgcaaagacattcatggatggaaatcacaggtggtcagttgtagtcagcagagagctcatacagaggagaaaccctgtgaccataataactgtgggaaaatacttaacaccagcccagatggtcatccatatgagaaaatccacactgcagagaaacaatacgaatgtagtcagtgtggtaagaacttcagtcaaagctcagagctactacttcatcagagagaccacacagaagaaaaaccctacaaatgtgagcaatgtgggaagggcttcacaaggagctcgagtctgcttatccatcaggcagtccacacagatgagaagccttataagtgtgacaagtgtgggaagggcttcaccaggagctcaagtctgctcatccatcatgccgtccatacaggcgaaaaaccttataaatgtgacaagtgtgggaagggctttagtcagagctccaaactgcacatccaccagcgagtccacactggagagaagccctatgagtgtgaggagtgtggtatgagcttcagtcagcgctcaaacctgcacatccaccagcgagtacacacaggagagaggccctacaagtgtggtgagtgtgggaagggcttcagtcagagctcgaaccttcacattcaccggtgcatccacacaggagagaagccttaccaatgctatgagtgtgggaagggtttcagccagagctcggatcttcgcatccatctcagagtccacactggagagaagccctatcactgtggcaagtgtgggaagggatttagccagagttccaaactcctcatccaccagagagtacatactggagagaagccctatgagtgcagcaagtgtgggaagggcttcagccagagctccaaccttcacatccaccagcgggttcacaagaaagatcctcgctaactgacattagcccattcaggtcttcacagcgctcatactgtaaaaactgttaaatatttagtatcactcttactttatattctacaaaggagagagatgtaagggttatttagatatgttccctcactgaaaaatcactcattcaaaatatttaagtatcaagcactttgttatgctgtacaatgaatggattgttcttgtttctcagatgggtagagtaaaagtgtctgtactttacaattcaactacatgttctacccagcattttaacggcaagaactttatatttattctcaagcagggcatgtttccctttgttcacattctctgagaaattgaaactctggtttctcttc

SEQ ID NO: 336295 - protein, 458 aa, Artificial Sequence
  derived and/or modified sequence
MASTITGSQDCIVNHRGEVDGEPELDISPCQQWGEASSPISRNRDSVMTLQSGCFENIESETYLPLKVSSQIDTQDSSVKFCKNEPQDHQESRRLFVMEESTERKVIKGESCSENLQVKLVSDGQELASPLLNGEATCQNGQLKESLDPIDCNCKDIHGWKSQVVSCSQQRAHTEEKPCDHNNCGKILNTSPDGHPYEKIHTAEKQYECSQCGKNFSQSSELLLHQRDHTEEKPYKCEQCGKGFTRSSSLLIHQAVHTDEKPYKCDKCGKGFTRSSSLLIHHAVHTGEKPYKCDKCGKGFSQSSKLHIHQRVHTGEKPYECEECGMSFSQRSNLHIHQRVHTGERPYKCGECGKGFSQSSNLHIHRCIHTGEKPYQCYECGKGFSQSSDLRIHLRVHTGEKPYHCGKCGKGFSQSSKLLIHQRVHTGEKPYECSKCGKGFSQSSNLHIHQRVHKKDPR

SEQ ID NO: 336296 - DNA, 1904 bp, Artificial Sequence
  derived and/or modified sequence
ttgtatttcggggccctaggcgcgcgagcggtcagcatccggaatctggcccctgcaggcgtggggttccacgtgggaggagacttgaatgaaaattctgtggagaatcttcagcagaaaacacttcaggatctgttacatgagctttcctcctggctagttttggaaggcatggccagtacaattactggaagtcaggattgtattgtgaatcatcgaggggaagtggatggggagcctgaactagatatttccccttgtcaacagtggggagaagcatcttctcctatttccagaaacagggacagtgtgatgactcttcaaagtggttgtttcgaaaacattgaaagtgaaacatatttgcctttgaaagtctcaagccaaatagacacacaagactcttcagtgaagttctgtaagaatgagcctcaggatcatcaggaaagcagacgtctctttgtaatggaagaaagcactgagagaaaagtgataaagggggaaagttgttcagagaaccttcaagttaaactggtgtctgatggacaagaactggcctcgccattgttaaatggtgaggcaacttgccagaatggccagttaaaagaatctttggatcccattgactgtaactgcaaagacattcatggatggaaatcacaggtggtcagttgtagtcagcagagagctcatacagaggagaaaccctgtgaccataataactgtgggaaaatacttaacaccagcccagatggtcatccatatgagaaaatccacactgcagagaaacaatacgaatgtagtcagtgtggtaagaacttcagtcaaagctcagagctactacttcatcagagagaccacacagaagaaaaaccctacaaatgtgagcaatgtgggaagggcttcacaaggagctcgagtctgcttatccatcaggcagtccacacagatgagaagccttataagtgtgacaagtgtgggaagggcttcaccaggagctcaagtctgctcatccatcatgccgtccatacaggcgaaaaaccttataaatgtgacaagtgtgggaagggctttagtcagagctccaaactgcacatccaccagcgagtccacactggagagaagccctatgagtgtgaggagtgtggtatgagcttcagtcagcgctcaaacctgcacatccaccagcgagtacacacaggagagaggccctacaagtgtggtgagtgtgggaagggcttcagtcagagctcgaaccttcacattcaccggtgcatccacacaggagagaagccttaccaatgctatgagtgtgggaagggtttcagccagagctcggatcttcgcatccatctcagagtccacactggagagaagccctatcactgtggcaagtgtgggaagggatttagccagagttccaaactcctcatccaccagagagtacatactggagagaagccctatgagtgcagcaagtgtgggaagggcttcagccagagctccaaccttcacatccaccagcgggttcacaagaaagatcctcgctaactgacattagcccattcaggtcttcacagcgctcatactgtaaaaactgttaaatatttagtatcactcttactttatattctacaaaggagagagatgtaagggttatttagatatgttccctcactgaaaaatcactcattcaaaatatttaagtatcaagcactttgttatgctgtacaatgaatggattgttcttgtttctcagatgggtagagtaaaagtgtctgtactttacaattcaactacatgttctacccagcattttaacggcaagaactttatatttattctcaagcagggcatgtttccctttgttcacattctctgagaaattgaaactctggtttctcttc

SEQ ID NO: 336297 - DNA, 1377 bp, Artificial Sequence
  derived and/or modified sequence
atggccagcaccatcaccggcagccaggactgcatcgtgaaccacagaggcgaggtggacggcgagcccgagctggacatcagcccctgccagcagtggggcgaggccagcagccccatcagcagaaacagagacagcgtgatgaccctgcagagcggctgcttcgagaacatcgagagcgagacctacctgcccctgaaggtgagcagccagatcgacacccaggacagcagcgtgaagttctgcaagaacgagccccaggaccaccaggagagcagaagactgttcgtgatggaggagagcaccgagagaaaggtgatcaagggcgagagctgcagcgagaacctgcaggtgaagctggtgagcgacggccaggagctggccagccccctgctgaacggcgaggccacctgccagaacggccagctgaaggagagcctggaccccatcgactgcaactgcaaggacatccacggctggaagagccaggtggtgagctgcagccagcagagagcccacaccgaggagaagccctgcgaccacaacaactgcggcaagatcctgaacaccagccccgacggccacccctacgagaagatccacaccgccgagaagcagtacgagtgcagccagtgcggcaagaacttcagccagagcagcgagctgctgctgcaccagagagaccacaccgaggagaagccctacaagtgcgagcagtgcggcaagggcttcaccagaagcagcagcctgctgatccaccaggccgtgcacaccgacgagaagccctacaagtgcgacaagtgcggcaagggcttcaccagaagcagcagcctgctgatccaccacgccgtgcacaccggcgagaagccctacaagtgcgacaagtgcggcaagggcttcagccagagcagcaagctgcacatccaccagagagtgcacaccggcgagaagccctacgagtgcgaggagtgcggcatgagcttcagccagagaagcaacctgcacatccaccagagagtgcacaccggcgagagaccctacaagtgcggcgagtgcggcaagggcttcagccagagcagcaacctgcacatccacagatgcatccacaccggcgagaagccctaccagtgctacgagtgcggcaagggcttcagccagagcagcgacctgagaatccacctgagagtgcacaccggcgagaagccctaccactgcggcaagtgcggcaagggcttcagccagagcagcaagctgctgatccaccagagagtgcacaccggcgagaagccctacgagtgcagcaagtgcggcaagggcttcagccagagcagcaacctgcacatccaccagagagtgcacaagaaggaccccagatag

SEQ ID NO: 336298 - DNA, 1377 bp, Artificial Sequence
  derived and/or modified sequence
atggctagcacgatcacgggaagccaggactgtatcgtcaatcataggggggaggttgatggagagccagagcttgacatctcaccatgtcagcagtggggcgaggcctcctctccaatttcccgaaaccgagacagtgttatgacactgcagagcggatgtttcgagaatatcgaaagcgagacctacctccctcttaaggtatcatcacagatcgatacacaggattcctccgtgaaattctgtaaaaacgaacctcaggaccaccaggagtctcgccgtctgtttgtgatggaggagtctacagagcgtaaagttatcaagggggagtcgtgtagcgagaacctgcaggtgaaactcgtcagtgatggtcaggagctggcatcgccactgctcaacggcgaagccacatgtcagaatggacagctgaaggaatccctggaccccatagactgtaattgcaaggacatacacggatggaagagtcaggtagtgtcttgctctcaacagcgcgctcatactgaagagaaaccttgcgatcacaacaactgtggcaagatccttaacactagcccggatggacacccgtatgaaaaaattcataccgccgaaaaacagtacgagtgcagccagtgtgggaagaattttagtcagtcctctgagctcctgctgcaccagcgggatcataccgaggaaaaaccctacaagtgcgaacagtgtggaaagggcttcacaagatcgtcaagtctcttaatacatcaggccgtgcacaccgatgagaaaccatacaaatgtgataaatgtgggaagggatttacacggtcctccagcctacttattcaccacgctgttcatactggggagaagccatacaagtgcgataaatgtggcaaaggcttctcccagtcctccaagttgcatatccatcaacgggtgcatactggagagaagccttatgaatgcgaggaatgtgggatgtctttcagccagcgatctaaccttcacattcaccagagagtgcacaccggggagaggccatacaagtgtggggagtgcggcaaagggttctcccaaagttctaacttgcatatacataggtgtattcacaccggcgagaaaccatatcaatgctatgaatgtggcaaaggatttagtcagtcttctgacttgcgcatccacctgagagtacacaccggtgagaagccttaccattgtggtaagtgcgggaaggggttttcccagtcctcgaaactactgattcaccagcgcgtgcatacaggagagaaaccatacgaatgttccaagtgcggcaagggtttttcccaatccagcaatctgcacatccaccagagagtgcataagaaagacccccgctag

SEQ ID NO: 336299 - DNA, 1377 bp, Artificial Sequence
  derived and/or modified sequence
atggcctccacaatcaccgggtctcaagactgcattgtcaatcaccggggcgaagtggacggcgagcccgaattggacatttcgccgtgccaacagtggggtgaggcaagttctcccatctccaggaaccgcgacagcgtgatgactctacaatctggatgctttgagaacatcgaatcagaaacctacctgcccttaaaggtttcgtcccagattgacacccaagactcatcggtcaagttctgcaagaatgaaccccaggaccatcaggaaagtagacggctgttcgtgatggaagagtctacagagcggaaggtgattaaaggcgaatcatgttctgaaaatctgcaggtgaaattagtgtctgatggacaggagctggcttctcctctcctgaacggggaagcaacatgccagaatggacagctcaaggagagtctggacccgatcgactgtaactgtaaggacatccacgggtggaagtcccaagtggtgtcttgctcccagcaacgggcacacactgaggaaaaaccatgtgatcacaataattgcggtaagatcttaaacacttcccccgatggtcatccatatgagaaaatccatactgccgagaagcaatatgagtgttctcagtgtggaaaaaatttcagtcagagctctgaactgcttcttcaccaacgagatcacacagaggagaagccatataaatgcgagcagtgtggtaaaggatttacacggtcttcctcactcctgatccatcaggccgtgcatacggatgaaaagccctacaaatgtgataaatgcggcaagggcttcacccgctcatcatctctgctcatccatcatgccgtacacaccggggaaaaaccatacaagtgtgataagtgcgggaagggattcagtcagtcctctaagctgcatattcaccaacgagtgcataccggggagaagccctatgagtgcgaagaatgtggcatgtctttttcacagagatcaaacctacatatccaccagcgcgtccatacaggcgagagaccatataagtgcggggaatgcggaaagggcttttctcagtcctcgaacctgcacatccaccgctgcatccatacaggagagaagccataccaatgttacgagtgtggaaaagggtttagccaaagtagcgatttgagaattcatttacgcgtgcacactggggagaagccatatcattgcgggaaatgcgggaagggattctctcaaagctccaagcttctcatccatcagcgtgtgcacacaggggaaaagccgtacgagtgctcaaagtgcggcaaaggttttagtcagtcctccaacctccacatccatcagcgagtccacaagaaagatccccggtag

SEQ ID NO: 336300 - DNA, 1377 bp, Artificial Sequence
  derived and/or modified sequence
atggcctcaacgattacaggttcacaagactgcattgtaaatcaccgcggcgaggttgacggagagcccgagctggatataagtccatgtcagcagtggggcgaggcctcgagccccatctctcgaaacagggacagtgtcatgacactccaatcgggctgttttgaaaacatcgagtccgagacttacttgcccctgaaggtgagtagccagatcgacacccaggacagcagcgtgaagttctgtaaaaacgaaccacaggatcatcaggagtccagacggctgttcgttatggaggaaagtacagagagaaaggttataaagggagagtcctgctcagagaatttgcaggtcaagcttgtgtcggacggacaggagctggcctctcctcttttgaacggcgaagcgacatgccagaacggtcagcttaaggagtccctcgatcctatcgactgcaactgcaaagatatccacggatggaagagccaagtggtgtcctgttctcagcaacgggcgcatacagaggagaagccctgtgatcataataactgcgggaagattctgaatacatctcctgatgggcacccatacgagaaaattcacacagccgaaaaacaatatgagtgttcacaatgtgggaaaaacttttctcaatcctcggaactgctgttacaccagcgggaccatacagaggagaaaccttataagtgtgaacagtgcggcaaaggctttacaagatcctctagtctgctgattcatcaagccgtccataccgacgagaaaccctacaagtgtgataagtgcgggaagggcttcactcgatcatcttctctgctgatccaccacgcagtgcataccggggaaaagccctataagtgtgataaatgcgggaaaggtttttctcaatcgtccaagctgcacatacatcagcgcgtgcacacaggagagaaaccatatgagtgcgaggagtgtggcatgtctttttctcagagatctaacttgcatatacatcagagagtacataccggggaaaggccgtataagtgcggcgaatgcggcaagggcttctcacagtcctcaaacctgcacattcatcgctgcattcacacaggcgagaaaccgtatcagtgctatgagtgcgggaagggcttcagccagagctcagacttgcggatccatttgcgagtgcatacaggtgagaaaccttaccattgcgggaagtgtggaaagggatttagccagtcctccaaactactcatccaccagagagtccacacgggcgagaaaccgtacgaatgctctaaatgcggaaagggattcagccaatcatctaacctgcatattcatcagcgtgtccataagaaagatcccagatag

SEQ ID NO: 336301 - DNA, 1377 bp, Artificial Sequence
  derived and/or modified sequence
atggcaagcacaatcactggtagtcaggactgcattgtgaaccaccgcggagaagtggacggagagcctgaactcgacatatctccctgccagcagtggggagaggcctcttctcccataagtcggaaccgggactctgtgatgacccttcaaagcggatgctttgagaacatagaatccgagacatatctgcctttgaaggtcagttctcagatcgatacacaggatagttccgtgaaattctgtaaaaatgaacctcaggaccatcaagagtcaaggcgcttatttgtgatggaggagtcaacagaaagaaaggtgatcaaaggtgagagctgctccgagaacctgcaagtgaagctggtgagtgacggacaggaactcgctagtcctcttctgaacggcgaagcaacctgccaaaatggccagctcaaagaaagtctagaccctatcgactgtaactgcaaggacatccacggatggaaaagccaggtggtgagttgctctcagcagagggcccatacagaggagaagccttgcgatcataataattgcggaaaaatattaaatactagccctgacggacacccatatgagaaaattcatacagccgaaaagcaatatgaatgtagccaatgtggcaaaaacttcagccagagctctgagttgctgctccaccagcgcgaccacaccgaggaaaaaccctacaagtgcgaacagtgtggtaaaggttttacacgatcgagctccctcctcatccatcaggcggtccatacagacgagaagccctacaaatgcgataaatgtggaaagggttttacccgcagttccagccttttaattcaccacgctgtccacaccggagaaaaaccctataagtgcgataagtgtggcaagggtttttcacagagttctaagctccacatacaccagagagtgcacaccggagagaaaccatatgaatgcgaggagtgcgggatgagtttttcacaacggtctaacctgcacatccaccagagggtacacactggagagagaccctacaagtgcggggagtgtgggaaaggattttcacaatcaagtaatctccatatacacagatgcatccacaccggagagaaaccgtaccagtgctacgagtgcggcaaggggttctcacagtcaagcgacttacgtattcacctgcgggtgcataccggagagaagccttaccactgtggcaagtgtggtaagggattttcccagtcaagcaaactgttaatccatcagcgagtacacaccggagaaaaaccttacgagtgcagcaaatgcggaaaaggcttcagccagtcatccaatctacatatccatcagcgcgtgcacaagaaggacccaagatag

SEQ ID NO: 336302 - DNA, 1377 bp, Artificial Sequence
  derived and/or modified sequence
atggcttcgactatcaccgggtctcaggactgcatcgtgaatcataggggcgaagtcgatggagagccagaattggatataagcccttgccaacagtggggggaggccagcagtcccatctcccgaaatagggacagtgttatgaccttgcagtcggggtgtttcgagaacattgaaagcgaaacctatctccccctcaaggtcagcagccagattgatacccaggactcaagtgtgaaattctgcaaaaacgagcctcaagaccaccaggaatcccgacgactgttcgttatggaagaatcgaccgagagaaaggtgatcaagggagaatcctgcagcgaaaacctccaggtcaagctggtatcggacggacaagagctcgcctcccctcttctgaacggggaggctacatgtcaaaacggccagctgaaggagtcactggacccaatcgactgtaactgcaaggacattcacggctggaaatcccaagtcgtgagctgctctcagcaaagagcccacactgaggaaaagccgtgcgatcacaataactgcggtaagattctcaacacatcacccgacggccatccttacgaaaagatccacaccgctgagaagcagtacgaatgttcacagtgtggtaaaaatttcagccagtccagcgagttattactccatcagcgcgatcatactgaagagaaaccttataagtgtgaacagtgtggcaaggggttcacaagatcttcttcacttctcatccatcaggccgtgcatacagacgagaagccctacaagtgtgacaagtgcggcaaaggcttcacgcggagctccagcttgctgatccaccacgctgtgcataccggcgaaaagccatacaaatgtgacaagtgcggaaagggctttagccagtccagcaagctgcatatccaccaaagagtgcacaccggcgagaagccttatgagtgtgaggaatgcggcatgagcttctctcaacgcagtaatctgcacattcaccaaagggtgcacactggggagcgtccctataagtgcggcgagtgcggcaagggtttcagccaaagctccaaccttcatatccatcggtgtattcacactggcgaaaagccctaccaatgctatgagtgcgggaaaggattctctcagtcaagtgatctccgcatccatctcagagtccacactggggagaaaccttatcactgcgggaaatgcggcaaaggcttctcccagtctagcaaattgcttatacaccaaagggtccacaccggagagaagccgtacgagtgtagtaaatgcggtaagggatttagccaatccagcaacctgcacatccatcaaagagtccataagaaggatcccagatag

SEQ ID NO: 336303 - DNA, 1377 bp, Artificial Sequence
  derived and/or modified sequence
atggccagcaccatcaccggcagccaggactgcatcgtgaaccacagaggagaggtggatggagagcctgagctggacatcagcccctgccagcagtggggcgaggccagcagccccatcagcaggaacagagacagcgtgatgaccctgcagagcggctgctttgagaacatcgagagcgagacctacctgcccctgaaggtgagcagccagattgacacccaggacagctctgtgaagttctgcaagaatgagccccaggaccaccaggagagcagaagactctttgtgatggaggagagcacagagaggaaggtgatcaagggggagagctgcagcgagaacctgcaggtgaagctggtgtctgatggccaggagctggccagccccctgctgaatggagaggccacctgccagaatggccagctgaaggagagcctggaccccatcgactgcaactgcaaggacatccacggctggaagagccaggtggtgtcctgcagccagcagagggcccacacagaggagaagccctgtgaccacaacaactgtgggaagatcctgaacaccagcccagatggccacccctatgagaagatccacacagctgagaagcagtatgagtgcagccagtgtgggaagaacttcagccagagcagcgagctgctgctgcaccagagggaccacacagaggagaagccctacaagtgtgagcagtgtgggaagggcttcaccaggagcagcagcctgctgatccaccaggccgtgcacacagatgagaagccctacaagtgtgacaagtgtgggaagggcttcaccaggagcagcagcctgctgatccaccacgctgtgcacactggagagaagccctacaagtgtgacaagtgtgggaagggcttcagccagagcagcaagctgcacatccaccagagggtgcacactggagagaagccctatgaatgtgaagaatgtggcatgtccttcagccagaggagcaacctgcacatccaccagagggtgcacactggagagcggccctacaagtgtggagaatgtgggaagggcttcagccagagcagcaacctgcacatccaccgctgcatccacactggagagaagccctaccagtgctatgaatgtgggaagggcttcagccagagcagtgacctgcgcatccacctgcgggtgcacactggagagaagccctaccactgtgggaaatgtgggaagggcttcagccagagcagcaagctgctgatccaccagagggtgcacactggagagaagccctatgagtgcagcaaatgtgggaagggcttcagccagagcagcaacctgcacatccaccagagggtgcacaagaaggaccccaggtag

SEQ ID NO: 336304 - DNA, 1377 bp, Artificial Sequence
  derived and/or modified sequence
atggccagcaccatcaccggcagccaggactgcatcgtgaaccacagaggagaggtggacggcgagcctgagctcgatattagcccatgccagcagtggggggaggcgtcttctccgatatcaaggaaccgcgattccgtgatgaccttgcaaagcggctgttttgagaacattgagtctgagacgtacctacctctgaaagtgagctcgcagatcgatacacaggattcatctgttaagttttgcaagaatgaaccacaagaccaccaggagtcccgccgtctcttcgtgatggaagagtccaccgaaagaaaagtcatcaaaggggagtcttgctctgaaaatctacaggtcaagctcgtgagcgatgggcaggaactggcctccccattgcttaatggtgaggccacttgtcagaatgggcagttaaaagaatctctggacccgatcgactgcaactgtaaagacatccatggatggaaatcccaggtcgtgagttgtagtcaacagcgggctcacactgaggagaaaccttgtgaccataataattgtggaaaaattctgaatacttctcctgacggccacccctacgagaaaatacatactgcagagaaacagtacgaatgctctcagtgcggtaaaaatttctcccagtcctctgagctcttgcttcatcaacgagaccacactgaagagaagccatacaagtgcgagcagtgtggtaagggcttcacacgctccagttccctgctcatacatcaggccgtacatacggatgaaaagccgtacaagtgtgacaaatgtggtaagggctttacacggtcatcttctttactcattcatcacgcagtgcacaccggcgagaaaccttataagtgcgacaagtgcgggaagggatttagtcagagctcaaaacttcacatacaccaacgcgtacacacgggggagaagccatatgaatgtgaggaatgcgggatgtccttctcccagcgaagtaacctacacatccaccaacgtgtccacacaggagagcgaccctataagtgcggcgagtgcggcaaagggttcagccagtcatccaacttacacattcacaggtgcatccacaccggcgagaagccctaccaatgctacgaatgcgggaaggggtttagccagtcttccgacttacgcatccacctcagagtgcacaccggggaaaaaccctatcactgcgggaagtgtggcaaagggttctcccaatcgagtaaacttctcatacaccagagagtccacaccggagagaagccttacgaatgcagtaagtgcggcaaaggatttagtcaaagtagtaatctgcacatccaccaaagagtacataaaaaggatcctagatag

SEQ ID NO: 336305 - DNA, 1377 bp, Artificial Sequence
  derived and/or modified sequence
atggccagcaccatcaccggcagccaggactgcatcgtgaaccacaggggcgaagtcgatggagagcctgaattagacatttccccttgtcagcaatggggagaggcctcaagccctatctcgcgcaatcgcgactccgttatgactttgcagagcgggtgcttcgaaaacattgaatctgagacatatctgccgcttaaagtctcctcgcaaattgatacacaagactctagcgtgaagttctgtaagaacgaaccacaagatcaccaagagtctcgacgtctattcgttatggaagagtctaccgagcggaaagtcatcaagggcgagtcctgctccgaaaacctccaagtaaaactggtgagtgacggtcaagaactagcctcccccctgcttaacggggaagctacctgccagaacggacagcttaaagagagcctcgaccctatagactgcaattgtaaggacattcacggatggaaaagccaggttgtgtcttgcagtcagcagagggcgcacaccgaagaaaaaccgtgcgatcacaataattgtggaaaaattctgaatacctcccccgacggacacccgtacgagaaaatccacacggctgagaaacagtatgagtgtagtcagtgcggcaaaaatttcagccagtcctcagagttactcctgcaccaacgtgaccacactgaagaaaaaccctataagtgcgaacagtgcggcaagggctttaccagaagtagctctctcttgatccaccaggccgtccacaccgacgagaaaccttacaaatgtgataagtgtggcaaggggtttacacgaagcagcagcttattgatccaccacgcagtccacaccggagaaaagccttacaaatgtgataagtgcgggaaaggattttcccaaagctctaaactccatattcaccagcgcgtgcacaccggagaaaaaccatatgaatgtgaggaatgtggaatgtcattttcacagcgtagcaacttgcatattcaccagagggttcacacaggggaaaggccctataagtgcggggagtgtggcaagggcttcagtcagagcagcaatctgcacattcaccgctgtatccacactggcgagaagccgtaccagtgttatgagtgtgggaagggattcagccagtctagtgatctgagaattcacctgcgcgtacacacaggagaaaaaccctaccactgcggaaaatgtggcaaaggcttcagccagagcagtaagttactcatacatcagcgcgtgcacacgggcgaaaagccatacgaatgctccaagtgcggtaaggggttcagccagagttcaaacctgcacattcaccaacgcgtgcataagaaagaccccagatag

SEQ ID NO: 336306 - DNA, 1377 bp, Artificial Sequence
  derived and/or modified sequence
atggccagcaccatcaccggcagccaggactgcatcgtgaaccaccgcggtgaagtggacggcgagcctgagctggatatatctccctgtcaacaatggggtgaggcctcttcaccgatttctaggaacagagattctgtcatgacacttcagtcgggttgttttgagaacattgagagcgagacctatctgcctctcaaggtgtcttcacaaatcgacacacaagatagttctgtaaaattttgcaaaaatgagcctcaggatcatcaagagtccagacgcctgtttgtgatggaggagagcactgaacgcaaagtaatcaagggcgagtcctgtagcgaaaatttgcaagtgaagcttgtatccgatgggcaggagttagccagcccattgttgaatggtgaggcaacttgccagaatggccagctcaaggaaagtctggacccgattgactgtaattgtaaagacatccatggctggaaatcacaagtggtttcatgcagccagcagcgtgctcacaccgaggagaaaccatgcgatcacaataactgcgggaagatcctgaataccagtcctgacggccatccttatgagaaaatacacactgcggagaagcagtacgagtgttcccagtgcggcaagaatttcagccagagctcagagttactgctacaccagagagaccatacagaagaaaagccctacaagtgcgagcaatgcggaaaaggctttaccagatccagtagtctcttgatccaccaggcagtacataccgacgagaaaccatataagtgtgataagtgtggcaaagggttcactagatcctcatcactgctgatccatcacgcagtgcacaccggagaaaagccctataagtgcgataaatgtggtaaaggcttctcacaaagctccaagctccacattcatcagcgcgtgcatacaggtgaaaaaccttatgaatgcgaggaatgcggcatgagcttctcccaaagaagcaatcttcacattcatcagcgagtccacactggtgaacgcccttataaatgtggagaatgcggtaaagggttttcgcagagcagtaaccttcacatccaccggtgcatccatacaggggagaaaccctatcagtgttatgaatgcggtaaagggttcagccagagctcagacttacgaattcacttacgggtccacactggcgagaaaccttatcattgtggcaagtgcggaaagggcttctcccagagcagcaagctgctgattcaccaacgggttcatacgggagaaaaaccctatgagtgctcgaagtgcggcaaaggcttttcccagtctagtaaccttcatatccatcagagagtgcataagaaggatccccggtag

SEQ ID NO: 336307 - DNA, 1377 bp, Artificial Sequence
  derived and/or modified sequence
atggccagcaccatcaccggcagccaggactgcatcgtgaaccaccgtggcgaggtggatggggagccggagctcgacatcagcccgtgtcaacaatggggggaggccagtagtcccattagccgcaacagggactccgtcatgaccctccagtcaggctgtttcgaaaacattgaatcagagacatatctccctctgaaggtatcaagtcagattgatactcaggacagcagcgtgaaattctgcaagaacgagccgcaggatcaccaggaatcaagacggctctttgtcatggaagaatcaactgagcggaaggtcattaaaggagagtcttgtagcgagaatctgcaagtgaaactggtgagcgacggtcaagagctcgctagcccactgttaaatggcgaagccacatgccagaacggtcagctcaaggaatcactggatccaatcgactgtaattgcaaagacatacacggctggaagtcccaggtggtctcttgttcgcagcagcgtgcccacactgaagaaaagccatgtgatcacaataattgcggcaagatcctgaacaccagtcccgacggccacccttatgaaaagatccataccgcagagaagcaatacgaatgctcgcaatgcggtaagaacttttcacagtcctccgagcttctgctccaccagcgggaccacacagaggagaagccctacaagtgtgagcagtgcggcaagggcttcacaagaagctcctctctcctgattcatcaggccgtgcataccgatgaaaagccctacaaatgcgacaaatgtggaaaggggttcacaaggtctagtagtctgttgatacaccacgctgtgcacacaggcgaaaagccctacaaatgcgacaaatgtgggaaaggcttctcccagtcttctaaactgcacatacatcagagagtgcatacaggggagaagccttatgagtgtgaggagtgcggaatgtccttttcccaaaggagtaacctgcatatccatcagagagtccacacaggagagagaccttataagtgcggcgaatgtggcaaaggattctcccagtcatcaaatttgcatatccatcgctgcattcacactggggagaagccatatcaatgttacgagtgcggaaagggattttcacagtctagcgatctccgcattcacttgcgcgttcatacaggcgagaaaccctatcactgcgggaagtgcggaaagggcttttctcagagttcaaaattgcttatccaccagcgcgttcatacaggagagaaaccatatgagtgtagtaagtgtggaaaaggcttctcacagagctcgaatctccatatccaccaaagggtgcataaaaaagacccacggtag

SEQ ID NO: 336308 - DNA, 1377 bp, Artificial Sequence
  derived and/or modified sequence
atggccagcaccatcaccggcagccaggactgcatcgtgaaccaccgcggagaggtcgacggcgagccagaactggatatctcgccctgccagcagtggggagaagctagctccccaatcagccgcaacagagattctgttatgaccttgcagagcgggtgctttgagaatatcgagtccgagacatacttaccactgaaagtgagttcgcagattgacacccaggactcctcagtgaaattttgtaagaacgaacctcaggatcatcaggaaagcagaaggctgttcgtgatggaagagagcacggagcgcaaggtgatcaaaggcgagagctgcagtgagaaccttcaggttaaactcgtgtcagacggacaagaactggcctcaccattactgaatggtgaggcaacatgtcagaatgggcagctcaaggaaagtttggatcccatagactgcaattgcaaagatattcacggttggaaatctcaggtggtgtcctgcagtcagcagagggcccacacagaagaaaaaccctgcgaccacaataattgcgggaagatcttgaataccagccctgatggacatccatacgagaaaatccataccgccgaaaaacagtatgagtgctctcagtgcgggaagaatttctcacagtcgtctgagcttctgctccaccagcgagatcacactgaagaaaagccatacaaatgcgagcagtgcggaaagggattcacacgatccagctcactcctgatccaccaggcggtacacaccgatgagaagccttacaagtgtgacaagtgcggtaaaggattcactcgttcctcaagcctcttgattcaccacgccgtccacaccggggagaaaccctataaatgcgataagtgtggcaagggattctctcagtcgtctaagctgcacattcaccaacgagttcacacgggcgaaaaaccttatgagtgtgaggaatgtggaatgtccttctcccagcggtctaacttgcacatacaccagagagttcacacaggcgagcgcccgtacaagtgcggtgagtgcggcaaagggttctcccaatctagcaacttgcatattcatcgctgcatacatactggtgagaagccctatcagtgttatgaatgtggcaagggcttctctcagagctcagatctgaggatccacctgagagttcatactggcgagaaaccataccactgcggtaagtgcggtaagggattttcacagagttcaaagctgcttattcaccagcgggtgcacaccggagagaaaccatatgagtgtagcaagtgtggtaagggtttcagtcagtcctctaatctccacatccatcagcgcgtgcacaaaaaggaccccaggtag

SEQ ID NO: 336309 - DNA, 1377 bp, Artificial Sequence
  derived and/or modified sequence
atggcaagcacgattaccggatctcaagactgtattgtaaatcatcggggagaggtcgacggtgaaccagaactcgatatctccccctgtcagcagtggggcgaggcctcatccccaatttcccgtaacagggatagcgtgatgaccctgcagtccggatgtttcgagaatatagagtctgaaacctatctgcctcttaaggtgtcaagtcagatagacacacaggatagcagtgtcaagttctgtaagaatgaaccgcaggaccaccaggaatcacgaaggcttttcgttatggaggaatcaactgaacgcaaagtgatcaagggagagtcctgtagcgaaaatctccaggtgaaactggtgtcagacggccaggaacttgcatctccgctgctgaacggggaagcgacctgtcagaatggccagttgaaggaaagtttagatcccattgattgcaattgcaaggatattcatggctggaagtctcaggtggtgtcttgcagccaacagcgtgcacacacggaagagaaaccttgtgaccacaacaattgtggcaaaatactgaacactagccctgacggacacccttacgagaagatccacaccgcagaaaagcagtatgaatgcagccagtgcggcaagaacttctcacagagttcagaactgttgttgcaccagcgagaccacaccgaggagaaaccttataagtgtgagcagtgcgggaaaggcttcacccgcagcagctcactgctgatccaccaggctgttcacacagatgaaaaaccttataagtgcgataaatgcggtaagggattcacccggtcgtccagcctgctaatccatcacgctgtccataccggcgagaaaccctataaatgcgataagtgcggcaaaggctttagccagtctagtaaattacacatccaccaaagagtacacactggggagaagccctatgagtgtgaggaatgcgggatgtcattttcacagcgctctaacctccatatacaccaacgcgttcacactggagagagaccttacaagtgcggtgaatgcggtaagggctttagtcagtcttcgaacttgcatattcacagatgcattcataccggggagaagccctaccagtgttacgaatgcggaaaaggcttttcacagagctccgacctgcggattcatttacgtgtacataccggggaaaaaccctaccattgtgggaaatgcggcaaggggttctctcagtcatccaaactgcttatccaccagcgcgtgcacaccggcgaaaaaccatatgagtgctctaagtgcggaaaagggtttagtcagtccagtaacctacatatccaccagagagtgcacaaaaaggatcctaggtag

SEQ ID NO: 336310 - DNA, 1377 bp, Artificial Sequence
  derived and/or modified sequence
atggcctcaacgatcactggcagccaagactgtattgtaaaccaccggggagaagtagacggcgagcctgagctggacatctcaccctgccagcagtggggggaggcttcctctccgatcagtaggaatagagatagtgtgatgacacttcagtctggctgctttgagaatatcgagtcagagacgtatctaccactgaaagtcagtagccagatagacacacaggactcctctgtcaaattttgcaagaatgaaccccaggatcatcaagaatctcggaggttgtttgtgatggaagagagcacagagcgcaaagtgattaagggcgagtcttgtagtgaaaatctccaggtcaaactggtgagcgatggtcaggagctagccagccccctgttgaacggcgaagctacctgccaaaacgggcaattgaaggagtccctcgatccaattgattgcaactgtaaggacatccatggttggaagagccaggtggtcagctgcagccagcagcgcgcacataccgaggagaaaccatgtgaccacaataactgcggcaagatcctgaacacctcccctgatggccacccctatgaaaagatccacactgccgaaaagcaatatgaatgctcacagtgtggcaagaacttcagccaatcgtcagagctcctgctccaccagcgagatcatacagaggaaaaaccgtacaagtgtgagcagtgcgggaaagggtttactcgttcatcttccctgctcatccaccaggctgttcatactgacgaaaagccttataaatgcgacaaatgcggaaaggggttcacccggagcagcagcctcttgattcaccatgccgtgcacactggggagaagccttataaatgtgataagtgcggaaagggattttctcaatctagtaagctccatatccatcaacgggtgcataccggggagaaaccatatgagtgcgaagagtgcggtatgagtttttcccaacggtctaacttgcatattcatcaaagggtccacacaggggaacgcccatataaatgcggcgagtgtggcaagggcttctcacaaagttccaatttacatatacatcgatgcatccacacaggggaaaagccctaccagtgttacgagtgtggaaagggattttctcagtcatcggacctgcgaattcatctccgcgtgcacaccggcgaaaaaccataccactgcggaaaatgcggcaagggttttagtcagagctcaaagcttctgatccatcagagggtgcatacaggtgaaaagccttacgagtgcagcaaatgtggcaagggatttagtcagtcatctaatttgcatatccatcaaagagtgcataagaaagaccccaggtag

SEQ ID NO: 336311 - DNA, 1377 bp, Artificial Sequence
  derived and/or modified sequence
atggctagcacaatcacagggagccaggattgcatagtaaaccatcgtggcgaagtcgatggcgagcccgagttggatatttcgccctgtcaacaatggggtgaggcttcttcccccatctcacgaaacagggatagcgtgatgaccctgcagtcagggtgctttgagaacattgaatccgaaacatatctccctctgaaagtgtcatcccagatcgatacacaggactcttctgttaaattttgtaagaacgagccccaagaccaccaggagagtcggagactattcgtgatggaggagagcaccgaacgcaaggtgatcaaaggggaaagttgttctgagaacctgcaggtgaagttagtgtccgatgggcaagagctcgccagccctctgctcaatggagaggctacatgccaaaatggccagcttaaggagagcctggatcctatcgattgtaattgcaaggatatacatgggtggaaatcccaagtcgtgtcttgttcgcagcaacgggcacacaccgaggagaagccatgcgatcacaacaattgcggcaaaatcctgaacacaagtcccgacggccacccttatgaaaagatacacactgcggagaaacaatatgaatgctctcaatgcggcaaaaacttttcccagagtagcgagctgcttctgcatcagagggaccatacagaggagaaaccatataagtgtgagcagtgcgggaagggatttacccgtagcagtagcttgctcattcaccaagcagttcataccgatgaaaaaccctacaaatgcgataagtgcggcaaagggttcacccgcagttcctccttactgatccaccacgccgtgcataccggtgagaaaccatacaaatgcgataaatgcggcaaaggattcagccaatcctccaagctgcacatccatcagagggtccacacaggagagaagccgtacgagtgtgaagagtgcgggatgtcattctcccagcgtagcaacctccatatccaccaacgcgtgcacaccggggaacggccttacaaatgtggagagtgtggcaaaggattcagtcagagtagcaatctccatatccacagatgcattcacaccggtgaaaagccgtatcaatgctatgagtgtggaaagggctttagtcaatcttctgacctgcgtatacaccttcgagtgcatacaggggaaaaaccataccactgtggaaaatgtggcaaggggtttagtcagtcttcaaaattgttaatccatcagcgtgtgcacacgggggaaaaaccctacgaatgctcaaaatgcggcaaggggttttcacagagtagcaatctccacatccatcaaagggtccataagaaggacccacggtag

SEQ ID NO: 336312 - DNA, 1377 bp, Artificial Sequence
  derived and/or modified sequence
atggcaagcacaattaccggctctcaagattgtattgtgaatcaccgcggagaggtagacggggaacctgagcttgacatctctccatgccagcagtggggagaggcctcatcccctatttcccggaacagagattcagttatgactcttcagagcggctgcttcgagaatatagaatcagagacctacttaccactgaaagtgtccagccaaatcgacacacaggattccagcgtaaagttctgcaagaatgagcctcaagatcaccaggaatcacgcagactgttcgtcatggaagaatcaaccgaacgcaaggtgatcaaaggcgagagctgcagtgagaatctgcaggtgaagcttgtcagtgacggccaggaactagcctcacccctgctgaatggagaagccacttgtcagaacggacaactgaaagaaagcctggaccctatcgattgtaactgcaaagacattcacggatggaagtcccaggtcgtcagctgttctcaacagcgggctcacaccgaagaaaagccctgcgatcacaacaattgtggcaaaatcctcaataccagccccgacggccatccgtacgaaaagattcacactgcagaaaaacagtatgagtgctctcaatgtggtaagaatttctcacagtcctccgagctgcttctgcatcaacgtgaccatacagaagaaaagccatataagtgtgagcaatgcggcaaagggttcacccggtcaagctctctgttgatacaccaggccgtgcatacagatgagaaaccctacaagtgcgacaagtgcgggaaggggtttacgagatctagttctctgctcattcatcacgccgtccacactggcgaaaaaccttataagtgtgataagtgcggaaagggattcagccagagctctaagctgcacatacatcagcgggttcatactggggaaaaaccttatgaatgtgaggagtgcgggatgagtttttctcagagaagtaacctccatatccaccaaagggttcacaccggggaacgaccctacaagtgtggcgagtgtgggaagggtttttcacaaagcagcaacctccatattcatcgctgtattcacacaggagagaagccctaccagtgctatgagtgcggaaaagggttctcacagtcctctgacctgcggattcacctgagggtgcacactggggagaagccataccactgcggaaagtgtggcaaaggattctcccagtcatctaagctgctcattcaccaacgggtgcatacaggagagaaaccttacgagtgtagtaaatgcggaaaaggcttttctcagagttcaaacctccatattcatcagcgcgtccacaaaaaagacccccgttag

SEQ ID NO: 336313 - DNA, 1377 bp, Artificial Sequence
  derived and/or modified sequence
atggcttctaccatcactgggagccaagattgtattgtgaaccatcgaggagaggtggacggtgagcccgagctggatatcagcccatgccagcagtggggcgaggcgagcagccccattagcaggaaccgtgatagtgttatgacactgcagtccggttgcttcgagaacattgaaagtgagacttacctacctcttaaggtcagctctcagatagacacacaggactcaagcgttaaattttgtaagaacgagccccaggatcaccaagagagtaggagactgttcgtgatggaggagtctaccgagagaaaagtcattaagggcgaaagttgcagcgaaaacctacaggtgaaactcgtgtccgatgggcaggagctggcctctcctttactcaacggcgaggctacctgtcaaaatggtcagctgaaagagagtcttgatcccatcgactgcaattgtaaggatatccatggctggaagagccaggtagtaagctgtagtcagcagcgcgctcataccgaggaaaagccttgtgaccataacaactgtggaaaaatcctgaatacctccccagatggtcatccttacgagaaaattcacactgcagaaaaacaatacgagtgttcccagtgtgggaagaattttagccaatctagtgaactcttactccatcagcgtgatcacaccgaagagaagccttacaagtgcgaacagtgcggaaaggggttcacacggtcttcatcgttgctgattcatcaagcagtgcacacagacgagaagccatacaaatgcgataagtgcggcaaaggatttacccggagttcttcactgctgattcatcacgctgttcatactggcgagaagccctacaaatgcgacaaatgcgggaagggtttttcccagagtagcaagctgcacattcaccaacgagttcataccggcgaaaaaccatacgagtgtgaggagtgtggaatgtctttctctcagcggtccaacttacatatccaccagcgcgtccacactggagaaagaccgtacaaatgcggggagtgcggaaaggggttttctcagtccagtaacttgcacatacaccgctgcattcacactggcgagaagccgtatcaatgctatgagtgcggcaaggggttttctcagagctccgacctgcgcattcacctgagagtgcataccggggagaagccgtaccattgcggcaagtgtggcaaaggcttctctcaaagctccaaactcctgatccatcaacgggtacatactggggagaaaccctatgagtgctctaaatgcggaaaggggtttagccaaagctccaatctacacatccaccagcgggttcataagaaagaccctagatag

SEQ ID NO: 336314 - DNA, 2399 bp, Artificial Sequence
  derived and/or modified sequence
ctgaagcctggggtcagcaggcgctgcgggcgcagctccggtgcaagcgaggacacgacacatgcagtggcttctggactgcgcgatgactggacgcaagtaacttctaggtctgcagacaagaggaagagaagatgaaggaagactgtctgccgagttctcacgtgcccatcagtgacagcaagtccattcagaagtcggagctcttaggcctgctgaaaacctacaactgctaccatgagggcaagagcttccagctgagacaccgtgaggaagaagggactctgatcatcgaggggctcctcaacattgcctgggggctgaggcggcccatccggctgcagatgcaggatgaccgggagcaggtgcacctcccctccacctcatggatgcccagacggcctagctgccctctggcccctggaggaggcagaggaggccccccagctgatgcggaccaagagcgacgccagttgcatgagccagaggaggcccaagtgccgcgcccccggtgaggcccagcgcatccggcgacaccggttctctatcaacggccacttctacaatcataagacctccgtgtttactccagcctatggatccgtgaccaatgtgagggtcaacagcaccatgacaaccctgcaggtgctcaccctgctgctgaacaaatttagggtggaagatggccccagtgagttcgcactctacatcgttcacgagtctggggagcggacaaaattaaaagactgcgagtacccgctgatttccagaatcctgcatgggccatgtgagaagatcgccaggatcttcctgatggaagctgacttgggcgtggaagtcccccatgaagtcgctcagtacattaagtttgaaatgccggtgctggacagttttgttgaaaaattaaaagaagaggaagaaagagaaataatcaaactgaccatgaagttccaagccctgcgtctgacgatgctgcagcgcctggagcagctggtggaggccaagtaactggccaacacctgcctcttccaaagtccccagcagtggcaggtgtacactgagccctggttgctggccccggccggtcacattgactgatggccaccgcctgacgaatcgagtgcctgtgtgtctacctctctgaagcctgagcaccatgattcccacagccagctcttggctccaagatgagcacccacaggaagccgacccaggcctgaggggccaggaacttgctgggtcagatctgtgtggccagccctgtccacaccatgcctctcctgcactggagagcagtgctggcccagcccctgcggcttaggcttcatctgcttgcacattgcctgtcccagagcccctgtgggtccacaagcccctgtcctcttccttcatatgagattcttgtctgccctcatatcacgctgccccacaggaatgctgctgggaaaagcagggcctgccagcaggtatgagatctagcctgctttcagccatcaccttgccacagtgtccccggcttctaagcctccaatatcaccctgtgagcctcgcacagctcagccccaacacagaggtgagaccaggaataaggccacaagtatctcactttctctgcagaaatcaatctttacttcatcagagagacctaaagcgattcttacaaggagcttgctgcaagaaacacggtcattcaatcacattgaggagggtccacatggcattgagagggtgctgcccgctcaatgcccagcagcagctctggaaggcagtgctcagccccatcaccactgtcccgtggatgcctgtgtacctcttgccttttctgggcttgcgtttctctcctctagtgggtggggatgactttcaatgactttcaatacttcccctgaaggaagaatgataaggagaaatgtctgttttgaggaaagggctttgaattccccagatactgaacaatttgtgtttgtgactgatggagaatttcaggaatgaatgagaaagcctttgcgaaactatgcaacagtttacatcagtcatgtgaagtatttgtctaaaacagagcaaactgaagaccaaattattctcctgttgaggtccgtggatggcagatttaaagggaagaaccacaaaggcttgcaaagataggagaggctccatctctaatgcatgtagaagctccttacgggtgcccatcaagagcatagcttggaagccaccatgctgtgcggaactgcgtcagggcaaatgtcacagcaggatttccccaacccagctccatcatcacagacacagagagctgcaggggaggcctgcccactgttttgtcgactctgccctcctctggcagcatagatccttaggtgctcaataaaggtgtgctgtattgaactgaagaagtg

SEQ ID NO: 336315 - DNA, 579 bp, Artificial Sequence
  derived and/or modified sequence
taaaccgaacagtattctgaatatacagggtatgctgaaacatatcgctggtctcgctcacacgaagacggttccgagagagatgattggcagaggcggtgtaccgagattgttgctatagatgccctgcacttcagacgctacctcgatcagttcgtaccagaaaagatgcgcagagaactgaacaaagcatactgtggcttccttcgacccggagtgagcagcgaaaacctgtcagccgtagctactggcaattgggggtgtggagctttcggcggggacgctcggctcaaggccctcattcagatactcgcagccgccgctgccgagagagatgtcgtgtatttcaccttcggggacagcgaactgatgcgggatatatactctatgcacatctttttaactgaaaggaaactcacggttggggatgtttacaagctactgctaagatattacaatgaggaatgccgaaattgctctacgccggggcctgacattaagctgtacccctttatataccacgccgttgagagctgtgccgagactgcggatcatagtggccagcggacgggcacatag

SEQ ID NO: 336316 - DNA, 579 bp, Artificial Sequence
  derived and/or modified sequence
tgaacagagcagtacagcgagtacacaggctacgccgagacctaccgctggagccgcagccatgaagatggcagcgagagagatgactggcagaggcgctgcacagaaattgtggccattgatgccctgcacttccgccgctacctggaccagtttgtgcctgagaagatgaggcgggagctgaacaaggcctactgcggcttcctgcggcctggggtgtcctctgagaacctgtctgctgtggccactggaaactggggctgtggggcctttggaggagatgcccggctgaaggccctgatccagatcctggccgctgctgctgctgagagagatgtggtgtacttcaccttcggggacagcgagctgatgagggacatctacagcatgcacatcttcctgacagagaggaagctgactgtgggagatgtgtacaagctgctgctgcgctactacaatgaagaatgtagaaactgcagcaccccaggccctgacatcaagctgtaccccttcatctaccacgctgtggagagctgtgccgagacagctgaccacagcggccagaggacaggcacctag

SEQ ID NO: 336317 - DNA, 579 bp, Artificial Sequence
  derived and/or modified sequence
tgaaccgagcagtacagcgagtacaccggctacgccgagacctaccgctggtccagaagccacgaagatggcagcgagagagacgactggcagcgcaggtgcacagagattgtagccatcgatgctctccattttaggaggtatcttgaccagtttgtgccagaaaaaatgagaagagagctcaacaaggcgtattgtggattcctgaggcccggagtcagcagtgagaacctgtccgccgtcgccactggaaattggggttgtggggcttttggcggcgatgctcggcttaaagctttgatccagatcctggctgctgccgccgccgaacgagatgttgtttactttacctttggagactccgaactgatgcgcgacatatactcaatgcacattttcttaaccgagcggaaactgaccgtgggagatgtgtataagctcctgttgcgctattacaatgaagagtgccgcaattgctcaacccccggtccagacatcaaactgtaccccttcatctaccacgccgttgaatcctgtgcggaaaccgcagaccatagcggacagcggactggaacttag

SEQ ID NO: 336318 - DNA, 1639 bp, Artificial Sequence
  derived and/or modified sequence
gtactgagcagtacagtgaatacacaggctatgctgagacatatcgttggtcccggagccacgaagatgggagtgaaagggacgactggcagcggcgctgcactgagatcgttgccatcgatgctcttcacttcagacgctacctcgatcagtttgtgcctgagaaaatgagacgcgagctgaacaaggcttactgtggatttctccgtcctggagtttcttcagagaatctttctgcagtggccacaggaaactggggctgtggtgcctttgggggtgatgccaggttaaaagccttaatacagatattggcagctgctgcagctgagcgagatgtggtttatttcacctttggggactcagaattgatgagagacatttacagcatgcacattttccttactgaaaggaaactcactgttggagatgtgtataagctgttgctacgatactacaatgaagaatgcagaaactgttccacccctggaccagacatcaagctttatccattcatataccatgctgtcgagtcctgtgcagagaccgctgaccattcagggcaaaggacagggacctgaggagccgagcgaatagcatctcctcccacctcccaccagagacgtcctgtttgagctgtcaggtgtaatatatgaattgacttaagttaatataaatgtgtacataatccacatttgtagtcaaggacgcaatctcttccacacatgtgcagttgtcagttggtacatctaaactccctccatcctgactcacgtggacttagatatgttttgtttctattttcttctatttcagtttttcattctttgatgtttatttcttttgtccatcagatctcttgtgaaatcccatggaaggttgtgctcagcctgtcgggtctctttcttcctgcccatatattataccagttgcttctgcagcccgcagatgccagcgatgccaggaaacaagttgaaatccaggaatctctttaactgattttgctaaaaatctccctgtgagccttccactcaactcttaatatgcttgcattgtttaagtttttaaattctgaaaattaataattagggtttttttcatatgtgttgcataatgcaaacctcctaggttaaaatagtttctttatttaagatagaataatttccagaaattgtacttttgaggtatcatttttatctgtaatggtttgtctgtcttttttcctctgatcagtatttttttataccagttttggagactggctgagatgaaaggaaatgtggaataaaaggaggttttcctgatgtggtgtaaagaaaacagattcaagagaattgaagattttttttgtttcttggtacttttttctttttaaattaggactaatgtttcttttgtggtgcttgaggcatattcatataaccaaagtttgagaactgggaacttcatgctgatttgtacatattgaagtttctctggtattcaaaggttatatagtgaatgaattttcattaataaatcactttgtcagaaactcccatatcatctatattttatatatgtatatataaacgtatgctctttaagtgtgtctatatgtgagcacataaaatctaaataaaattggactggtgggaaacaa

SEQ ID NO: 336319 - DNA, 579 bp, Artificial Sequence
  derived and/or modified sequence
tgaaccgagcagtattctgaatacacagggtatgctgagacatacaggtggagcaggagccacgaggatgggtcagaacgagatgactggcaacgacgttgcacggagatcgtagctattgatgcactccattttaggcggtacctcgaccagtttgtaccagagaagatgcgaagggaattgaacaaggcttattgcgggttcttaaggcctggagtctcgagcgagaatctgagcgccgtggctacgggcaattggggctgtggcgcttttgggggagatgccagattaaaagcacttatccagattctcgccgcagcagccgcagaaagagatgttgtgtactttacctttggggacagcgagctcatgcgtgatatctatagcatgcatatcttcttgactgagcgcaaactgaccgtcggagatgtctacaagctgttgctgcggtactacaacgaagaatgccgtaactgcagcacccccggtccagacataaagctttatcccttcatttaccatgccgtggagtcttgcgcagagaccgctgaccactccggccagagaactggcacttag

SEQ ID NO: 336320 - DNA, 579 bp, Artificial Sequence
  derived and/or modified sequence
tgaaccgagcagtacagcgagtacaccggctacgccgagacctacagatggagcagaagccacgaggacggcagcgagagagacgactggcagagaagatgcaccgagatcgtggccatcgacgccctgcacttcagaagatacctggaccagttcgtgcccgagaagatgagaagagagctgaacaaggcctactgcggcttcctgagacccggcgtgagcagcgagaacctgagcgccgtggccaccggcaactggggctgcggcgccttcggcggcgacgccagactgaaggccctgatccagatcctggccgccgccgccgccgagagagacgtggtgtacttcaccttcggcgacagcgagctgatgagagacatctacagcatgcacatcttcctgaccgagagaaagctgaccgtgggcgacgtgtacaagctgctgctgagatactacaacgaggagtgcagaaactgcagcacccccggccccgacatcaagctgtaccccttcatctaccacgccgtggagagctgcgccgagaccgccgaccacagcggccagagaaccggcacctag

SEQ ID NO: 336321 - protein, 760 aa, Artificial Sequence
  derived and/or modified sequence
MPTLTDNTHGRYVLVIYENLLKYVNLDAWSRELLDRYCVEYGVGIIGFFRAHEHSLLSAQLKGFPLFLHSNLGLRDYQVNPSAPLLHLTRPSRLEPGPLPGDDWTIFQSNHSTYEPVLLASLRPAEPAVPGPVLRRARLPTVVQDLGLHDGIQRVLFGHGLSFWLHKLIFVDAVAYLTGKRLCLDLDRYILVDIDDIFVGKEGTRMKVADVEALLTTQNKLRTLVPNFTFNLGFSGKFYHTGTEEEDAGDDMLLKHRKEFWWFPHMWSHMQPHLFHNRSVLADQMRLNKQFALEHGIPTDLGYAVAPHHSGVYPIHTQLYEAWKSVWGIQVTSTEEYPHLRPARYRRGFIHNGIMVLPRQTCGLFTHTIFYNEYPGGSRELDRSIRGGELFLTVLLNPISIFMTHLSNYGNDRLGLYTFESLVRFLQCWTRLRLQTLPPVPLAQKYFELFPQERSPLWQNPCDDKRHKDIWSKEKTCDRLPKFLIVGPQKTGTTAIHFFLSLHPAVTSSFPSPSTFEEIQFFNSPNYHKGIDWYMDFFPVPSNASTDFLFEKSATYFDSEVVPRRGAALLPRAKIITVLTNPADRAYSWYQHQRAHGDPVALNYTFYQVISASSQTPLALRSLQNRCLVPGYYSTHLQRWLTYYPSGQLLIVDGQELRTNPAASMESIQKFLGITPFLNYTRTLRFDDDKGFWCQGLEGGKTRCLGRSKGRRYPDMDTESRLFLTDFFRNHNLELSKLLSRLGQPVPSWLREELQHSSLG

SEQ ID NO: 336322 - protein, 883 aa, Artificial Sequence
  derived and/or modified sequence
MLQLWKVVRPARQLELHRLILLLIAFSLGSMGFLAYYVSTSPKAKEPLPLPLGDCSSGGAAGPGPARPPVPPRPPRPPETARTEPVVLVFVESAYSQLGQEIVAILESSRFRYSTELAPGRGDMPTLTDNTHGRYVLVIYENLLKYVNLDAWSRELLDRYCVEYGVGIIGFFRAHEHSLLSAQLKGFPLFLHSNLGLRDYQVNPSAPLLHLTRPSRLEPGPLPGDDWTIFQSNHSTYEPVLLASLRPAEPAVPGPVLRRARLPTVVQDLGLHDGIQRVLFGHGLSFWLHKLIFVDAVAYLTGKRLCLDLDRYILVDIDDIFVGKEGTRMKVADVEALLTTQNKLRTLVPNFTFNLGFSGKFYHTGTEEEDAGDDMLLKHRKEFWWFPHMWSHMQPHLFHNRSVLADQMRLNKQFALEHGIPTDLGYAVAPHHSGVYPIHTQLYEAWKSVWGIQVTSTEEYPHLRPARYRRGFIHNGIMVLPRQTCGLFTHTIFYNEYPGGSRELDRSIRGGELFLTVLLNPISIFMTHLSNYGNDRLGLYTFESLVRFLQCWTRLRLQTLPPVPLAQKYFELFPQERSPLWQNPCDDKRHKDIWSKEKTCDRLPKFLIVGPQKTGTTAIHFFLSLHPAVTSSFPSPSTFEEIQFFNSPNYHKGIDWYMDFFPVPSNASTDFLFEKSATYFDSEVVPRRGAALLPRAKIITVLTNPADRAYSWYQHQRAHGDPVALNYTFYQVISASSQTPLALRSLQNRCLVPGYYSTHLQRWLTYYPSGQLLIVDGQELRTNPAASMESIQKFLGITPFLNYTRTLRFDDDKGFWCQGLEGGKTRCLGRSKGRRYPDMDTESRLFLTDFFRNHNLELSKLLSRLGQPVPSWLREELQHSSLG

SEQ ID NO: 336323 - DNA, 2283 bp, Artificial Sequence
  derived and/or modified sequence
atgccaaccttaacagacaatacacatggacggtatgtgttggtcatttacgaaaacctcctgaagtatgtgaacctagatgcatggagtagggaactcctggacaggtattgtgtggagtatggggtcggaataatagggttttttagagcccacgagcattcccttcttagtgcacagttaaaaggatttcccctgttccttcattcaaaccttggtttaagagactaccaggtgaatccttcagctccgctcctccacctcacgcggccctccaggctagagccaggccctttgcccggggacgactggacaatctttcagtccaaccactctacctatgagcccgtgcttctagcctcgctgcggcccgccgagccagctgttcccggtccagttctgcggagagcaaggctgccaacagtggtccaggacctggggcttcatgatggaatccagagagtactctttggacacggtctctccttttggctccacaagctgattttcgtagatgcagttgcctatctaaccggcaaacgtctgtgtctggacctggatcgctatatcctcgtggacatagatgatatttttgtgggaaaagaaggtactcggatgaaggtggctgacgtggaagccctgctgaccacccagaataagctcagaacactcgttcctaactttacctttaacttgggattctccggcaagttctatcatacaggaacagaggaggaagacgccggagatgatatgttgctgaaacacaggaaggaattctggtggtttccacacatgtggtcacatatgcaacctcatctcttccataaccgttcagttctggcggaccaaatgcgcctgaataagcaattcgccctggaacacggcatccctacggatctcgggtatgccgtggccccacaccatagtggggtgtatcccattcacacccagttatatgaagcttggaagtccgtttggggcattcaggtgacctccaccgaagagtatccccacctacgtccagcccgctatcggcgcggcttcatacataatggaatcatggtgctgcctaggcagacgtgtggactttttacacacactattttctacaatgagtatccgggcgggtcccgagagctggataggtctatcaggggcggcgagctgttcctgacggtgctgctcaaccctatttctatctttatgactcatctcagtaactacggcaatgaccgattagggttgtatacattcgagtcactggttagattcctgcaatgctggacccggcttagattacaaaccctgcctccagtgccgctggcgcagaagtacttcgagctgtttccccaggaacggtctcctctttggcagaacccctgtgatgataaaaggcataaggacatctggtcaaaagagaaaacctgcgaccggttaccgaaattcctaatcgtgggccctcagaagacagggaccacagcaatccacttcttcctgtcactccatccagctgtcacttcatcctttccctctcccagcactttcgaagaaatacagtttttcaacagcccgaattaccacaagggcatcgattggtacatggactttttcccagtcccctctaacgcgagtacagacttcctttttgaaaaaagcgccacatattttgattcagaggtggttcctcggcgcggggctgctctgctgccacgagcaaagatcatcactgtcctgacaaaccccgccgatcgcgcctactcttggtaccagcatcagcgggctcacggcgaccccgtggcgttgaattacactttctatcaggtgatatccgcatcctcccagactcccctagccctgcgatccctgcagaaccggtgcctggtcccgggttactattccactcacttgcagcggtggcttacatactatccaagcggtcagctgctcattgtggacggacaggaactgcggaccaaccccgctgcaagcatggaaagtatccagaagtttttagggatcactccgtttctaaattatacacgaactctaagatttgacgacgacaaagggttctggtgccagggtctagaaggggggaaaacacgctgtctgggccgatccaagggtcgccgctacccggacatggacactgaaagccgtctcttcctgaccgatttcttcaggaatcataatttagagctatcaaagctcctttcacgtctgggccaacccgtgccctcatggcttagggaagagctgcagcactcatcactcggatag

SEQ ID NO: 336324 - DNA, 2652 bp, Artificial Sequence
  derived and/or modified sequence
atgctgcaactctggaaggtggtcaggcccgcaaggcaactggagttgcaccgattaatcctgctcctcatcgccttcagcttgggctcgatgggattcttagcctactacgtgagtacctcccctaaagcgaaggagccactgccacttccgttgggggattgttcctccgggggagcagcaggtcctgggcctgctcgcccccccgtgcctccccgcccccctcgacctccagaaacggcaagaaccgagccggtggtcctggtgttcgttgagtcggcctactcccagttgggacaggagatcgtggccatccttgaatcttctcggttccgttacagtacggagctggcacctggacgcggagacatgcccacccttactgataatacacatggcaggtacgtgttagttatctacgagaatcttcttaagtacgtgaacctcgatgcgtggtcccgcgaattactggatcggtactgtgtagaatacggtgtgggcatcattgggtttttcagagcacatgaacatagcctcttgtctgcccagctgaagggcttccccctcttcttacacagtaacctgggcctccgggactatcaagttaacccgtcagcccctctattacacctcacccgacccagcaggctagaacccggacctctcccgggtgatgattggaccatctttcaatcaaatcacagcacatacgagcccgtgttgctcgctagtttgaggcccgccgaaccagcagtgccgggcccggtgctgcgtcgggcaagactgcctaccgtggttcaggacttgggtttgcacgacggcattcagcgtgtcctttttggccacggcttgtccttctggcttcacaagctgatattcgtcgacgctgtcgcttatctaactgggaaaagactgtgcttagacctagatcggtacattctagtggacattgacgacatatttgtggggaaggagggaacccgcatgaaggttgcagatgtggaggcacttctgactacccaaaacaagctcagaacactcgtgcctaattttacatttaatctcggtttctccgggaaattttatcatacagggaccgaagaagaggacgctggcgacgacatgctcctgaagcacaggaaagagttttggtggtttccgcacatgtggtcccatatgcagcctcatctatttcacaatcgctctgtgctggccgatcagatgaggctgaataagcaattcgctctggaacacgggatacctaccgatttaggttacgccgtcgctccccatcacagtggagtgtatcctatccacacgcaactctatgaggcctggaaaagcgtctgggggatccaggtcacctccaccgaagagtatccgcatctgcggccagccagatatagaaggggctttatccataatggcattatggtcctgcctcgacagacgtgtgggttgttcacacacaccatcttctacaatgaatatcccgggggctcgcgcgaactcgacaggagtatcagagggggcgagctctttctgacggtcttgctgaaccctatcagcatcttcatgacccatctgtctaattacggaaatgaccgactcgggttgtacacatttgaatcactggtcaggtttctgcagtgttggaccagactccggctgcagacacttccccccgtgcccctggcacagaaatatttcgagttatttccccaggagcgatcaccgctatggcagaatccgtgtgacgataaacggcataaggatatttggtctaaggagaagacctgcgaccggctcccaaagttcctgatcgtgggaccccagaagactgggacaaccgctatccacttctttcttagtttgcaccctgccgtaacgagttccttcccatcaccttctactttcgaagagatacagttctttaactctccaaactaccacaaaggaattgattggtatatggatttttttcccgtcccctcaaacgcaagcaccgattttttgttcgagaaaagtgcaacttacttcgactcagaggtagtgcctcgccggggcgcagcgttgctcccgagggccaagatcattaccgttctgactaacccagcagatagggcgtactcttggtaccaacaccaacgggcgcacggtgatcccgtcgccctcaattacaccttctatcaggttattagcgcttcctctcaaacccctctcgcactgaggagcttgcagaaccggtgcctcgtgcccggctattacagtactcaccttcagcgctggcttacctattacccctccggccagctgttgattgtagatgggcaggagctgcgcacaaatccggccgcgtcaatggagtctatccagaaatttctgggtatcacgccctttctgaactacacccgtacactgaggttcgacgacgataaaggtttctggtgtcagggactggaaggtggaaagactcgatgcctgggccgctcaaaaggcagacggtaccccgatatggacactgagtctcgcctcttcctcactgatttcttccgaaatcataacttggaactgtccaaactcctgtccagactgggccagcctgtgcccagttggctgcgtgaggagttacagcattccagcctcggctag

SEQ ID NO: 336325 - DNA, 2283 bp, Artificial Sequence
  derived and/or modified sequence
atgcccaccctgacagacaacacccacggccgctacgtgctggtgatctatgagaacctgctgaagtatgtgaacctggatgcctggagccgggagctgctggaccgctactgtgtggagtatggagtgggcatcatcggcttcttccgggcccacgagcacagcctgctgagcgcccagctgaagggcttccccctcttcctgcacagcaacctgggcctgcgggactaccaggtgaaccccagcgcccccctgctgcacctgacccggcccagccggctggagcccggccccctgcctggagatgactggaccatcttccagagcaaccacagcacctatgagcctgtgctgctggccagcctgcggcctgctgagcctgctgtgcccggccctgtgctgcggcgggcccggctgcccaccgtggtgcaggacctgggcctgcatgatggcatccagagggtgctgtttggacatggcctgtccttctggctgcacaagctgatctttgtggatgctgtggcctacctgaccgggaagaggctgtgcctggacctggaccgctacatcctggtggacattgatgacatctttgtgggcaaggagggcaccaggatgaaggtggctgatgtggaggccctgctgaccacccagaacaagctgcggaccctggtgcccaacttcaccttcaacctgggcttcagcggcaagttctaccacactggaacagaggaggaggatgctggagatgacatgctgctgaagcacaggaaggagttctggtggttcccccacatgtggagccacatgcagccccacctgttccacaacagatctgtgctggccgaccagatgaggctgaacaagcagtttgccctggagcacggcatccccacagacctgggctatgctgtggccccccaccacagcggcgtgtaccccatccacacccagctgtatgaggcctggaagtctgtgtggggcatccaggtgaccagcacagaggagtacccccacctgcggcctgcccgctaccgccggggcttcatccacaacggcatcatggtgctgccccggcagacctgtggcctcttcacccacaccatcttctacaatgagtacccaggcggcagccgggagctggacaggagcatccggggcggggagctgttcctgactgtgctgctgaaccccatcagcatcttcatgacccacctgagcaactatggaaatgaccggctgggcctgtacacctttgagagcctggtgcgcttcctgcagtgctggacccggctgcggctgcagaccctgccccctgtgcccctggcccagaagtactttgagctgttcccccaggagaggagccccctgtggcagaacccctgtgatgacaagaggcacaaggacatctggagcaaggagaagacctgtgaccggctgcccaagttcctgattgtgggcccccagaagacaggcaccacagccatccacttcttcctgagcctgcaccctgctgtgaccagcagcttccccagccccagcacctttgaggagatccagttcttcaacagccccaactaccacaagggcatcgactggtacatggacttcttccctgtgcccagcaatgccagcacagacttcctgtttgagaagagcgccacctactttgattctgaggtggtgcccaggagaggagctgccctgctgccccgggccaagatcatcaccgtgctgaccaacccagctgaccgggcctacagctggtaccagcaccagagggcccacggggaccctgtggccctgaactacaccttctaccaggtgatcagcgccagcagccagacccccctggccctgcggagcctgcagaaccgctgcctggtgcccggctactacagcacccacctgcagcgctggctgacctactaccccagcggccagctgctgattgtggatggccaggagctgcggaccaacccagctgcctccatggagagcatccagaagttcctgggcatcacccccttcctgaactacaccaggaccctgcgctttgatgatgacaagggcttctggtgccagggcctggagggcggcaagacccgctgcctgggccgcagcaaaggaagacgctacccagacatggacacagagagccgcctcttcctgacagacttcttcaggaaccacaacctggagctgagcaagctgctgagccggctgggccagcctgtgcccagctggctgcgggaggagctgcagcacagcagcctgggctag

SEQ ID NO: 336326 - DNA, 2652 bp, Artificial Sequence
  derived and/or modified sequence
atgctgcagctgtggaaggtggtgcggcctgcccggcagctggagctgcacaggctcatcctgctgctgattgccttcagcctgggctccatgggcttcctggcctactacgtgtccaccagccccaaggccaaggagcccctgcccctgcccctgggggactgcagcagtggaggagctgctggccctggccctgcccggccccctgtgcccccccggccccccaggcctcctgagacagccaggacagagcctgtggtgctggtgtttgtggagagcgcctacagccagctgggccaggagatcgtggccatcctggagagcagccgcttccgctacagcacagagctggcccctggccgcggggacatgcccaccctgacagacaacacccacggccgctacgtgctggtgatctatgagaacctgctgaagtatgtgaacctggatgcctggagccgggagctgctggaccgctactgtgtggagtatggagtgggcatcatcggcttcttccgggcccacgagcacagcctgctgagcgcccagctgaagggcttccccctcttcctgcacagcaacctgggcctgcgggactaccaggtgaaccccagcgcccccctgctgcacctgacccggcccagccggctggagcccggccccctgcctggagatgactggaccatcttccagagcaaccacagcacctatgagcctgtgctgctggccagcctgcggcctgctgagcctgctgtgcccggccctgtgctgcggcgggcccggctgcccaccgtggtgcaggacctgggcctgcatgatggcatccagagggtgctgtttggccacggcctgtccttctggctgcacaagctgatctttgtggatgctgtggcctacctgaccgggaagaggctgtgcctggacctggaccgctacatcctggtggacattgatgacatctttgtgggcaaggagggcaccaggatgaaggtggctgatgtggaggccctgctgaccacccagaacaagctgcggaccctggtgcccaacttcaccttcaacctgggcttcagcggcaagttctaccacactggaacagaggaggaggatgctggagatgacatgctgctgaagcacaggaaggagttctggtggttcccccacatgtggagccacatgcagccccacctgttccacaacagatctgtgctggccgaccagatgaggctgaacaagcagtttgccctggagcacggcatccccacagacctgggctatgctgtggccccccaccacagcggcgtgtaccccatccacacccagctgtatgaggcctggaagtctgtgtggggcatccaggtgaccagcacagaggagtacccccacctgcggcctgcccgctacagaagaggcttcatccacaacggcatcatggtgctgccccggcagacctgtggcctcttcacccacaccatcttctacaatgagtacccaggcggcagccgggagctggacaggagcatccggggcggggagctgttcctgactgtgctgctgaaccccatcagcatcttcatgacccacctgagcaactatggaaatgaccggctgggcctgtacacctttgagagcctggtgcgcttcctgcagtgctggacccggctgcggctgcagaccctgccccctgtgcccctggcccagaagtactttgagctgttcccccaggagaggagccccctgtggcagaacccctgtgatgacaagaggcacaaggacatctggagcaaggagaagacctgtgaccggctgcccaagttcctgattgtgggcccccagaagacaggcaccacagccatccacttcttcctgagcctgcaccctgctgtgaccagcagcttccccagccccagcacctttgaggagatccagttcttcaacagccccaactaccacaagggcatcgactggtacatggacttcttccctgtgcccagcaatgccagcacagacttcctgtttgagaagagcgccacctactttgacagcgaggtggtgcccaggagaggagctgccctgctgccccgggccaagatcatcaccgtgctgaccaacccagctgaccgggcctacagctggtaccagcaccagagggcccatggagaccctgtggccctgaactacaccttctaccaggtgatcagcgccagcagccagacccccctggccctgcggagcctgcagaaccgctgcctggtgcccggctactacagcacccacctgcagcgctggctgacctactaccccagcggccagctgctgattgtggatggccaggagctgcggaccaacccagctgcctccatggagagcatccagaagttcctgggcatcacccccttcctgaactacaccaggaccctgcgctttgatgatgacaagggcttctggtgccagggcctggagggcggcaagacccgctgcctgggccgcagcaagggccgccgctacccagacatggacacagagagccgcctcttcctgacagacttcttcaggaaccacaacctggagctgagcaagctgctgagccggctgggccagcctgtgcccagctggctgcgggaggagctgcagcacagcagcctgggctag

SEQ ID NO: 336327 - DNA, 3789 bp, Artificial Sequence
  derived and/or modified sequence
gctcggccggcagtgccatcgcgcggagaggagggggtgcgcttccgcgggcggggcgcggagcccgccgtctcggaggccgcggctcggcccggcactgcggagggccgcttgatttcccggaacccaggtcgcgcggctgctagggccggagccggtggatccgagcgggtgccaccagcggcggcgcgccgcctcccccggtgggagcggtggttgggccaggctgcggcagagcgttcgctcggagatggcggagcagccgcgacgcggcccgtggccccgaaagcagggaagccgggcagccccgggacgcggcggagcccggggacagcggggacgccgcccagtcctccgggtatgaagctaaaatgcagcggctaagaacgcggctctggagcttgacaggcctgacgtcgaatcccagccctcccaccaactgagctgtgtgatcctgggcaaggtagaggggaagagattgaactttgctgacctttgatgtgaggcgctcagccagggccaaggggagagcctggcaagatttgcagcctgaagccatgggccagggggccatggtgacctgagacaagtggactctgtatagttgccccctgcttccccttctacctcccctaccctatgctaaggggactcgtctccacctcgtaaaggaaactccccaagggaatccctgtcccctattttcctatccttctacccttccaagacagtcctagcctatagaactcctacctcccatcccctgaggtggtccccattcctccctcccttcctccccccgccatgctccagttgtggaaggtggtacgcccagctcgacagctcgaactgaacccgtggtccttgtgtttgtggagagtgcatactcacagctggggcaggaaattgtggccatcctggagtctagtcgttttcgttatagcactgagttggcacctggccgaggggacatgcccacattgactgataatacccatggccgctatgtcttggtcatttatgagaacctgctcaagtatgtcaacctggatgcctggagtcgggaactgctagaccggtactgcgtggagtatggtgtgggcatcattggctttttccgagcccacgagcacagcctactgagcgcccagctcaagggctttcccctttttttacactcaaacttggggctccgggactaccaagtgaatccttctgccccgctactgcatctcacacgccccagccgcctagaaccagggccactgcctggtgatgactggaccatcttccaatccaatcatagtacatatgaaccagtgcttcttgccagccttcggccagctgagcccgcagtgccaggaccagttcttcgtcgggcccggcttcccactgtggtacaggacctggggcttcatgatggcatccagcgggtgctctttggacatggcctttccttctggctccacaaacttatcttcgttgatgctgttgcatacctcactggcaagcgcctctgcctggaccttgaccgctacatcttggtagacatcgatgacatctttgtgggcaaggaagggacccgcatgaaggtggctgatgttgaggctctgttgaccacccagaacaaactcaggaccttagttcccaacttcaccttcaacttgggcttctcgggcaagttctatcatactgggacagaggaggaggatgcaggggacgacatgctgctgaagcaccgcaaagagttctggtggttcccccacatgtggagccacatgcagccacacctgttccacaatcgctccgtgctggctgaccagatgaggctcaacaaacagtttgctctggagcatgggattcccacggacctggggtatgctgtggccccccaccactcgggtgtgtaccccatccacacgcagctctatgaggcctggaaatccgtgtggggcatccaggtgaccagcactgaggagtatccccatctccgccctgcccgctaccgccgtggcttcattcacaatggcattatggtgctgccccggcagacatgtggcctcttcactcacacaatcttctataatgagtatcctggaggctctcgtgaactagaccggagcatccgaggtggagagctctttctgacagtgctgcttaatccgatcagcatctttatgacccatctgtccaattatggaaatgaccggctgggcctatacacctttgagagcttggtgcgcttcctccagtgttggacacggctgcgcctacagacccttcctcctgtcccacttgcacagaagtactttgaacttttccctcaggagcgaagccccctttggcagaatccctgtgatgacaagaggcacaaagatatctggtccaaggagaaaacctgtgatcgtctcccgaagttcctcattgtgggaccccagaaaacagggactacagctattcacttcttcctgagcctgcacccagctgtaactagcagcttccctagccccagcacatttgaggagattcagttcttcaacagccctaattaccacaagggtattgactggtacatggatttcttccctgttccttccaatgccagcactgatttcctatttgaaaaaagtgccacctactttgactctgaagttgtaccacggcggggggctgccctcctgccacgagccaagatcatcacagtgctcaccaaccctgctgacagggcctactcctggtaccagcatcagcgagcccatggagacccagttgctctgaactataccttctatcaggtgatttcagcctcctcccagacccctctggcactacgctccctgcagaaccgctgtcttgtccctggctactattctacccatctacaacgctggctgacttactacccctctggacagttgctgattgtggatgggcaagagctgcgtaccaacccagcagcctcaatggagagcatccagaagttcctgggtatcacaccctttctgaactacacacggaccctcaggtttgatgatgataagggattttggtgccagggacttgaaggtggtaagactcgctgtctaggccggagcaaaggccggaggtatccagatatggacactgagtcccgtcttttccttacggattttttccggaaccataatttggagttgtcgaagctgctgagccggcttggacagccagtgccctcgtggcttcgggaagaactgcagcattccagtctgggctgatgtcccagcctcccataccagcaaaatgccccctgcttccctaaggggcaggtccagagcagggcccacaagggggattagagtggcctggcccctccccctctacctcagtagcccccaggcctgagatggctgagaagggaagggtatccttttcccacagttctgggacaaataaaggggcttcctttggtaccccacataatagtgctaggtacctttgacccatcatcttgggaggtggggaggaatgagagggtccaggcagggtgtaggggaatgtattagtccaatgagatttccctcttcatccgcagcagtgtatctattctatacctggctatgggagagaccccttgcatgggagggaccccttgctatggcccctttagccaggcagtgggatctacctgtggcccggcctccctaatgtcattcacattgaatggggatgaggtcggacagtggctcatagagccgagtatgagccctagctgtgggctagaaatgtccttaataaacatccttatttttc

SEQ ID NO: 336328 - DNA, 3749 bp, Artificial Sequence
  derived and/or modified sequence
gagatggcggagcagccgcgacgcggcccgtggccccgaaagcagggaagccgggcagccccgggacgcggcggagcccggggacagcggggacgccgcccagtcctccgggtatgaagctaaaatgcagcggctaagaacgcggctctggagcttgacaggcctgacgtcgaatcccagccctcccaccaactgagctgtgtgatcctgggcaaggtagaggggaagagattgaactttgctgacctttgatgtgaggcgctcagccagggccaaggggagagcctggcaagatttgcagcctgaagccatgggccagggggccatggtgacctgagacaagtggactctgtatagttgccccctgcttccccttctacctcccctaccctatgctaaggggactcgtctccacctcgtaaaggaaactccccaagggaatccctgtcccctattttcctatccttctacccttccaagacagtcctagcctatagaactcctacctcccatcccctgaggtggtccccattcctccctcccttcctccccccgccatgctccagttgtggaaggtggtacgcccagctcggcagctggaactgcaccgcctcatactgctgctgatcgctttcagcctgggctccatgggcttcctggcttattatgtgtccaccagccctaaggccaaggaacccttgcccctgcccttgggagactgcagcagcggtggggcagctggtcctggccctgcacggcctccagttccacctcggccccccaggcctccagagacagctcgaactgaacccgtggtccttgtgtttgtggagagtgcatactcacagctggggcaggaaattgtggccatcctggagtctagtcgttttcgttatagcactgagttggcacctggccgaggggacatgcccacattgactgataatacccatggccgctatgtcttggtcatttatgagaacctgctcaagtatgtcaacctggatgcctggagtcgggaactgctagaccggtactgcgtggagtatggtgtgggcatcattggctttttccgagcccacgagcacagcctactgagcgcccagctcaagggctttcccctttttttacactcaaacttggggctccgggactaccaagtgaatccttctgccccgctactgcatctcacacgccccagccgcctagaaccagggccactgcctggtgatgactggaccatcttccaatccaatcatagtacatatgaaccagtgcttcttgccagccttcggccagctgagcccgcagtgccaggaccagttcttcgtcgggcccggcttcccactgtggtacaggacctggggcttcatgatggcatccagcgggtgctctttggacatggcctttccttctggctccacaaacttatcttcgttgatgctgttgcatacctcactggcaagcgcctctgcctggaccttgaccgctacatcttggtagacatcgatgacatctttgtgggcaaggaagggacccgcatgaaggtggctgatgttgaggctctgttgaccacccagaacaaactcaggaccttagttcccaacttcaccttcaacttgggcttctcgggcaagttctatcatactgggacagaggaggaggatgcaggggacgacatgctgctgaagcaccgcaaagagttctggtggttcccccacatgtggagccacatgcagccacacctgttccacaatcgctccgtgctggctgaccagatgaggctcaacaaacagtttgctctggagcatgggattcccacggacctggggtatgctgtggccccccaccactcgggtgtgtaccccatccacacgcagctctatgaggcctggaaatccgtgtggggcatccaggtgaccagcactgaggagtatccccatctccgccctgcccgctaccgccgtggcttcattcacaatggcattatggtgctgccccggcagacatgtggcctcttcactcacacaatcttctataatgagtatcctggaggctctcgtgaactagaccggagcatccgaggtggagagctctttctgacagtgctgcttaatccgatcagcatctttatgacccatctgtccaattatggaaatgaccggctgggcctatacacctttgagagcttggtgcgcttcctccagtgttggacacggctgcgcctacagacccttcctcctgtcccacttgcacagaagtactttgaacttttccctcaggagcgaagccccctttggcagaatccctgtgatgacaagaggcacaaagatatctggtccaaggagaaaacctgtgatcgtctcccgaagttcctcattgtgggaccccagaaaacagggactacagctattcacttcttcctgagcctgcacccagctgtaactagcagcttccctagccccagcacatttgaggagattcagttcttcaacagccctaattaccacaagggtattgactggtacatggatttcttccctgttccttccaatgccagcactgatttcctatttgaaaaaagtgccacctactttgactctgaagttgtaccacggcggggggctgccctcctgccacgagccaagatcatcacagtgctcaccaaccctgctgacagggcctactcctggtaccagcatcagcgagcccatggagacccagttgctctgaactataccttctatcaggtgatttcagcctcctcccagacccctctggcactacgctccctgcagaaccgctgtcttgtccctggctactattctacccatctacaacgctggctgacttactacccctctggacagttgctgattgtggatgggcaagagctgcgtaccaacccagcagcctcaatggagagcatccagaagttcctgggtatcacaccctttctgaactacacacggaccctcaggtttgatgatgataagggattttggtgccagggacttgaaggtggtaagactcgctgtctaggccggagcaaaggccggaggtatccagatatggacactgagtcccgtcttttccttacggattttttccggaaccataatttggagttgtcgaagctgctgagccggcttggacagccagtgccctcgtggcttcgggaagaactgcagcattccagtctgggctgatgtcccagcctcccataccagcaaaatgccccctgcttccctaaggggcaggtccagagcagggcccacaagggggattagagtggcctggcccctccccctctacctcagtagcccccaggcctgagatggctgagaagggaagggtatccttttcccacagttctgggacaaataaaggggcttcctttggtaccccacataatagtgctaggtacctttgacccatcatcttgggaggtggggaggaatgagagggtccaggcagggtgtaggggaatgtattagtccaatgagatttccctcttcatccgcagcagtgtatctattctatacctggctatgggagagaccccttgcatgggagggaccccttgctatggcccctttagccaggcagtgggatctacctgtggcccggcctccctaatgtcattcacattgaatggggatgaggtcggacagtggctcatagagccgagtatgagccctagctgtgggctagaaatgtccttaataaacatccttatttttctgttt

SEQ ID NO: 336329 - DNA, 2283 bp, Artificial Sequence
  derived and/or modified sequence
atgcccaccctgaccgacaacacccacggccggtacgtgctggtgatctacgaaaacctgctgaaatacgtgaaccttgatgcttggtcaagagaactcttggataggtactgcgtagaatatggtgtgggtatcatcgggttctttcgggcccacgagcactccctcctcagcgcgcaattaaaaggatttcccctctttttgcacagtaatctggggctgagggactatcaagtgaacccgtcggcccccctactacacctgacccggccgtcacgccttgagcccggcccgttgcctggagacgactggactatattccagtcaaaccactcaacttatgagcccgtgcttctagcatctctgaggccagcggaaccagcagtgcctggccctgtactccggcgggcgcgtttacccacggtagtgcaggatcttggactgcacgacggcatccaaagggtactgtttggacacggcctttctttctggttgcataaacttatctttgtcgacgcagtggcttacctcacagggaagcggctctgtttggatctggacaggtatattttggtcgatatagacgacatttttgtcggcaaggagggtacaaggatgaaggtagcagatgtggaagccctcctcacgactcagaacaaactgcggactctcgtgcctaacttcaccttcaatttgggattctctggaaagttctaccacaccggtacggaggaagaagacgcgggggacgacatgttgctgaagcatcgaaaagaattttggtggttccctcacatgtggtcacatatgcagccacacctgttccataaccgtagtgttcttgccgatcagatgcggctgaataagcagtttgcactggagcacggtatccccacagatctggggtatgccgttgccccacaccacagcggagtttatcctatccacacacagctttatgaggcttggaagtcagtctggggcatccaggttacatcaactgaggagtacccccacctgcgccctgctagatatcggcgagggtttattcataacgggattatggtcctgcctcgtcagacctgcggcctctttacccacaccattttttacaacgagtaccctggaggatctagagagcttgaccgctcaataagggggggcgaactgtttcttactgtgcttcttaatccaatcagcatctttatgacccatttatccaactacggcaacgatcggctggggctctacacttttgaaagtctcgtgcgcttcctgcaatgctggacaagactccgcttacagacgctacccccggtgcctctggctcagaaatacttcgaactctttccacaagagcgaagccctctgtggcagaacccatgtgatgataagaggcacaaggacatatggagcaaagaaaagacatgtgatagactcccaaaatttttaattgtcgggccccagaaaaccggcaccactgccattcatttcttcctaagtctgcatcccgctgtgacctccagtttcccaagccctagcacattcgaagagatccaattcttcaacagccccaattatcacaaggggattgactggtacatggactttttcccagtaccgagcaacgcttctaccgattttctgtttgaaaagagtgcaacgtatttcgactccgaagtggtccctcgaagaggtgcagccctcctgcccagggctaaaattattaccgtgttgaccaacccagcagaccgggcctactcctggtaccagcaccagagggctcacggggaccccgtcgccctgaattacactttttatcaggtcatttccgcctcatcacagacgcctctcgcattgcggtccctgcaaaaccgctgtctggtacccggatactattctacccatctccaacgctggttgacttattatcccagtgggcagctgctcattgtggatggacaagaactgaggactaatcccgccgcaagtatggagtcaatccagaaattcctgggcattacgccattcctgaattatacccgcacactgaggttcgacgacgacaaagggttctggtgtcaagggctcgagggcggcaaaacccgctgtctgggaagaagcaaaggtcgaagatatcctgatatggatacagagtcacgtctcttcctcactgactttttccggaaccataacctagaactatctaaacttctgtctagacttggtcagcccgttccctcttggctgcgagaagaattgcagcactcatccctaggatag

SEQ ID NO: 336330 - DNA, 2652 bp, Artificial Sequence
  derived and/or modified sequence
atgctgcagctgtggaaggtggtgcggcccgcccggcagctggagctacacaggcttatcctgctgcttattgccttttcactcggtagtatgggctttctggcttattatgtctccacctctcccaaggctaaggagcccttacctctgccactgggcgattgttcatcgggcggcgcggctggcccggggccggctcggcccccggtgcctccccggccgcccagacctccagaaacagccaggacagaacctgttgtgctagtgtttgttgaatctgcatactcacagctcgggcaagagattgtcgctatcctggaatcatccagattcagatactccacagagctggcacccggaagaggggacatgccaactctgactgacaatacacacggcagatacgtgctcgtcatctacgagaatttgttgaagtacgtcaacctcgatgcctggagtagggagttgttggatagatactgcgtggaatacggagtcggaattattggtttttttagggcacatgaacacagcctcctttcagcacagctaaagggctttcctctctttctgcatagcaacctgggtctgcgggattatcaggtgaatccttcagccccgctgctgcatttaaccaggcccagtcggctagaaccaggccctctgccaggagacgactggacaatattccaaagtaaccattcgacttacgagccggtgctgctcgctagcctcaggcccgccgagcctgcagtaccggggcctgtgcttcgacgagcacgtttgcctacagtggtgcaggatctggggctgcatgacggtatccagcgcgtactcttcggacacggcctcagcttctggctgcataagctaatctttgtcgacgccgtggcttacttaactggaaagaggttgtgcctagatctagataggtatattctggtagacattgacgatatcttcgttggcaaagaggggacccgcatgaaggtggcggatgtggaagctctgctcaccacccaaaacaaacttcgcactttggtgcccaactttaccttcaatctggggttctccggcaagttctaccacactggaaccgaagaggaagatgccggcgacgatatgctgcttaaacatcgcaaggaattctggtggtttccacatatgtggagtcatatgcagccccacctgttccataaccgcagtgtgctggccgatcagatgagactcaataagcagtttgctctcgaacatggtatcccaacggacctgggatatgcagttgcaccccatcacagtggtgtatatccgattcatacccagctgtacgaggcatggaagtctgtgtggggcattcaggtcacatctacggaagagtatcctcatctacgacctgcccgttaccgtcggggatttatccataatggcatcatggtgttgccacgacagacctgcggcctattcacacatactatcttttacaacgagtatcctggcgggagccgtgaactggaccgcagcattcgaggcggagaactgtttctgaccgtcttactcaaccccatcagcattttcatgacacacctatcaaattatgggaacgaccgcctcggtctgtataccttcgaatccctggtcaggttccttcagtgttggactcgcctgcgcctacagaccttaccgcccgtgccccttgcccagaagtacttcgagctgttccctcaggagcggtctccactgtggcaaaatccctgcgatgacaagcggcacaaagatatatggagtaaggaaaagacgtgtgaccgactacccaagtttttgatcgtgggacctcagaagaccggcacgaccgctatacattttttcctatccctgcatcccgccgtgacatctagctttccctctcctagcacatttgaggagattcagtttttcaactccccaaactatcacaaaggaatcgactggtatatggatttctttcctgttccttctaatgcttctacagacttcttgtttgagaaatcagccacctatttcgatagcgaagtggtgccccggaggggagctgccttgctccccagggcaaagattataacagtgcttaccaatccggccgaccgagcctatagctggtaccagcaccagagagcccacggcgatcctgtggcactcaattataccttctatcaggttatctcagcgagcagccaaacacctttagcactgagatccctgcagaatagatgcctcgttcccggatactactctacacacctccaaagatggcttacatattacccatctggacaattactcatcgtggacgggcaggagttgcgaaccaaccccgctgcttctatggagagcattcagaaatttctgggaattactccgttcctgaactacactcgcacgctgcgcttcgatgacgacaaggggttttggtgtcaaggtttggagggtggcaaaacacgatgtcttggacgttctaaggggcggcggtacccagatatggacactgaatcgcgcttgttcctgaccgacttttttcggaaccacaacctcgagctgtccaaactgctatcacgacttggacagcctgtgccatcctggttgagggaggagctgcagcattcttctctggggtag

SEQ ID NO: 336331 - DNA, 2283 bp, Artificial Sequence
  derived and/or modified sequence
atgcctactctgacagataatacacacgggcgttatgtgctggtaatctatgagaatctgcttaagtatgtgaacctcgacgcatggagccgggagttgctggacaggtattgcgtcgagtacggggtggggataatcggcttttttcgggctcatgaacatagcttgctctctgcacagctgaaaggctttccactttttttacactccaacctaggactgagagattatcaggtgaaccctagcgctccattactacatctgacccgccctagccgtctggaacctggaccactccctggcgacgactggactatattccaaagtaaccactctacatatgaaccagtcttgctcgccagccttagaccagccgagcctgcagttccgggaccagttctgcggagggctcggttacccacagtggtccaggaccttggtctgcacgatggcattcagagggtgctttttggccacgggttatccttctggctgcataagcttatctttgtcgacgccgtggcttacttgacagggaagcggctgtgcctggatttggatagatatatccttgtggacatcgacgacatcttcgtgggtaaggagggtacccggatgaaagtcgccgacgtcgaagcgctgctgacaacacagaacaagctgagaacactggtcccaaactttacctttaatctggggttctcagggaaattctaccacactggcaccgaagaagaagatgctggcgatgacatgctcttgaagcacagaaaagagttctggtggtttccacacatgtggtctcatatgcagcctcacctgttccataaccgctctgtgctcgctgaccaaatgcgtctgaataaacaatttgcactggagcacgggattccaactgacctcggatacgccgtagcaccacatcacagtggcgtctatcctatccacacccaactttacgaagcatggaagtctgtctggggcattcaagtaaccagcacagaggagtatcctcatctgcggcctgccaggtatcgtcgaggattcatacataacgggataatggtactgccacgccagacctgtggcctgttcacgcacaccatcttttacaacgaatatcccggtggcagccgtgaattagacaggagcatccgaggcggagagctgttcctgaccgtacttttgaacccaatttccatttttatgacccatctgtccaattacggtaacgacaggctcggcctctacacctttgagtccctggtgcggttcttgcaatgctggaccagattgaggctgcagacccttccccctgttcctctagcgcagaagtattttgagctgttcccgcaggaaaggtcgcctctgtggcaaaacccctgcgatgataagagacacaaggacatctggtccaaggagaaaacctgtgataggctccctaagtttctcattgtgggcccacagaagaccggaaccacggccattcatttctttctatccctgcacccagcagtgacatctagtttccctagtcccagtacatttgaggagatacaatttttcaacagcccgaattatcataagggaatcgattggtacatggatttttttcccgtgccaagtaatgcttccaccgacttcctgtttgaaaagtcagccacctacttcgactccgaggtcgtccctaggaggggcgctgcgcttctgcctcgcgctaagattatcaccgtgctcacgaatccagccgatagagcctatagctggtaccaacatcaaagagcccatggagacccagttgcattgaactatactttctaccaggttatcagtgctagctcacagacaccactggccctgcgcagcctgcagaatcgatgtctagtcccagggtactactctacacaccttcagcggtggcttacctattatccatccggccaattattgatcgtggacgggcaggagctgagaacaaacccggcagctagtatggagtccattcaaaaattcctgggaatcacaccatttctgaactacactaggaccttacggttcgacgatgataagggcttctggtgccagggcttggaaggtggtaaaacccgctgtttgggtaggtcaaaagggcgaagataccccgatatggacaccgaatctcgcctgttcctcactgacttcttcagaaaccacaacctggaactttctaagctgctgagtcgactgggtcagcccgtgccttcttggctgcgggaggagctgcagcactctagcctggggtag

SEQ ID NO: 336332 - DNA, 2652 bp, Artificial Sequence
  derived and/or modified sequence
atgctacagctctggaaagttgtgcggcctgctcggcagctggagctgcacaggctgatcctactcctcatcgcattcagcctcggctcaatgggctttctggcttactacgttagtacaagcccaaaggctaaggaacctcttccactgcctctcggggactgtagtagcgggggtgcagctgggccaggacccgcacgtcccccagtgccacctcggcctccaagacctcctgagactgctagaacagagcccgtggtgctggtgttcgtggaaagcgcctattctcagctaggccaggaaattgtcgccatattagaatccagtcggttccgttattccactgagctggcgcctggaagaggggacatgcccactctgacagacaatacccacggcaggtatgttctagttatctacgagaatttactcaagtacgtcaaccttgacgcatggtccagagagctcttggacagatactgtgttgaatacggcgtaggcattatcggatttttcagagcgcacgaacattcactcctgagcgctcagttgaagggattcccactgtttctgcacagtaacctcgggctgcgcgactaccaggttaatcctagtgccccactactccacctcactcggccatctaggctagaacccggaccgcttcctggcgatgattggactatcttccagtccaatcacagtacatacgaaccagtgctgcttgcctctctgcgcccagccgaaccagccgtaccagggcctgtactgcgtagagcccgtttgccgacagtggttcaagatctgggactacatgacgggatccagcgagtcttgttcggacatggactttccttctggctgcacaaacttatttttgttgatgccgtggcatatttaacaggtaaaagactttgcctcgacctggacagatatattcttgtggacatcgacgacattttcgttgggaaggaggggacaagaatgaaggtcgccgatgttgaagctctgctcaccacccagaataaactgaggactctggtgcctaacttcacttttaatttggggttctccggcaaattttaccacactggcactgaggaagaggacgccggagacgacatgttgctaaagcaccgcaaggagttttggtggttccctcatatgtggtctcatatgcagccccatttatttcacaaccgctccgttctcgcagatcagatgagactgaacaagcagttcgctctggagcatgggattcccactgacttaggatatgcagtggcccctcaccatagcggggtgtacccaattcacacacagctgtatgaagcatggaaaagcgtctggggcatccaggtgacatctaccgaagagtacccacatctacgacctgcacgctaccggagaggcttcattcataacgggattatggtactgccccgacagacttgtggactcttcactcataccatcttctacaacgaataccccggtggtagcagagagctcgatagaagtattcgcggaggcgagctttttctgacagtgctgttgaatcctatcagcatctttatgacacacctgagcaactacggcaacgacaggcttggcctatatactttcgagtcgctggtgcgttttctgcagtgttggaccagactgagactccagacgctgccccctgtccccctggcccaaaagtatttcgagctcttcccacaggagagatcccctctgtggcagaatccatgcgacgataaaaggcataaggacatctggtctaaggagaagacctgtgatcgacttcccaagttcttaatagtgggaccacagaaaacaggcacaaccgcgatccacttttttctcagtctgcacccagcggtgacatcctcattccctagcccatctacatttgaagagattcaattctttaatagccccaattaccacaaaggaattgattggtatatggatttctttccagttccctctaatgcttctactgattttttgtttgaaaaatctgcgacctacttcgattcagaggtggtgcctaggagaggcgctgccctgctgccccgtgccaagatcatcactgtgcttacgaaccctgctgatcgtgcatattcttggtatcaacaccagagagctcatggtgatcccgtcgccttgaattataccttttaccaagtcatttcagcctcgtctcagacccctctagctctccgaagtctccagaacagatgtttagtccctggatactattccactcacctgcagaggtggctaacatactacccatctgggcagctactgattgtagacggtcaggaactaagaacaaaccccgcagcttccatggagtccattcagaagttcttgggtatcacgccgttcctaaactacacaagaactctcagattcgatgacgacaaagggttctggtgccagggcctggaagggggaaaaacgcggtgcctggggagatccaagggcagacgataccccgacatggacacagaaagccggctcttcctgactgatttcttcaggaaccacaacctggagttaagcaaattgcttagccggctgggccagccagtcccatcctggctcagggaagagttgcaacacagcagtctggggtag

SEQ ID NO: 336333 - DNA, 2283 bp, Artificial Sequence
  derived and/or modified sequence
atgcccaccctgaccgacaacacccacggcagatacgtgctggtgatctacgagaacctgctgaagtacgtgaacctggacgcctggagcagagagctgctggacagatactgcgtggagtacggcgtgggcatcatcggcttcttcagagcccacgagcacagcctgctgagcgcccagctgaagggcttccccctgttcctgcacagcaacctgggcctgagagactaccaggtgaaccccagcgcccccctgctgcacctgaccagacccagcagactggagcccggccccctgcccggcgacgactggaccatcttccagagcaaccacagcacctacgagcccgtgctgctggccagcctgagacccgccgagcccgccgtgcccggccccgtgctgagaagagccagactgcccaccgtggtgcaggacctgggcctgcacgacggcatccagagagtgctgttcggccacggcctgagcttctggctgcacaagctgatcttcgtggacgccgtggcctacctgaccggcaagagactgtgcctggacctggacagatacatcctggtggacatcgacgacatcttcgtgggcaaggagggcaccagaatgaaggtggccgacgtggaggccctgctgaccacccagaacaagctgagaaccctggtgcccaacttcaccttcaacctgggcttcagcggcaagttctaccacaccggcaccgaggaggaggacgccggcgacgacatgctgctgaagcacagaaaggagttctggtggttcccccacatgtggagccacatgcagccccacctgttccacaacagaagcgtgctggccgaccagatgagactgaacaagcagttcgccctggagcacggcatccccaccgacctgggctacgccgtggccccccaccacagcggcgtgtaccccatccacacccagctgtacgaggcctggaagagcgtgtggggcatccaggtgaccagcaccgaggagtacccccacctgagacccgccagatacagaagaggcttcatccacaacggcatcatggtgctgcccagacagacctgcggcctgttcacccacaccatcttctacaacgagtaccccggcggcagcagagagctggacagaagcatcagaggcggcgagctgttcctgaccgtgctgctgaaccccatcagcatcttcatgacccacctgagcaactacggcaacgacagactgggcctgtacaccttcgagagcctggtgagattcctgcagtgctggaccagactgagactgcagaccctgccccccgtgcccctggcccagaagtacttcgagctgttcccccaggagagaagccccctgtggcagaacccctgcgacgacaagagacacaaggacatctggagcaaggagaagacctgcgacagactgcccaagttcctgatcgtgggcccccagaagaccggcaccaccgccatccacttcttcctgagcctgcaccccgccgtgaccagcagcttccccagccccagcaccttcgaggagatccagttcttcaacagccccaactaccacaagggcatcgactggtacatggacttcttccccgtgcccagcaacgccagcaccgacttcctgttcgagaagagcgccacctacttcgacagcgaggtggtgcccagaagaggcgccgccctgctgcccagagccaagatcatcaccgtgctgaccaaccccgccgacagagcctacagctggtaccagcaccagagagcccacggcgaccccgtggccctgaactacaccttctaccaggtgatcagcgccagcagccagacccccctggccctgagaagcctgcagaacagatgcctggtgcccggctactacagcacccacctgcagagatggctgacctactaccccagcggccagctgctgatcgtggacggccaggagctgagaaccaaccccgccgccagcatggagagcatccagaagttcctgggcatcacccccttcctgaactacaccagaaccctgagattcgacgacgacaagggcttctggtgccagggcctggagggcggcaagaccagatgcctgggcagaagcaagggcagaagataccccgacatggacaccgagagcagactgttcctgaccgacttcttcagaaaccacaacctggagctgagcaagctgctgagcagactgggccagcccgtgcccagctggctgagagaggagctgcagcacagcagcctgggctag

SEQ ID NO: 336334 - DNA, 2652 bp, Artificial Sequence
  derived and/or modified sequence
atgctgcagctgtggaaggtggtgagacccgccagacagctggagctgcacagactgatcctgctgctgatcgccttcagcctgggcagcatgggcttcctggcctactacgtgagcaccagccccaaggccaaggagcccctgcccctgcccctgggcgactgcagcagcggcggcgccgccggccccggccccgccagaccccccgtgccccccagaccccccagaccccccgagaccgccagaaccgagcccgtggtgctggtgttcgtggagagcgcctacagccagctgggccaggagatcgtggccatcctggagagcagcagattcagatacagcaccgagctggcccccggcagaggcgacatgcccaccctgaccgacaacacccacggcagatacgtgctggtgatctacgagaacctgctgaagtacgtgaacctggacgcctggagcagagagctgctggacagatactgcgtggagtacggcgtgggcatcatcggcttcttcagagcccacgagcacagcctgctgagcgcccagctgaagggcttccccctgttcctgcacagcaacctgggcctgagagactaccaggtgaaccccagcgcccccctgctgcacctgaccagacccagcagactggagcccggccccctgcccggcgacgactggaccatcttccagagcaaccacagcacctacgagcccgtgctgctggccagcctgagacccgccgagcccgccgtgcccggccccgtgctgagaagagccagactgcccaccgtggtgcaggacctgggcctgcacgacggcatccagagagtgctgttcggccacggcctgagcttctggctgcacaagctgatcttcgtggacgccgtggcctacctgaccggcaagagactgtgcctggacctggacagatacatcctggtggacatcgacgacatcttcgtgggcaaggagggcaccagaatgaaggtggccgacgtggaggccctgctgaccacccagaacaagctgagaaccctggtgcccaacttcaccttcaacctgggcttcagcggcaagttctaccacaccggcaccgaggaggaggacgccggcgacgacatgctgctgaagcacagaaaggagttctggtggttcccccacatgtggagccacatgcagccccacctgttccacaacagaagcgtgctggccgaccagatgagactgaacaagcagttcgccctggagcacggcatccccaccgacctgggctacgccgtggccccccaccacagcggcgtgtaccccatccacacccagctgtacgaggcctggaagagcgtgtggggcatccaggtgaccagcaccgaggagtacccccacctgagacccgccagatacagaagaggcttcatccacaacggcatcatggtgctgcccagacagacctgcggcctgttcacccacaccatcttctacaacgagtaccccggcggcagcagagagctggacagaagcatcagaggcggcgagctgttcctgaccgtgctgctgaaccccatcagcatcttcatgacccacctgagcaactacggcaacgacagactgggcctgtacaccttcgagagcctggtgagattcctgcagtgctggaccagactgagactgcagaccctgccccccgtgcccctggcccagaagtacttcgagctgttcccccaggagagaagccccctgtggcagaacccctgcgacgacaagagacacaaggacatctggagcaaggagaagacctgcgacagactgcccaagttcctgatcgtgggcccccagaagaccggcaccaccgccatccacttcttcctgagcctgcaccccgccgtgaccagcagcttccccagccccagcaccttcgaggagatccagttcttcaacagccccaactaccacaagggcatcgactggtacatggacttcttccccgtgcccagcaacgccagcaccgacttcctgttcgagaagagcgccacctacttcgacagcgaggtggtgcccagaagaggcgccgccctgctgcccagagccaagatcatcaccgtgctgaccaaccccgccgacagagcctacagctggtaccagcaccagagagcccacggcgaccccgtggccctgaactacaccttctaccaggtgatcagcgccagcagccagacccccctggccctgagaagcctgcagaacagatgcctggtgcccggctactacagcacccacctgcagagatggctgacctactaccccagcggccagctgctgatcgtggacggccaggagctgagaaccaaccccgccgccagcatggagagcatccagaagttcctgggcatcacccccttcctgaactacaccagaaccctgagattcgacgacgacaagggcttctggtgccagggcctggagggcggcaagaccagatgcctgggcagaagcaagggcagaagataccccgacatggacaccgagagcagactgttcctgaccgacttcttcagaaaccacaacctggagctgagcaagctgctgagcagactgggccagcccgtgcccagctggctgagagaggagctgcagcacagcagcctgggctag

SEQ ID NO: 336335 - DNA, 1197 bp, Artificial Sequence
  derived and/or modified sequence
atgtggcttctcctgacaatggcctctctcattagcgtgctagggacaacacatggcctgttcggtaaactgcatcccggatcccctgaagtgaccatgaatatcagccaaatgataacctattgggggtaccctaacgaggagtacgaggtggttaccgaggatgggtacatccttgaagtgaacaggatcccctacggcaaaaagaacagcgggaacacaggccaaaggcccgtggtcttcctgcaacacgggttgttagcgagcgctacaaactggataagcaacctgcctaacaatagtctcgcattcattctggccgacgcaggatatgacgtgtggcttggaaatagtaggggcaatacgtgggccagaaggaacctgtactactctccagactccgtcgagttctgggcattcagttttgatgagatggctaagtacgatctgccagccaccatcgacttcatcgtgaaaaagactggacagaagcagctgcactatgtgggtcattcccagggaactaccatcggattcatcgctttctctacgaacccgagcttggctaaacgcatcaagaccttctatgccttggcacccgtggccacagtgaagtacaccaaatcgctcatcaacaaattgaggttcgtgccgcaaagcctgtttaagtttatctttggcgataagatattttatcctcataatttcttcgaccaattcctggccactgaagtgtgctcgcgcgagatgcttaacctcctttgcagcaatgcactgttcattatctgcggctttgattctaagaactttaacacaagccggctggatgtttacctgtcacacaatcctgccggtacaagtgtccagaatatgtttcactggactcaggccgttaagtccggcaaattccaggcttacgattggggatctcccgtgcagaatcggatgcactacgatcaaagtcaacccccttattataatgtcaccgccatgaacgttcccattgcagtgtggaatggcggaaaagatctgctggccgacccgcaggatgtaggtctgctgctgcccaagctccccaacttgatttatcacaaggaaatcccattctataatcacctggacttcatctgggccatggacgccccacaggaggtctataacgatattgttagtatgatttctgaggacaagaaatag

SEQ ID NO: 336336 - DNA, 1197 bp, Artificial Sequence
  derived and/or modified sequence
atgtggctgttactgactatggccagccttatctccgtgcttggaactacacatggcctgtttggtaagctgcaccccggtagtcccgaagtaaccatgaacattagccaaatgatcacttattgggggtatccaaatgaggagtacgaagtggtgactgaggacggttatatccttgaagtaaaccggattccctacgggaagaaaaattccggcaataccggccagcgccctgtggtgttcctgcagcacggcctgctagcttccgccaccaattggatttccaatcttcctaacaattctctcgcattcatcctggcagacgcaggttacgatgtttggctaggcaactcaagagggaatacatgggcccggaggaacttgtactattctcctgatagcgtggagttttgggccttctcttttgacgaaatggcaaaatacgatctgcctgccaccatagactttatcgtaaaaaagaccggtcagaaacagctgcattacgttggtcattctcaggggactacaatcggcttcatcgctttttcgacaaatccctcactggccaaaagaatcaagaccttttacgcgctcgctcctgtagccaccgtgaaatataccaagtccttgatcaacaaacttcgtttcgtcccacagtcactcttcaagtttatttttggggataagatcttctaccctcacaatttcttcgaccaattcttagccaccgaagtgtgcagtagggaaatgctcaaccttttatgctccaacgccctgtttatcatttgtggttttgacagcaagaactttaatacatcgagactagacgtttacctgtctcataatccagctggcacatcagtccagaacatgtttcattggacccaagccgttaagtcgggaaaattccaggcctacgactggggctcccctgtgcagaaccgtatgcattacgaccagtcccagccaccctattataacgtgaccgcaatgaacgtgcctattgccgtgtggaatgggggaaaagacctgctggcggacccccaggatgtcggactgcttcttcctaaattaccaaaccttatataccataaagaaatccccttttacaaccaccttgacttcatatgggcaatggacgccccccaggaagtgtataatgatatcgtaagtatgattagtgaggataaaaagtag

SEQ ID NO: 336337 - DNA, 1197 bp, Artificial Sequence
  derived and/or modified sequence
atgtggttgctacttaccatggcctccctgatttccgtgctcggaacgacacatgggctattcgggaagcttcaccctggcagccctgaagttacaatgaatatctcgcagatgattacatactggggctatccaaatgaagaatacgaggtggtgactgaagatggctatatcctagaagtgaatcgcatcccctatgggaaaaaaaacagcggaaatacaggccagagacctgtggtgtttttgcagcacggactcttagcctctgcaacaaactggatttctaatctgcctaacaacagcctcgctttcatactggcagatgccggctatgatgtttggttggggaattcaagaggtaacacatgggctcgacgcaacctttattactcgccagactcggtagaattctgggcctttagcttcgatgagatggccaagtacgatctgccagccaccatagactttatagttaagaaaactggacagaaacaattgcactacgtcggacatagtcaggggaccacaataggcttcatagctttcagtaccaacccctccctcgcaaaaagaatcaagacgttttatgctttggctcccgtagccaccgtgaaatataccaagtccttgatcaacaaacttcgtttcgtcccacagtcactcttcaagtttatttttggggataagatcttctaccctcacaatttcttcgaccaattcttagccaccgaagtgtgcagtagggaaatgctcaaccttttatgctccaacgccctgtttatcatttgtggttttgacagcaagaactttaatacatcgagactagacgtttacctgtctcataatccagctggcacatcagtccagaacatgtttcattggacccaagccgttaagtcgggtaaatttcaagcatacgattgggggtcccctgtacagaataggatgcattatgaccagtctcagccaccttattacaatgtgactgctatgaacgtccctattgctgtttggaacggtggcaaggacttattggctgatccgcaggatgtgggactgctgctgccaaaactgccaaatctgatttaccataaagagattcctttctataaccatcttgattttatttgggctatggatgcaccgcaggaggtttataacgatatagtgtcaatgataagcgaagataaaaagtag

SEQ ID NO: 336338 - DNA, 1197 bp, Artificial Sequence
  derived and/or modified sequence
atgtggctgctgctgaccatggccagcctgatcagcgtgctgggcaccacccacggcctgttcggcaagctgcaccccggcagccccgaggtgaccatgaacatcagccagatgatcacctactggggctaccccaacgaggagtacgaggtggtgaccgaggacggctacatcctggaggtgaacagaatcccctacggcaagaagaacagcggcaacaccggccagagacccgtggtgttcctgcagcacggcctgctggccagcgccaccaactggatcagcaacctgcccaacaacagcctggccttcatcctggccgacgccggctacgacgtgtggctgggcaacagcagaggcaacacctgggccagaagaaacctgtactacagccccgacagcgtggagttctgggccttcagcttcgacgagatggccaagtacgacctgcccgccaccatcgacttcatcgtgaagaagaccggccagaagcagctgcactacgtgggccacagccagggcaccaccatcggcttcatcgccttcagcaccaaccccagcctggccaagagaatcaagaccttctacgccctggcccccgtggccaccgtgaagtacaccaagagcctgatcaacaagctgagattcgtgccccagagcctgttcaagttcatcttcggcgacaagatcttctacccccacaacttcttcgaccagttcctggccaccgaggtgtgcagcagagagatgctgaacctgctgtgcagcaacgccctgttcatcatctgcggcttcgacagcaagaacttcaacaccagcagactggacgtgtacctgagccacaaccccgccggcaccagcgtgcagaacatgttccactggacccaggccgtgaagagcggcaagttccaggcctacgactggggcagccccgtgcagaacagaatgcactacgaccagagccagcccccctactacaacgtgaccgccatgaacgtgcccatcgccgtgtggaacggcggcaaggacctgctggccgacccccaggacgtgggcctgctgctgcccaagctgcccaacctgatctaccacaaggagatccccttctacaaccacctggacttcatctgggccatggacgccccccaggaggtgtacaacgacatcgtgagcatgatcagcgaggacaagaagtag

SEQ ID NO: 336339 - DNA, 1197 bp, Artificial Sequence
  derived and/or modified sequence
atgtggcttctcctgactatggcaagcctgatatcggtcttgggtactactcacggtctctttgggaaactacatcccggatccccggaggtcacaatgaacatcagccagatgatcacctactggggttaccctaatgaagaatacgaagtcgtcacggaggatggatacattcttgaggtaaatcggattccctacggcaagaaaaactccggcaacaccggccagcgacccgtagtcttcctgcaacatggcctgttggcttctgcaacgaattggatttccaacctccccaacaacagcctagcatttatactggcagacgctgggtatgacgtgtggctggggaactcgcggggtaatacatgggcaagacggaatttatactacagtcctgatagtgtcgagttctgggccttttcttttgacgagatggccaagtacgatcttcccgccacgatagactttatcgttaaaaagactgggcagaagcagctacactatgtgggccatagtcagggaactaccatcggttttatcgccttctccacaaatcctagtctcgctaagagaatcaaaaccttctacgcccttgcaccagtggctacggtgaagtataccaagagtctcatcaataagcttcggttcgtccctcagtccctcttcaaatttatatttggagataagatcttctatccccataatttcttcgaccagttcttagctaccgaggtctgctccagagagatgctgaaccttctgtgttctaacgccctgtttattatatgcggcttcgactccaaaaactttaatacatctaggctggatgtctacctcagccacaatcccgccggcacgtcagttcaaaacatgtttcactggactcaggcagtaaagagcggtaaattccaggcttacgattggggatcccccgtccagaatcgtatgcattacgaccagagccagcctccctactacaatgtgaccgccatgaacgttcctatagctgtgtggaatggaggcaaagacctgctggcagatcctcaggatgtaggcctgctgttacctaagctgccgaacctcatttaccacaaagagatacctttctataatcatctcgacttcatttgggccatggatgcaccccaagaggtttacaatgatatcgtaagtatgataagcgaggataagaagtag

SEQ ID NO: 336340 - DNA, 1197 bp, Artificial Sequence
  derived and/or modified sequence
atgtggctgctgctgaccatggccagcctcatctctgtgctgggcaccacccacggcctgtttgggaagctgcaccctggcagccctgaggtgaccatgaacatcagccagatgatcacctactggggctacccaaatgaggagtatgaggtggtgacagaagatggctacatcctggaggtgaaccgcatcccctacggcaagaagaacagcggcaacacaggccagaggcctgtggtgttcctgcagcacggcctgctggccagcgccaccaactggatcagcaacctgcccaacaacagcctggccttcatcctggctgatgctggctatgatgtgtggctgggcaacagccggggcaacacctgggcccggaggaacctgtactacagcccagacagcgtggagttctgggccttctcctttgatgagatggccaagtatgacctgcctgccaccatcgacttcatcgtgaagaagacaggccagaagcagctgcactacgtgggccacagccagggcaccaccatcggcttcatcgccttcagcaccaaccccagcctggccaagaggatcaagaccttctacgccctggcccctgtggccaccgtgaagtacaccaagagcctcatcaacaagctgcgctttgtgccccagagcctcttcaagttcatctttggagacaagatcttctacccccacaacttctttgaccagttcctggccacagaggtgtgcagccgggagatgctgaacctgctgtgcagcaatgccctcttcatcatctgtggctttgacagcaagaacttcaacaccagccggctggatgtgtacctgagccacaacccagctggcacctctgtgcagaacatgttccactggacccaggccgtgaagagcggcaagttccaggcctatgactggggcagccctgtgcagaacaggatgcactatgaccagagccagcccccctactacaacgtgacagccatgaatgtgcccatcgctgtgtggaatggaggcaaggacctgctggccgacccccaggatgtgggcctgctgctgcccaagctgcccaacctgatctaccacaaggagatccccttctacaaccacctggacttcatctgggccatggatgccccccaggaggtgtacaatgacatcgtgtccatgatcagcgaggacaagaagtag

SEQ ID NO: 336341 - DNA, 1197 bp, Artificial Sequence
  derived and/or modified sequence
atgtggctgctgctgaccatggccagcctgatcagcgtgctgggcacaactcatggtctgtttggaaagctgcatcccggctctcctgaagtgacaatgaacatatcccaaatgatcacctactggggctaccccaatgaagagtatgaagttgtcaccgaggatggatacatcctggaagtaaataggatcccatacggcaagaagaactcgggcaataccgggcaaagacccgtcgtgttcttacagcacggcttgctggcttctgcgaccaactggatttctaacctccctaacaatagccttgcatttatacttgccgatgctggctatgatgtgtggctgggcaattccaggggaaatacctgggcaaggagaaacttatattacagccctgatagtgttgaattctgggcatttagcttcgacgaaatggccaagtatgatttgcctgcaacaattgacttcattgtgaaaaagaccggacagaagcagttgcattacgtgggacacagccaaggcaccaccataggcttcatcgccttctctactaatccaagtctagctaaacggatcaaaacgttctatgctctggcacctgtggcaaccgtgaagtacaccaaatccctgattaataaactgcgcttcgtgcctcaatctttattcaaatttatcttcggcgacaagatcttttatccccacaatttctttgatcagttcctggccactgaagtctgtagtcgagaaatgctcaatctcctttgcagtaatgccctgttcattatctgtgggtttgactccaaaaactttaataccagccgattagacgtttacctgtcacataaccccgctggcacctccgtccagaatatgtttcattggacccaggctgtgaagtctgggaaatttcaagcttacgattggggatcgcctgtccaaaacaggatgcattacgaccagagccaacctccatattataatgtcaccgccatgaatgtgcccatcgccgtgtggaatggaggaaaggatctcctggctgacccacaggacgtggggctccttctgcctaagctgccaaacctgatctatcataaggagatccctttttacaaccacttagactttatttgggccatggacgccccacaggaggtttacaatgatatcgtgagcatgatttcagaggacaaaaagtag

SEQ ID NO: 336342 - RNA, 1197 nt, Artificial Sequence
  derived and/or modified sequence
auguggcuguuacugacuauggccagccuuaucuccgugcuuggaacuacacauggccuguuugguaagcugcaccccgguagucccgaaguaaccaugaacauuagccaaaugaucacuuauuggggguauccaaaugaggaguacgaaguggugacugaggacgguuauauccuugaaguaaaccggauucccuacgggaagaaaaauuccggcaauaccggccagcgcccugugguguuccugcagcacggccugcuagcuuccgccaccaauuggauuuccaaucuuccuaacaauucucucgcauucauccuggcagacgcagguuacgauguuuggcuaggcaacucaagagggaauacaugggcccggaggaacuuguacuauucuccugauagcguggaguuuugggccuucucuuuugacgaaauggcaaaauacgaucugccugccaccauagacuuuaucguaaaaaagaccggucagaaacagcugcauuacguuggucauucucaggggacuacaaucggcuucaucgcuuuuucgacaaaucccucacuggccaaaagaaucaagaccuuuuacgcgcucgcuccuguagccaccgugaaauauaccaaguccuugaucaacaaacuucguuucgucccacagucacucuucaaguuuauuuuuggggauaagaucuucuacccucacaauuucuucgaccaauucuuagccaccgaagugugcaguagggaaaugcucaaccuuuuaugcuccaacgcccuguuuaucauuugugguuuugacagcaagaacuuuaauacaucgagacuagacguuuaccugucucauaauccagcuggcacaucaguccagaacauguuucauuggacccaagccguuaagucgggaaaauuccaggccuacgacuggggcuccccugugcagaaccguaugcauuacgaccagucccagccacccuauuauaacgugaccgcaaugaacgugccuauugccguguggaaugggggaaaagaccugcuggcggacccccaggaugucggacugcuucuuccuaaauuaccaaaccuuauauaccauaaagaaauccccuuuuacaaccaccuugacuucauaugggcaauggacgccccccaggaaguguauaaugauaucguaaguaugauuagugaggauaaaaaguag

SEQ ID NO: 336343 - RNA, 1197 nt, Artificial Sequence
  derived and/or modified sequence
augugguugcuacuuaccauggccucccugauuuccgugcucggaacgacacaugggcuauucgggaagcuucacccuggcagcccugaaguuacaaugaauaucucgcagaugauuacauacuggggcuauccaaaugaagaauacgagguggugacugaagauggcuauauccuagaagugaaucgcauccccuaugggaaaaaaaacagcggaaauacaggccagagaccugugguguuuuugcagcacggacucuuagccucugcaacaaacuggauuucuaaucugccuaacaacagccucgcuuucauacuggcagaugccggcuaugauguuugguuggggaauucaagagguaacacaugggcucgacgcaaccuuuauuacucgccagacucgguagaauucugggccuuuagcuucgaugagauggccaaguacgaucugccagccaccauagacuuuauaguuaagaaaacuggacagaaacaauugcacuacgucggacauagucaggggaccacaauaggcuucauagcuuucaguaccaaccccucccucgcaaaaagaaucaagacguuuuaugcuuuggcucccguagccaccgugaaauauaccaaguccuugaucaacaaacuucguuucgucccacagucacucuucaaguuuauuuuuggggauaagaucuucuacccucacaauuucuucgaccaauucuuagccaccgaagugugcaguagggaaaugcucaaccuuuuaugcuccaacgcccuguuuaucauuugugguuuugacagcaagaacuuuaauacaucgagacuagacguuuaccugucucauaauccagcuggcacaucaguccagaacauguuucauuggacccaagccguuaagucggguaaauuucaagcauacgauuggggguccccuguacagaauaggaugcauuaugaccagucucagccaccuuauuacaaugugacugcuaugaacgucccuauugcuguuuggaacgguggcaaggacuuauuggcugauccgcaggaugugggacugcugcugccaaaacugccaaaucugauuuaccauaaagagauuccuuucuauaaccaucuugauuuuauuugggcuauggaugcaccgcaggagguuuauaacgauauagugucaaugauaagcgaagauaaaaaguag

SEQ ID NO: 336344 - protein, 202 aa, Artificial Sequence
  derived and/or modified sequence
ILEVYSTKAKNYVNGHCTKYEPWQLIAWSVVWTLLIVWGYEFVFQPESLWSRFKKKCFKLTRKMPIIGRKIQDKLNKTKDDISKNMSFLKVDKEYVKALPSQGLSSSAVLEKLKEYSSMDAFWQEGRASGTVYSGEEKLTELLVKAYGDFAWSNPLHPDIFPGLRKIEAEIVRIACSLFNGGPDSCGCEALFLFCFSNMLAP

SEQ ID NO: 336345 - protein, 568 aa, Artificial Sequence
  derived and/or modified sequence
MPSTDLLMLKAFEPYLEILEVYSTKAKNYVNGHCTKYEPWQLIAWSVVWTLLIVWGYEFVFQPESLWSRFKKKCFKLTRKMPIIGRKIQDKLNKTKDDISKNMSFLKVDKEYVKALPSQGLSSSAVLEKLKEYSSMDAFWQEGRASGTVYSGEEKLTELLVKAYGDFAWSNPLHPDIFPGLRKIEAEIVRIACSLFNGGPDSCGCVTSGGTESILMACKAYRDLAFEKGIKTPEIVAPQSAHAAFNKAASYFGMKIVRVPLTKMMEVDVRAMRRAISRNTAMLVCSTPQFPHGVIDPVPEVAKLAVKYKIPLHVDACLGGFLIVFMEKAGYPLEHPFDFRVKGVTSISADTHKYGYAPKGSSLVLYSDKKYRNYQFFVDTDWQGGIYASPTIAGSRPGGISAACWAALMHFGENGYVEATKQIIKTARFLKSELENIKGIFVFGNPQLSVIALGSRDFDIYRLSNLMTAKGWNLNQLQFPPSIHFCITLLHARKRVAIQFLKDIRESVTQIMKNPKAKTTGMGAIYGMAQTTVDRNMVAELSSVFLDSLYSTDTVTQGSQMNGSPKPH

SEQ ID NO: 336346 - DNA, 609 bp, Artificial Sequence
  derived and/or modified sequence
atcctggaggtgtacagcaccaaggccaagaactacgtgaacggccactgcaccaagtacgagccctggcagctgatcgcctggagcgtggtgtggaccctgctgatcgtgtggggctacgagttcgtgttccagcccgagagcctgtggagcagattcaagaagaagtgcttcaagctgaccagaaagatgcccatcatcggcagaaagatccaggacaagctgaacaagaccaaggacgacatcagcaagaacatgagcttcctgaaggtggacaaggagtacgtgaaggccctgcccagccagggcctgagcagcagcgccgtgctggagaagctgaaggagtacagcagcatggacgccttctggcaggagggcagagccagcggcaccgtgtacagcggcgaggagaagctgaccgagctgctggtgaaggcctacggcgacttcgcctggagcaaccccctgcaccccgacatcttccccggcctgagaaagatcgaggccgagatcgtgagaatcgcctgcagcctgttcaacggcggccccgacagctgcggctgcgaggccctgttcctgttctgcttcagcaacatgctggccccctag

SEQ ID NO: 336347 - DNA, 1707 bp, Artificial Sequence
  derived and/or modified sequence
atgcccagcaccgacctgctgatgctgaaggccttcgagccctacctggagatcctggaggtgtacagcaccaaggccaagaactacgtgaacggccactgcaccaagtacgagccctggcagctgatcgcctggagcgtggtgtggaccctgctgatcgtgtggggctacgagttcgtgttccagcccgagagcctgtggagcagattcaagaagaagtgcttcaagctgaccagaaagatgcccatcatcggcagaaagatccaggacaagctgaacaagaccaaggacgacatcagcaagaacatgagcttcctgaaggtggacaaggagtacgtgaaggccctgcccagccagggcctgagcagcagcgccgtgctggagaagctgaaggagtacagcagcatggacgccttctggcaggagggcagagccagcggcaccgtgtacagcggcgaggagaagctgaccgagctgctggtgaaggcctacggcgacttcgcctggagcaaccccctgcaccccgacatcttccccggcctgagaaagatcgaggccgagatcgtgagaatcgcctgcagcctgttcaacggcggccccgacagctgcggctgcgtgaccagcggcggcaccgagagcatcctgatggcctgcaaggcctacagagacctggccttcgagaagggcatcaagacccccgagatcgtggccccccagagcgcccacgccgccttcaacaaggccgccagctacttcggcatgaagatcgtgagagtgcccctgaccaagatgatggaggtggacgtgagagccatgagaagagccatcagcagaaacaccgccatgctggtgtgcagcaccccccagttcccccacggcgtgatcgaccccgtgcccgaggtggccaagctggccgtgaagtacaagatccccctgcacgtggacgcctgcctgggcggcttcctgatcgtgttcatggagaaggccggctaccccctggagcaccccttcgacttcagagtgaagggcgtgaccagcatcagcgccgacacccacaagtacggctacgcccccaagggcagcagcctggtgctgtacagcgacaagaagtacagaaactaccagttcttcgtggacaccgactggcagggcggcatctacgccagccccaccatcgccggcagcagacccggcggcatcagcgccgcctgctgggccgccctgatgcacttcggcgagaacggctacgtggaggccaccaagcagatcatcaagaccgccagattcctgaagagcgagctggagaacatcaagggcatcttcgtgttcggcaacccccagctgagcgtgatcgccctgggcagcagagacttcgacatctacagactgagcaacctgatgaccgccaagggctggaacctgaaccagctgcagttcccccccagcatccacttctgcatcaccctgctgcacgccagaaagagagtggccatccagttcctgaaggacatcagagagagcgtgacccagatcatgaagaaccccaaggccaagaccaccggcatgggcgccatctacggcatggcccagaccaccgtggacagaaacatggtggccgagctgagcagcgtgttcctggacagcctgtacagcaccgacaccgtgacccagggcagccagatgaacggcagccccaagccccactag

SEQ ID NO: 336348 - DNA, 609 bp, Artificial Sequence
  derived and/or modified sequence
atcctggaagtctatagcacgaaggctaagaattacgtcaatggtcattgcaccaagtatgagccttggcaactcattgcatggtccgtggtatggacactccttatcgtatggggctatgaattcgtcttccagcctgaatcactgtggtcccggttcaaaaaaaagtgttttaaactgactagaaaaatgccaattattggccgtaaaatccaggacaagctgaataaaactaaggacgacatttccaagaatatgagctttctcaaggtggataaggagtatgttaaggccctgccctctcaggggcttagcagttccgctgtcttagagaagctgaaagaatatagcagcatggatgccttttggcaggagggccgcgcctccggcacagtgtactcgggcgaagagaaactgacagagctcctggtgaaagcctatggggatttcgcatggtctaatcccttgcacccggatatttttcccggactgcggaaaatagaagccgagattgtgcggattgcttgcagtttgttcaatggaggtccagatagctgcgggtgtgaagctctctttttgttctgtttttccaatatgctcgcgccgtag

SEQ ID NO: 336349 - DNA, 1707 bp, Artificial Sequence
  derived and/or modified sequence
atgcccagtaccgacctgctcatgcttaaggcctttgaaccctacctggaaattctggaagtctactcaaccaaggccaagaattacgtgaacggccattgtacgaaatacgagccgtggcagctcatagcgtggagtgttgtgtggacactgcttattgtttgggggtatgagtttgtatttcagcccgaaagcttgtggtcccgtttcaagaaaaagtgtttcaaattgactaggaagatgcctattatcggccggaagatccaggacaagttaaacaaaacaaaagacgatatttcaaagaacatgtcctttctgaaggtcgacaaagagtatgtgaaggcactccctagccagggccttagttcatccgccgtgctggagaaactgaaagagtattcctcgatggatgccttttggcaggaaggccgcgcatcgggcacggtttacagcggagaggaaaagttaaccgagctgctggtgaaagcatatggtgatttcgcgtggtccaatccacttcaccctgacatcttcccaggcctccgcaagatcgaagctgagatcgttagaatcgcgtgctctctttttaatgggggccccgacagctgtggctgtgtgacaagtggagggaccgagagcatactgatggcatgtaaggcctaccgtgacctggcatttgaaaaggggattaaaacacccgagattgtcgctccccagagtgcacacgctgctttcaataaggctgcatcttatttcggtatgaagatagtgagagtgccattgaccaaaatgatggaagtcgatgtacgcgccatgcggcgcgccatcagtcgcaatactgccatgttggtgtgtagtacaccacaatttccccatggcgttatagatcccgtgccagaggtggctaagctcgcagtgaaatataaaatcccactccatgtggacgcctgtctgggcggtttcttgattgtctttatggagaaggccggctatcctctggagcacccatttgacttcagagtgaaaggagttacctcaatctcagcagacactcataagtacgggtatgctccgaaaggcagcagtctggtgctctacagtgacaagaagtacagaaactaccagttcttcgttgacaccgactggcagggcggaatatacgcttctccaaccatcgcgggttctaggcctgggggtatcagtgcagcctgttgggccgctcttatgcatttcggcgagaatggctatgtggaagccacaaagcagataatcaaaactgcacggttcctaaaatcggagcttgagaacatcaagggcatattcgtttttgggaacccacagctgagtgtcattgcccttggttcccgggactttgatatctatagattaagtaatctgatgactgcaaaaggctggaatctcaatcagctgcaatttcctccttccatccatttctgtattaccttactgcacgcacgcaagcgagtagcaatccaatttctgaaagatatccgggagtccgtgactcaaataatgaagaatccaaaggccaagacgactgggatgggagccatctacggaatggcccagactacagttgataggaacatggtggctgaactgtcctccgtgtttctcgattctctgtactctaccgatacagtcacccagggctcacaaatgaatggcagccctaagccccattag

SEQ ID NO: 336350 - DNA, 609 bp, Artificial Sequence
  derived and/or modified sequence
atcctggaggtgtacagcaccaaggccaagaactacgtgaatggccactgcaccaagtatgagccctggcagctgattgcctggagcgtggtgtggaccctgctgattgtgtggggctatgaatttgtgttccagcctgagagcctgtggagccgcttcaagaagaagtgcttcaagctgaccaggaagatgcccatcattggaaggaagatccaggacaagctgaacaagaccaaggatgacatcagcaagaacatgtccttcctgaaggtggacaaggagtatgtgaaggccctgcccagccagggcctgagcagcagcgctgtgctggagaagctgaaggagtacagctccatggatgccttctggcaggagggccgggccagcggcaccgtgtacagcggggaggagaagctgacagagctgctggtgaaggcctatggagactttgcctggagcaaccccctgcacccagacatcttccctggcctgaggaagattgaagctgagatcgtgcgcatcgcctgcagcctcttcaacggcggccctgacagctgtggctgtgaggccctcttcctgttctgcttcagcaacatgctggccccctag

SEQ ID NO: 336351 - DNA, 1707 bp, Artificial Sequence
  derived and/or modified sequence
atgcccagcacagacctgctgatgctgaaggcctttgagccctacctggagatcctggaggtgtacagcaccaaggccaagaactacgtgaatggccactgcaccaagtatgagccctggcagctgattgcctggagcgtggtgtggaccctgctgattgtgtggggctatgaatttgtgttccagcctgagagcctgtggagccgcttcaagaagaagtgcttcaagctgaccaggaagatgcccatcatcggcaggaagatccaggacaagctgaacaagaccaaggatgacatcagcaagaacatgtccttcctgaaggtggacaaggagtatgtgaaggccctgcccagccagggcctgagcagcagcgctgtgctggagaagctgaaggagtacagctccatggatgccttctggcaggagggccgggccagcggcaccgtgtacagcggggaggagaagctgacagagctgctggtgaaggcctacggggactttgcctggagcaaccccctgcacccagacatcttccctggcctgaggaagattgaggccgagatcgtgagaattgcctgcagcctcttcaatggaggccctgacagctgtggctgtgtgaccagcggcggcacagagagcatcctgatggcctgcaaggcctacagagacctggcctttgagaagggcatcaagaccccagaaattgtggccccccagagcgcccatgctgccttcaacaaggccgccagctacttcggcatgaagatcgtgcgggtgcccctgaccaagatgatggaggtggatgtgcgggccatgagaagagccatcagcaggaacacagccatgctggtgtgcagcaccccccagttcccccacggcgtgattgatcctgtgcctgaggtggccaagctggccgtgaagtacaagatccccctgcacgtggatgcctgcctgggcggcttcctgattgtgttcatggagaaggccggctaccccctggagcacccctttgacttccgggtgaagggcgtgaccagcatctctgctgacacccacaagtatggctacgcccccaagggcagcagcctggtgctgtacagcgacaagaagtacagaaactaccagttctttgtggacacagactggcagggcggcatctatgccagccccaccatcgccggcagcaggcctgggggcatctctgctgcctgctgggccgccctgatgcactttggagaaaatggctacgtggaggccaccaagcagatcatcaagacagcccgcttcctgaagtctgagctggagaacatcaagggcatctttgtgtttggaaacccccagctgtctgtgattgccctgggcagccgggactttgacatctaccgcctgagcaacctgatgacagccaagggctggaacctgaaccagctgcagttcccccccagcatccacttctgcatcaccctgctgcacgccaggaagagggtggccatccagttcctgaaggacatccgggagagcgtgacccagatcatgaagaaccccaaggccaagaccaccggcatgggcgccatctacggcatggcccagaccaccgtggacaggaacatggtggccgagctgagctctgtgttcctggacagcctgtacagcacagacacagtgacccagggcagccagatgaatggcagccccaagccccactag

SEQ ID NO: 336352 - DNA, 609 bp, Artificial Sequence
  derived and/or modified sequence
atcctggaggtgtacagcaccaaggccaagaactacgtgaacggccactgcactaaatacgagccttggcagctcatcgcctggtctgtcgtgtggaccctcctcatcgtgtgggggtacgagttcgtgtttcagcccgaaagtctgtggtctagatttaagaaaaagtgttttaagttgacacggaagatgcccatcatcggccgcaaaattcaggataagcttaataaaacaaaggacgacatcagtaagaacatgtcatttctgaaagtagataaggaatacgtgaaggccctgccctctcagggcctgtcctcctctgccgtgcttgagaaattgaaggaatatagctccatggacgcattctggcaggaaggccgagcctctggtacagtgtactccggggaggaaaaacttacggaacttctggtcaaagcgtacggcgatttcgcctggtccaatccgttacacccagacatcttcccaggactgagaaagattgaggctgagatcgtcagaatcgcctgttccctgttcaacggaggcccagacagttgtggttgcgaggcgctgtttctcttctgttttagtaatatgctcgccccatag

SEQ ID NO: 336353 - DNA, 1707 bp, Artificial Sequence
  derived and/or modified sequence
atgcccagcaccgacctgctgatgctgaaggccttcgagccctacctagaaatcctcgaagtttattcaaccaaagccaagaattatgtcaacgggcattgcactaaatatgagccctggcagctgattgcttggtctgtcgtgtggaccctgctgatcgtatggggctacgagttcgtcttccagcccgagagtctgtggtcccgttttaagaaaaaatgtttcaagttgacaaggaagatgccaatcatcggcagaaaaatccaggacaaactcaataagacaaaagatgatatcagtaaaaatatgagctttttgaaagtcgacaaggaatacgtaaaggctttgccgtcacagggcctcagttcctcagcagtgctggagaaacttaaggagtattcaagcatggatgcgttctggcaggaaggaagagcttctggcaccgtgtattctggggaggagaaactcaccgaactattagtgaaagcatacggagatttcgcgtggagcaaccccttacaccccgatatcttccccggattgcggaaaattgaggccgagatcgtgcggatcgcttgctctcttttcaacgggggaccagatagttgcgggtgcgtcactagcgggggcaccgagtccatcttgatggcatgcaaggcttatcgagacctggcttttgagaagggcataaaaacccctgaaatcgtagcccctcagagcgcgcacgcagcatttaacaaggctgcctcttatttcggcatgaaaatagtacgggtgcctttgacgaaaatgatggaagtagatgtccgcgctatgcgtagagcaatctctagaaacaccgcaatgctggtctgtagtactccacagtttcctcacggcgtgattgaccccgtgcccgaagtggccaagctagcggtgaagtacaaaataccattacacgtggacgcatgtctgggcggtttcttgattgtgtttatggagaaggcgggatacccattggaacatccattcgattttcgagtgaaaggcgttacatcgatttcagccgatacacacaaatatgggtacgccccaaagggaagctcactggtcctttactccgataagaagtaccgcaattaccagttctttgtggacaccgattggcagggtggaatttacgcatctcccaccatagccgggtcacgaccgggggggatctcggcagcctgttgggccgcattaatgcatttcggcgaaaatgggtacgtcgaagcaaccaaacagatcattaagacagccaggttcctaaagagcgagctggagaacatcaaaggcatctttgtgttcgggaatccgcagctgtccgttattgctctcggatccagggacttcgacatttatcgcctttctaaccttatgactgcaaagggctggaatctgaaccaactgcagtttcccccaagtatccacttttgtataacactcctgcacgcacggaagagagtggccattcagttcctgaaagatattagggagtctgtcacccagattatgaaaaacccaaaagccaagactaccggcatgggcgcaatttacgggatggctcaaaccactgttgatcgcaacatggtggcggaactctctagcgtgttcctggacagtttatattccacagatacagtgacccagggatctcagatgaacggctcgcccaagccacattag

SEQ ID NO: 336354 - DNA, 609 bp, Artificial Sequence
  derived and/or modified sequence
atactggaggtttactctactaaggccaagaattatgtcaatggacattgcacaaagtacgagccatggcaactgatcgcgtggagtgttgtgtggacattactgatcgtttggggttatgaattcgtgtttcaaccggaaagcctttggtccagatttaagaagaaatgttttaaactgactcgcaaaatgccaataatcggccgaaagattcaggacaaactcaacaaaaccaaggacgatatctccaagaacatgagcttccttaaggtggacaaagaatacgtcaaggctctgccatctcaaggcctgtcttcttcagcagttttagagaagcttaaggagtactcatcgatggacgccttttggcaggagggtcgcgctagcggcactgtgtattctggggaggagaaactgactgagctgctcgttaaggcctacggggacttcgcatggtctaaccctcttcacccagacattttccctggtctgcggaagatcgaggcagagattgtccgcattgcctgcagtctttttaacggtgggcctgattcgtgtggatgtgaagcactttttctgttctgtttttcaaatatgctagctccctag

SEQ ID NO: 336355 - DNA, 1707 bp, Artificial Sequence
  derived and/or modified sequence
atgccttctacggaccttctcatgctgaaggctttcgagccatatctggagattcttgaagtgtactccacgaaagccaagaactatgtcaacggtcactgtaccaagtatgagccttggcaattgattgcctggagcgtggtgtggaccctcttaatcgtgtggggatatgaatttgtgtttcagccagaatctctgtggagtcgctttaaaaaaaagtgctttaagttgacacgaaagatgccaataatcggacggaagatacaggacaaacttaataaaacaaaagacgacatttcaaagaatatgagctttctgaaggtcgataaagagtacgtcaaggccctgccctctcagggcttatcctcctctgctgttctggagaaacttaaggagtacagcagcatggatgcattctggcaggaaggccgtgcctccgggactgtctactccggagaggagaaactaacagaactccttgtcaaagcttacggagacttcgcctggtctaatcccctgcacccggatatcttccctgggctcaggaaaatcgaagccgagattgtacgcattgcttgcagcttgtttaatggcggacctgattcttgcggatgcgtcacatctgggggaactgagagcatcctgatggcatgcaaggcctaccgtgacctagcttttgagaaggggattaaaacccccgagatagttgctccccagtcagcccatgcggcattcaataaggccgcaagctactttggcatgaagattgtgcgtgtaccccttactaagatgatggaagtcgatgtgcgggcaatgcgtagagccatatccagaaacacagccatgctcgtgtgtagcacgccacagttccctcatggggtgatcgatccggtgcccgaggtcgcgaagcttgccgtgaaatataagatcccactacatgtggatgcttgtctcgggggattcctgattgtgttcatggagaaggccggataccccctcgagcacccgttcgattttcgggtgaagggagtgacctctatctctgccgacacgcataagtacgggtatgctcctaagggatcctctctagtcctgtattccgacaagaagtaccgtaactaccagtttttcgtagacacggattggcaaggcggtatttacgccagtcctacgatagctggatcccgacctggtggtatctccgcagcttgttgggcggcattgatgcactttggcgagaatggttatgtcgaagcaactaagcagattatcaaaactgcccgattcttgaagtcagagctggagaacatcaaaggtatcttcgtgtttggcaacccacagctatcagtgatcgctttggggtcaagagatttcgatatctaccggctcagtaacctgatgactgctaaaggttggaacctgaatcagctacagtttcctccctctattcatttctgcattacactccttcatgcgaggaaaagagtcgcaatacagtttctgaaggacattagagagagtgttacccagattatgaagaacccaaaggccaagacgactggtatgggcgcaatttatgggatggcacagactacagttgaccgcaacatggtggcggaactttcatctgtttttctagacagcctgtatagcacagataccgtcactcagggctctcagatgaacggttcgcctaagccccattag

SEQ ID NO: 336356 - DNA, 658 bp, Artificial Sequence
  derived and/or modified sequence
attttggaagtatactccacaaaagccaagaattatgtaaatggacattgcaccaagtatgagccctggcagctaattgcatggagtgtcgtgtggaccctgctgatagtctggggatatgagtttgtcttccagccagagagtttatggtcaaggtttaaaaagaaatgttttaagctcaccaggaagatgcccattattggtcgtaagattcaagacaagttgaacaagaccaaggatgatattagcaagaacatgtcattcctgaaagtggacaaagagtatgtgaaagctttaccctcccagggtctgagctcatctgctgttttggagaaacttaaggagtacagctctatggacgccttctggcaagaggggagagcctctggaacagtgtacagtggggaggagaagctcactgagctccttgtgaaggcttatggagattttgcatggagtaaccccctgcatccagatatcttcccaggactacgcaagatagaggcagaaatcgtgaggatagcttgttccctgttcaatgggggaccagattcgtgtggatgtgaagcattgtttttgttttgtttttctaatatgttggcgccatgaaaatcatcatgttcaaatattagtagtaataaaggtgatatgcctggca

SEQ ID NO: 336357 - DNA, 5745 bp, Artificial Sequence
  derived and/or modified sequence
gcggctgccgggcctccaatctcggcggcggcggcggcaacaggggagcctgggtctcgcggcctgcgagtccgtcgcgtgctgagggagacgcaggaggtggagccggccgggtgctcgagggaaggagactggaagctggttccggcgtgaggagagtctgaaaaaggggagcgcggagaggaggctggaagaggaagatgcctagcacagaccttctgatgttgaaggcctttgagccctacttagagattttggaagtatactccacaaaagccaagaattatgtaaatggacattgcaccaagtatgagccctggcagctaattgcatggagtgtcgtgtggaccctgctgatagtctggggatatgagtttgtcttccagccagagagtttatggtcaaggtttaaaaagaaatgttttaagctcaccaggaagatgcccattattggtcgtaagattcaagacaagttgaacaagaccaaggatgatattagcaagaacatgtcattcctgaaagtggacaaagagtatgtgaaagctttaccctcccagggtctgagctcatctgctgttttggagaaacttaaggagtacagctctatggacgccttctggcaagaggggagagcctctggaacagtgtacagtggggaggagaagctcactgagctccttgtgaaggcttatggagattttgcatggagtaaccccctgcatccagatatcttcccaggactacgcaagatagaggcagaaatcgtgaggatagcttgttccctgttcaatgggggaccagattcgtgtggatgtgtgacttctgggggaacagaaagcatactgatggcctgcaaagcatatcgggatctggcctttgagaaggggatcaaaactccagaaattgtggctccccaaagtgcccatgctgcatttaacaaagcagccagttactttgggatgaagattgtgcgggtcccattgacgaagatgatggaggtggatgtgcgggcaatgagaagagctatctccaggaacactgccatgctcgtctgttctaccccacagtttcctcatggtgtaatagatcctgtccctgaagtggccaagctggctgtcaaatacaaaataccccttcatgtcgacgcttgtctgggaggcttcctcatcgtctttatggagaaagcaggatacccactggagcacccatttgatttccgggtgaaaggtgtaaccagcatttcagctgacacccataagtatggctatgccccaaaaggctcatcattggtgttgtatagtgacaagaagtacaggaactatcagttcttcgtcgatacagattggcagggtggcatctatgcttccccaaccatcgcaggctcacggcctggtggcattagcgcagcctgttgggctgccttgatgcacttcggtgagaacggctatgttgaagctaccaaacagatcatcaaaactgctcgcttcctcaagtcagaactggaaaatatcaaaggcatctttgtttttgggaatccccaattgtcagtcattgctctgggatcccgtgattttgacatctaccgactatcaaacctgatgactgctaaggggtggaacttgaaccagttgcagttcccacccagtattcatttctgcatcacattactacacgcccggaaacgagtagctatacaattcctaaaggacattcgagaatctgtcactcaaatcatgaagaatcctaaagcgaagaccacaggaatgggtgccatctatggcatggcccagacaactgttgacaggaatatggttgcagaattgtcctcagtcttcttggacagcttgtacagcaccgacactgtcacccagggcagccagatgaatggttctccaaaaccccactgaacttggaccctttctagtctcaaggggattccagccttcagaaggttcttgggatatggaacaggccgtgcacaactttgacatctggtcttgctccatagagcacaactcaagatagaccatgagacagcttgagcctcaggattcttgttcttcctcttatcttccttttgtggtttttaatttgaagaccccagagaattccattacataatgattttgcccttgttataaatgttaccctaggaattgttttaaccatttccttttctaaactctctagctttcaactttacttaaacattgtgtggtagctctgacctgtcctgattctttagagaagctggggtacagtttatgagatagctagagcttctttgttatctcaggcaggaggcgtttacataacagatgtttcctcagctgggtgtgaggtatactctaagcaggaggctttttcagccttctctctcttttttttttttttttttttttttgagatggaattttgctcttttgcccagtctggagtgcagtggcatgatctcagctcactgcaacctccacccactgggttcaagcgattcttctgcctcagcctcccgagtagctgggattaccggcacccaccaccacgcctggctaatttttcaattttctttttcagtagagacgggttcaccgtgttggccaggctggtcttgaactcctgacctcaggtgatacccgcccccccgcctcagcctcccaaagtgctgggattacaggcgtgagccaccgtgcctggccctgtctctcttaagagtaggttcattgtctgtcttagagtcacttctattgcaactcattttctttttccagggcacagatcgaccaagctgccgttccctattctgcaggacaggactattctagcatacctgcttcgtccacccaggcagggtttggggtggtctcttctgtgcctgcagtccccatttgacacttggttgccaccatctttggagattattgtttggaatgatgcttccattggctttttcttgttaccatggactaggaagaaaacatggtttccaaataatctgggagcttttggccatggtgccgccttcctgaattggcagtggtcagagcacacctgaaccctatcctgggctggtgatgagcagaaatcagacctttttctatgcttttttgaatatcagagtaggatgaacacccagattcaaatatgtcaccaaagttggtggtggtccttccctgcacccttgcgttaagccattatgtaatgaaaatgtgtttgcttgaaggaacagctcaaagcaccttcacaagttgccttgacttaccctaggtgggtgtgaaagagcacccgtagcaaggaaaattttctctattagtgtgttcttctgcctcttcccccttgattcagctttcagaggtactatggcagttttgcctcaggtgctgaacatttctcagccctggctaaaagggagcagcacagggagagaaacaggataggaaagcagaatggcgagcagcctatggcccagggcctgtaatcccttcccaagactagctgctcagggtggtgcagggacaggaccagaccctgcgcctatttcctgccttctttcccctatagggaactctgtaggctgagccactgtcctgctcttatgacattatatcttgtgcctttctcctcagcagtgagcagtgagctactcctggcccaggccctaggggaaatggatcagtctttgaggtttctatttggggaggggagtacttaagatgagtcaaaagacactttcctctgttccattccccatctcagggactcctgaatattcagcctctccaggctggtgtcttctagtttcccccactgggaatgctggctgggagagccatgactaccagacttttcctcaggctccttggcatgttagtctgaattgttcttgagcactgtactactgacccaacaactgtgactagctggccacgccattcagggctggtgtggcatttatgtgtgtgtgtgtgtgtgtgtgtgtttttcctgtttgcccagcagtgcattgtgggttccaagagtgggtagtgtgtgtatgtgtgtgtgtcagagggagacctggcaggcacctctttgagagtagctgtggtcagagctgtttggtcagtgcattatgttgaatgaggtccaggaacccagagccacccagcagacaccactgtggcttgccagctgccaagatggagaagcatgtgcccctgtagagcgtctccccagaaccagaccccgagccactcgcttcctctgtgctgtgacaacattggtgccaggggagatggtgtttttcaaagggacctactgtagccactttaatttacaattaagagccttagtttgacttaacacttttgtaggcttttcattgtgtatttttgtgtatgtgtgcatatagcagctactctgtagcagaggtgggtagagacacttaatagtatcatgtcgcatgcagatgtcacatcggcctctgcaaaaactgtactgtcttgtttctgcattagacttaagtagtcatgtgaatatactgctatgtcacttttaatattacgagttttatacttggaaaatggtacttgcttcttttaaatctctgtcttctctaacctcccccttcccatttcaatgctcccttcctaatttcagcaataatctcaaaaagcaattaaatagttaaatgaccctaattgtaattactgtggatggttgcattcatttgattacttgggcacacacgagatgacaaatggggcagtggccatgcttgaatgggctcctggtgagagattgccccctggtggtgaaacaatcgtgtgtgcccactgataccaagaccaatgaaagagacacagttaagcagcaatccatctcatttccaggcacttcaataggtcgctgattggtccttgcaccagcagtggtagtcgtacctatttcagagaggtctgaaattcaggttcttagtttgccagggacaggccctatcttatatttttttccatcttcatcatccacttctgcttacagtttgctgcttacaataacttaatgatggattgagttatctgggtggtctctagccatctgggcagtgtggttctgtctaaccaaagggcattggcctcaaaccctgcatttggtttaggggctaacagagctcctcagataatcttcacacacatgtaactgctggagatcttattctattatgaataagaaacgagaagtttttccaaagtgttagtcaggatctgaaggctgtcattcagataacccagcttttccttttggcttttagcccattcagactttgccagagtcaagccaaggattgcttttttgctacagttttctgccaaatggcctagttcctgagtacctggaaaccagagagaaagaggatccaggatgtacttggatgaggaggcctggcttatctaggaagtcgtgtctggggtgcttattgctgctccatacagctgtacgtcagccccttggccttctctgtaggttcttggcagcaatgagcagctttcactcagtgacacaagtaattactgagtcctaatttgatagccaccaactgtacctgggtaggcaaagtcagatttttgagaacctttttcctgatttgaagttttaattaccttattttcttttatgctttcctctgtcttgtaatcttttctcttcttaatatccttccctataatttcaattatttggattaattttagaataaacctatttatttct

SEQ ID NO: 336358 - protein, 135 aa, Artificial Sequence
  derived and/or modified sequence
  misc_feature (1)..(1): Xaa can be any naturally occurring amino acid
XIQDKLNKTKDDISKNMSFLKVDKEYVKALPSQGLSSSAVLEKLKEYSSMDAFWQEGRASGTVYSGEEKLTELLVKAYGDFAWSNPLHPDIFPGLRKIEAEIVRIACSLFNGGPDSCGCVSICKGHPIALFFRLK

SEQ ID NO: 336359 - DNA, 408 bp, Artificial Sequence
  derived and/or modified sequence
tgaatccaggacaagctgaacaagaccaaggacgacatcagcaagaacatgagcttcctgaaggtggacaaggagtacgtgaaggccctgcccagccagggcctgagcagcagcgccgtgctggagaagctgaaggagtacagcagcatggacgccttctggcaggagggcagagccagcggcaccgtgtacagcggcgaggagaagctgaccgagctgctggtgaaggcctacggcgacttcgcctggagcaaccccctgcaccccgacatcttccccggcctgagaaagatcgaggccgagatcgtgagaatcgcctgcagcctgttcaacggcggccccgacagctgcggctgcgtgagcatctgcaagggccaccccatcgccctgttcttcagactgaagtag

SEQ ID NO: 336360 - DNA, 408 bp, Artificial Sequence
  derived and/or modified sequence
tgaatccaggacaagctcaacaagacgaaggacgacataagcaaaaacatgagtttcttgaaggtcgacaaggagtacgtgaaggcgctgccctcccagggactgtcctcaagtgccgtcctggagaagctcaaggaatattcaagcatggacgcattttggcaggaaggcagagcctccggaaccgtgtactcgggcgaagagaaactgacagagttactagtgaaagcctacggcgactttgcttggtcgaaccctcttcatcctgacattttcccgggtcttagaaagatcgaagcggaaatcgtgcgaattgcctgttcgctctttaacgggggtccagactcatgcggttgtgtgagcatctgtaaaggtcaccctatcgcattgttttttcgcctaaagtag

SEQ ID NO: 336361 - DNA, 408 bp, Artificial Sequence
  derived and/or modified sequence
tgaatccaggacaagctgaacaagaccaaggatgacatcagcaagaacatgtccttcctgaaggtggacaaggagtatgtgaaggccctgcccagccagggcctgagcagcagcgctgtgctggagaagctgaaggagtacagctccatggatgccttctggcaggagggccgggccagcggcaccgtgtacagcggggaggagaagctgacagagctgctggtgaaggcctacggggactttgcctggagcaaccccctgcacccagacatcttccctggcctgaggaagattgaggccgagatcgtgagaattgcctgcagcctcttcaatggaggccctgacagctgtggctgtgtgtccatctgcaagggccaccccatcgccctcttcttccggctgaagtag

SEQ ID NO: 336362 - DNA, 408 bp, Artificial Sequence
  derived and/or modified sequence
tgaatccaggacaagctgaacaagaccaaggacgacatcagcaagaacatgagctttttgaaggtggacaaggagtacgttaaggcccttccttctcaggggctaagctctagtgccgttcttgagaagctcaaggagtattccagcatggacgccttctggcaagaaggtcgcgcaagcggaactgtgtattcaggagaggaaaagttgaccgagttgttagtcaaggcttatggggacttcgcatggagcaatcccctccaccctgatatcttccctggactgaggaaaattgaggccgagatcgtgcgcatcgcatgttccctttttaatggcggcccagactcttgcggctgcgtgtccatctgtaaaggccaccctatcgcactctttttccgtctgaagtag

SEQ ID NO: 336363 - DNA, 408 bp, Artificial Sequence
  derived and/or modified sequence
tagattcaggataagctgaataagacaaaggacgatattagtaaaaatatgagctttctcaaagtcgataaagaatatgtgaaggctcttccatcccagggactctccagctccgccgtgctggaaaagctgaaggagtacagcagcatggacgcattctggcaggagggcagggcatcagggacagtttatagcggggaagaaaagctgacagaactgcttgtcaaagcgtatggcgacttcgcctggtccaaccccctgcaccctgatatctttcccggtctgcggaagatcgaagccgagatcgtccgcatagcctgttcactcttcaacgggggtcctgactcttgtgggtgtgtttcaatttgcaagggccatcctattgccctgtttttcagactgaaatag

SEQ ID NO: 336364 - DNA, 462 bp, Artificial Sequence
  derived and/or modified sequence
agattcaagacaagttgaacaagaccaaggatgatattagcaagaacatgtcattcctgaaagtggacaaagagtatgtgaaagctttaccctcccagggtctgagctcatctgctgttttggagaaacttaaggagtacagctctatggacgccttctggcaagaggggagagcctctggaacagtgtacagtggggaggagaagctcactgagctccttgtgaaggcttatggagattttgcatggagtaaccccctgcatccagatatcttcccaggactacgcaagatagaggcagaaatcgtgaggatagcttgttccctgttcaatgggggaccagattcgtgtggatgtgtaagtatatgcaaggggcatccaatagccttattttttaggttaaaatagaagagtttttaataaatattaattatattttaaaaaataaaaaatattaaaaata

SEQ ID NO: 336365 - protein, 775 aa, Artificial Sequence
  derived and/or modified sequence
MNAVGSPEGQELQKLGSGAWDNPAYSGPPSPHGTLRVCTISSTGPLQPQPKKPEDEPQETAYRTQVSSCCLHICQGIRGLWGTTLTENTAENRELYIKTTLRELLVYIVFLVDICLLTYGMTSSSAYYYTKVMSELFLHTPSDTGVSFQAISSMADFWDFAQGPLLDSLYWTKWYNNQSLGHGSHSFIYYENMLLGVPRLRQLKVRNDSCVVHEDFREDILSCYDVYSPDKEEQLPFGPFNGTAWTYHSQDELGGFSHWGRLTSYSGGGYYLDLPGSRQGSAEALRALQEGLWLDRGTRVVFIDFSVYNANINLFCVLRLVVEFPARRCHPILANPHSQADPLCQQLFFIVGCEVIFCVFIFYYVVEEILELHIHRLRYLSSIWNILDLVVILLSIVAVGFHIFRTLEVNRLMGKLLQQPNTYADFEFLAFWQTQYNNMNAVNLFFAWIKIFKYISFNKTMTQLSSTLARCAKDILGFAVMFFIVFFAYAQLGYLLFGTQVENFSTFIKCIFTQFRIILGDFDYNAIDNANRILGPAYFVTYVFFVFFVLLNMFLAIINDTYSEVKEELAGQKDELQLSDLLKQGYNKTLLRLRLRKERVSDVQKVLQGGEQEIQFEDFTNTLRELGHAEHEITELTATFTKFDRDGNRILDEKEQEKMRQDLEEERVALNTEIEKLGRSIVSSPQGKSGPEAARAGGWVSGEEFYMLTRRVLQLETVLEGVVSQIDAVGSKLKMLERKGWLAPSPGVKEQAIWKHPQPAPAVTPDPWGPGWAGE

SEQ ID NO: 336366 - DNA, 2328 bp, Artificial Sequence
  derived and/or modified sequence
atgaatgcagtcggcagtcccgagggtcaagaactccaaaagctaggttctggagcatgggataatcctgcctactctggacctcctagtcctcacgggactcttagagtttgcacaatcagcagcaccggacccctgcagcctcagccgaaaaaacctgaggatgaaccacaggagactgcctacaggacacaggttagtagctgttgccttcatatatgtcaggggatacgcggtctctggggaacgactctgaccgaaaacactgccgagaaccgagagctgtacatcaagacgacacttcgcgaactcctggtctatatcgtctttctggtggacatctgcctgttgacatacgggatgacttctagttccgcatattattatactaaggttatgagcgaattatttcttcacacgccaagtgacacaggcgtgagctttcaggcaatatcgtcaatggcggacttctgggactttgctcagggtcctctcctcgattccctctattggacaaagtggtataataaccagtcactgggccacggctcccatagcttcatttattacgaaaacatgttattgggcgtgccacgactgcgtcaattaaaggtacggaacgattcatgtgtagtgcatgaggattttcgggaggacatcctcagctgctacgacgtctattcgcctgacaaagaggagcaactgccttttggccccttcaatgggactgcatggacctatcacagccaggatgagctgggcggcttctcacactgggggcgcttgacaagttattctggcggtggttactaccttgatctcccgggcagccggcagggctccgccgaggcactacgggcactgcaggaaggactgtggctcgatagagggactcgtgtggtattcatcgacttttctgtgtataatgccaatataaacctgttttgtgttctgcgtctggtcgttgagttcccggctcgcaggtgccaccctatcctggctaatccccatagccaggcagatccactgtgccaacaattattttttatcgttggttgtgaggttatattttgcgtctttatcttttattacgttgttgaagaaatcttagagcttcatatacataggcttcgctatttaagttcaatctggaatatccttgatctggtggtgatccttctttcaatagtggccgtcggatttcatatcttcaggacattagaagtcaatagactcatgggcaagcttctccagcaaccaaacacctatgccgactttgagttcctggcattttggcagacccagtacaataatatgaacgccgtgaatttgtttttcgcctggattaaaatcttcaagtacatcagcttcaacaaaaccatgacccaactgtcatcaacgctggcccggtgcgctaaagatatcctaggctttgccgttatgtttttcatcgttttcttcgcatatgcccaattaggttatctcttgttcggcacacaggtcgagaatttcagcacgtttatcaaatgcatcttcactcaatttaggatcatcctgggggatttcgactataacgcaattgacaacgcaaataggatcctgggccccgcgtattttgtcacttacgtcttctttgttttcttcgtgctgttgaacatgtttctggcgatcatcaatgacacatattccgaggtgaaagaggagctggctgggcagaaagatgagctgcaactgtcagatctactgaaacaggggtacaataagacactgctgaggctgagactcagaaaggagcgcgtgtccgacgtgcagaaagtgctgcaagggggtgaacaggagattcaattcgaggatttcacgaacacattgcgggagctgggccacgcagaacacgagattaccgagctcaccgctacctttacaaagttcgaccgcgatggcaacagaattctcgacgagaaggaacaagaaaagatgaggcaggacctagaggaagaacgggtagccctgaacacggaaatcgagaaacttggccgatccatagtgagcagtccccaagggaagagcggccccgaggcagcccgggcgggcggctgggtctccggagaagagttctatatgctgacccgccgggtgcttcagctggagacagtcctggagggtgtcgtttctcagatagacgcggtgggcagcaaacttaaaatgttagaacggaaaggatggctggcaccttctcctggcgtgaaggagcaggcaatttggaagcacccacaacctgcaccggcagtaacccccgatccctggggccctggctgggccggggagtag

SEQ ID NO: 336367 - DNA, 2328 bp, Artificial Sequence
  derived and/or modified sequence
atgaatgctgtgggcagccctgagggccaggagctgcagaagctgggcagcggggcctgggacaacccagcctacagcggcccccccagcccccacggcaccctgcgggtgtgcaccatcagcagcacaggccccctgcagccccagcccaagaagccagaagatgagccccaggagacagcctaccgcacccaggtgagcagctgctgcctgcacatctgccagggcatccggggcctgtggggcaccaccctgacagaaaatacagcagaaaatcgggagctgtacatcaagaccaccctgcgggagctgctggtgtacatcgtgttcctggtggacatctgcctgctgacctacggcatgaccagcagcagcgcctactactacaccaaggtgatgtctgagctgttcctgcacacccccagcgacaccggggtgtccttccaggccatcagctccatggctgacttctgggactttgcccagggccccctgctggacagcctgtactggaccaagtggtacaacaaccagagcctgggccacggcagccacagcttcatctactatgagaacatgctgctgggcgtgccccggctgcggcagctgaaggtgagaaatgacagctgtgtggtgcatgaggacttccgggaggacatcctgagctgctatgatgtgtacagcccagacaaggaggagcagctgcccttcggccccttcaatggaacagcctggacctaccacagccaggatgagctgggcggcttcagccactggggccgcctgaccagctacagcggcggcggctactacctggacctgcccggcagccggcagggcagcgctgaggccctgcgggccctgcaggagggcctgtggctggaccggggcaccagggtggtgttcatcgacttctctgtgtacaatgccaacatcaacctcttctgtgtgctgcggctggtggtggagttccctgcccggcgctgccaccccatcctggccaacccccacagccaggccgaccccctgtgccagcagctgttcttcatcgtgggctgtgaggtgatcttctgtgtgttcatcttctactacgtggtggaggagatcctggagctgcacatccaccggctgcgctacctgagcagcatctggaacatcctggacctggtggtgatcctgctgagcatcgtggccgtgggcttccacatcttccgcaccctggaggtgaaccggctgatgggcaagctgctgcagcagcccaacacctacgccgactttgagttcctggccttctggcagacccagtacaacaacatgaatgctgtgaacctcttctttgcctggatcaagatcttcaagtacatctccttcaacaagaccatgacccagctgagcagcaccctggcccgctgtgccaaggacatcctgggctttgctgtgatgttcttcatcgtgttctttgcctatgcccagctgggctacctgctgtttggcacccaggtggagaacttcagcaccttcatcaagtgcatcttcacccagttccgcatcatcctgggggactttgactacaatgccatcgacaatgccaaccgcatcctgggccctgcctactttgtgacctacgtgttctttgtgttctttgtgctgctgaacatgttcctggccatcatcaatgacacctacagcgaggtgaaggaggagctggccggccagaaggatgagctgcagctgagtgacctgctgaagcagggctacaacaagaccctgctgcggctgcggctgaggaaggagcgggtgtctgatgtgcagaaggtgctgcagggcggggagcaggagatccagtttgaggacttcaccaacaccctgcgggagctgggccatgctgagcacgagatcacagagctgacagccaccttcaccaagtttgacagagatggcaaccgcatcctggatgagaaggagcaggagaagatgaggcaggacctggaggaggagcgggtggccctgaacacagaaattgagaagctgggccgcagcatcgtgagcagcccccagggcaagagcggccctgaggccgcccgggccggcggctgggtgtctggagaggagttctacatgctgacccggcgggtgctgcagctggagaccgtgctggagggcgtggtgtcccagattgatgctgtgggcagcaagctgaagatgctggagaggaagggctggctggcccccagccctggggtgaaggagcaggccatctggaagcacccccagcctgccccagctgtgaccccagacccctggggccctggctgggccggggagtag

SEQ ID NO: 336368 - DNA, 2328 bp, Artificial Sequence
  derived and/or modified sequence
atgaacgccgtgggcagccccgagggccaggagctgcagaagctgggttctggcgcgtgggataatcctgcctactccggtccccccagcccccacgggaccttaagagtgtgcactatttccagcactggacccctgcaacctcagccaaagaagcccgaagacgaaccacaggaaaccgcgtatagaacccaggttagctcctgctgcctgcacatttgccagggtatacgcggactctgggggaccacactgaccgagaataccgcagagaacagagagctgtacattaagactacactgcgtgagctgctggtctatatcgtgtttctcgttgatatctgcctgctcacgtacggaatgaccagttcaagtgcgtactactataccaaagtgatgtcggagttgttcctccataccccatctgatacaggagtgtcatttcaggccatttctagcatggcggatttctgggacttcgcccagggccctttattagacagcttgtactggaccaagtggtacaataaccagtctctgggccacggttctcattctttcatctactatgaaaatatgctattaggtgtgccaaggctgcgacagctgaaggtgcgaaacgattcctgcgttgtccatgaggactttcgcgaagacatactgtcctgctatgatgtgtattcacccgataaagaagaacagttgccgtttgggcccttcaacggaaccgcatggacctaccacagccaagatgagctgggcggtttttctcattggggaaggctgacttcttattccggagggggttattatctggatctccccggaagcagacagggcagtgccgaggcattacgggcgctgcaggagggtctatggcttgatcgtgggacccgcgtcgtgttcatagacttcagtgtatacaacgctaacattaacctcttttgcgttctaagactagtcgttgagttcccggctcggcgctgtcaccccatcctggctaacccgcacagccaggccgaccccctctgccagcaactctttttcatcgttggatgcgaagtcatcttctgcgtcttcattttttattacgtggtggaggagatcctggagttgcacatccatcggctgcgttacctcagtagcatctggaacattctggacctcgtggtgatactactcagcatcgtggccgtgggcttccatattttcagaaccttagaggtaaaccgactgatgggcaagctgctgcaacagcccaacacatacgctgacttcgaatttcttgctttctggcagacccaatataataacatgaacgcagttaatctctttttcgcgtggatcaaaatctttaaatacataagtttcaacaagaccatgacgcagttgtcctccacattggctagatgtgccaaggatatcctcggattcgctgtgatgttctttattgtctttttcgcgtatgctcagcttgggtatcttcttttcggaacccaggtggaaaatttctcaacgtttatcaaatgtatctttacccagtttaggatcattctgggggactttgactataacgccattgataatgctaaccgcattctgggacctgcttattttgtgacttacgtgtttttcgtgttcttcgtgctgctcaacatgttcctggcaattatcaatgatacctactcagaagtcaaagaagagctggccgggcagaaggacgaactgcagctctctgatctcctgaagcagggctacaataagaccctgctcagactccgactgaggaaggaacgggtctcggacgtgcagaaggtcctgcagggcggggaacaagagatccagttcgaagacttcacaaacaccttaagagaactaggtcatgccgagcatgaaatcacagaactgacagcaacgtttaccaagttcgatagggatggcaacagaatcctggacgaaaaggaacaggaaaagatgcgacaggatctggaagaggagagagtggctctgaatacagaaattgaaaaacttggaagatcaatcgtgagttcccctcagggaaaatccgggccagaagctgcccgggctggcggctgggtgagcggtgaggagttttatatgctgactcgaagggtgctacagctggagacagtcctggaaggtgttgtgtctcagatcgatgccgtcggatccaagctgaaaatgcttgagcgaaagggttggctggccccttcacctggagtgaaggagcaggctatctggaaacacccccagcccgcgcccgccgtgaccccggatccatggggccctggttgggctggggaatag

SEQ ID NO: 336369 - DNA, 2708 bp, Artificial Sequence
  derived and/or modified sequence
cagcatcgccttttcctcccgtttctccttccactcccagctccacatcctcctcctattctcccctctcccctcttcaaacccccaccttccagttccctcacctcccctttcggctggtcccctggggcttgcagcaagagggagagagagctcctgacaggattgatggtccttccccaccctgtcctctcatccgctccctccccagcaggcacagacatccccctacaaaaggcaggagcccaggctgtgtggaaacagctgctctcagacgcctttccatttgctctctgctggctaggctgggctgtgcctctgctccctcttcctctagctgagagtgggcacctggggtaccgggcccccccacctcattccccatgaatgctgtgggaagtcctgaggggcaggagctgcaaaagctggggagtggagcctgggacaaccccgcctacagtggtcccccttccccacacgggacgctgagagtctgcaccatctccagcacggggcctctccagccccaacccaagaagcctgaagatgaaccccaggagacggcatacaggacccaggtgtccagctgctgcctccatatctgtcaaggcatcagaggactttggggaacaaccctgactgagaacacagctgagaaccgggaactttatatcaagaccaccctgagggagctgttggtatatattgtgttcctggtggacatctgtctactgacctatggaatgacaagctccagtgcttattactacaccaaagtgatgtctgagctcttcttacatactccatcagacactggagtctcctttcaggccatcagcagcatggcggacttctgggattttgcccagggcccactactggacagtttgtattggaccaaatggtacaacaaccagagcctgggccatggctcccactccttcatctactatgagaacatgctgctgggggttccgaggctgcggcagctaaaggtccgcaatgactcctgtgtggtgcatgaagacttccgggaggacattctgagctgctatgatgtctactctccagacaaagaagaacaactcccctttgggcccttcaatggcacagcgtggacataccactcgcaggatgagttggggggcttctcccactggggcaggctcacaagctacagcggaggtggctactacctggaccttccaggatcccgacagggtagtgcagaggctctccgggcccttcaggaggggctgtggctggacaggggcactcgagtggtgttcatcgacttctcagtctacaatgccaatatcaatcttttctgtgtcctgaggctggtggtggagtttccagctaggaggtgccatcccatcctggcaaatccgcacagtcaagctgatccgctatgtcagcaactgttctttatcgttggctgtgaggtcatcttctgcgtcttcatcttctactatgtggtggaagagatcctggagctccacattcaccggcttcgctacctcagcagcatctggaacatactggacctggtggtcatcttgctctccattgtggctgtgggcttccacatattccgaaccctcgaggtgaatcggctcatggggaagctcctgcagcagccaaacacgtatgcagactttgagttcctcgccttctggcagacacagtacaacaacatgaatgctgtcaacctcttcttcgcctggatcaagatattcaagtacatcagcttcaacaaaaccatgacccagctctcctccacgctggcccgctgtgccaaggacatcctgggcttcgccgtcatgttcttcattgttttcttcgcctatgcccaactcggctacctgcttttcgggacccaagtggaaaactttagcactttcatcaagtgcattttcactcagttccggataatcctcggggactttgactacaatgctatcgacaatgccaaccgcatcctgggccctgcctactttgtcacctatgtcttcttcgtcttcttcgtgctcctgaacatgttcctggccatcatcaatgacacatattcagaggtcaaggaggagctggctggacagaaggatgagctgcaactttctgacctcctgaaacagggctacaacaagaccctactaagactgcgtctgaggaaggagagggtttcggatgtgcagaaggtcctgcagggtggggagcaggagatccagtttgaggatttcaccaacaccttaagggaactgggacacgcagagcatgaaatcactgagctcacggccaccttcaccaagtttgacagagatgggaatcgtattctggatgagaaggaacaggaaaaaatgcgacaggacctggaggaagagagggtggccctcaacactgagattgagaaactaggccgatctattgtgagcagcccacaaggcaaatcgggtccagaggctgccagagcaggaggctgggtttcaggagaagaattctacatgctcacaaggagagttctgcagctggagactgtcctggaaggagtagtgtcccagattgatgctgtaggctcaaagctgaaaatgctggagaggaaggggtggctggctccctccccaggcgtgaaggaacaagctatttggaagcacccgcagccagccccagctgtgaccccagacccctggggaccagggtgggcaggagag

SEQ ID NO: 336370 - DNA, 2328 bp, Artificial Sequence
  derived and/or modified sequence
atgaatgccgtgggttcaccagaagggcaggagctgcagaaactggggtccggagcctgggacaatcctgcttatagtggacctccatcccctcacggcacattgagggtgtgcacaatttctagcaccgggcctctccagccacagccaaagaagcctgaggacgagcctcaggaaacagcctatagaacccaagtatctagctgctgtcttcacatttgccaaggtatcagaggactctggggcacaacactcaccgaaaacacggctgaaaatagagaactgtatattaaaacgacacttagggaactgctcgtctatatagtctttctggtggacatctgccttctcacatatggcatgaccagttctagcgcctattattatactaaagtgatgtcagaactattcctgcatacccctagcgacacgggtgtgagctttcaggctataagctctatggcagacttttgggactttgcacaaggtccactgttggatagcctgtactggactaaatggtataataatcagagcctggggcacggctctcacagcttcatatattacgagaatatgcttcttggcgtgccgagacttcgccagcttaaagtcaggaacgactcctgtgtggtccacgaggacttccgtgaagacatcctttcatgttatgatgtgtattccccagacaaggaggaacaactaccattcggaccatttaacgggaccgcgtggacctatcattctcaagacgaacttggagggtttagtcattggggacgtcttacttcctacagcggaggcggatattatctggatttgcccggatccaggcagggatccgcggaagccttgagagcactgcaggagggactgtggttggaccgaggtacccgggttgtcttcatagacttttctgtttacaacgccaacatcaatttattttgcgttctccggttggttgtggaatttccagccaggagatgtcaccccatcttagccaatcctcactcacaggccgatcccctctgccagcaactattcttcatcgtcggctgtgaggtgattttctgtgtgtttatcttttactatgtggtggaagaaatcctcgagctgcatattcatagactcaggtacttatcttcaatctggaacatactcgatctggtggttattctgctttccatcgtggccgtgggattccacatattccggaccttagaggttaatcgccttatgggtaagctgttgcagcagcccaacacctacgccgacttcgagttccttgccttctggcagacccagtacaacaacatgaacgctgtgaacctgtttttcgcttggatcaagattttcaaatatatcagctttaacaagaccatgacccaactttcgagcacactggccagatgcgctaaggacattctggggttcgctgtgatgttcttcattgtattctttgcctacgctcagctaggttatctcttattcggaacccaggtagagaacttttctaccttcatcaaatgtatttttactcagttccgtatcatcctgggcgattttgactacaatgctattgacaacgccaaccgaattctgggcccagcctactttgtgacatatgtcttttttgtgtttttcgtgctgctgaacatgtttttggcgataattaacgatacctacagcgaggtgaaggaggaactggcaggccagaaagatgagcttcagctgtctgacctcctcaaacaaggctataacaagactctactgaggcttagacttcgtaaggagcgcgtgagtgacgtgcagaaagtgcttcagggaggcgagcaggaaatccaattcgaagacttcacaaataccctgagggaactgggtcacgccgaacacgagattaccgaattaacagcgacttttactaaatttgatagagatggcaacagaattctcgacgagaaagaacaggagaagatgcgccaagacttagaagaggaacgcgtggctctcaatacggaaatcgagaagctgggccgttctattgtttcttcacctcagggcaaaagcggtcccgaggccgctcgggctgggggttgggtgagtggcgaggaattctatatgctcacacggcgtgtgttgcaactcgaaactgtgctggagggggtggtttctcagatcgatgccgtcggatcaaaactgaaaatgctcgagagaaaagggtggcttgcccctagccccggagtgaaggagcaggccatttggaagcacccacagcccgcacccgcagtgacccctgatccttgggggccaggctgggcgggagagtag

SEQ ID NO: 336371 - DNA, 2328 bp, Artificial Sequence
  derived and/or modified sequence
atgaacgccgtgggcagccccgagggccaggagctgcagaagctgggcagcggcgcctgggacaaccccgcctacagcggcccccccagcccccacggcaccctgagagtgtgcaccatcagcagcaccggccccctgcagccccagcccaagaagcccgaggacgagccccaggagaccgcctacagaacccaggtgagcagctgctgcctgcacatctgccagggcatcagaggcctgtggggcaccaccctgaccgagaacaccgccgagaacagagagctgtacatcaagaccaccctgagagagctgctggtgtacatcgtgttcctggtggacatctgcctgctgacctacggcatgaccagcagcagcgcctactactacaccaaggtgatgagcgagctgttcctgcacacccccagcgacaccggcgtgagcttccaggccatcagcagcatggccgacttctgggacttcgcccagggccccctgctggacagcctgtactggaccaagtggtacaacaaccagagcctgggccacggcagccacagcttcatctactacgagaacatgctgctgggcgtgcccagactgagacagctgaaggtgagaaacgacagctgcgtggtgcacgaggacttcagagaggacatcctgagctgctacgacgtgtacagccccgacaaggaggagcagctgcccttcggccccttcaacggcaccgcctggacctaccacagccaggacgagctgggcggcttcagccactggggcagactgaccagctacagcggcggcggctactacctggacctgcccggcagcagacagggcagcgccgaggccctgagagccctgcaggagggcctgtggctggacagaggcaccagagtggtgttcatcgacttcagcgtgtacaacgccaacatcaacctgttctgcgtgctgagactggtggtggagttccccgccagaagatgccaccccatcctggccaacccccacagccaggccgaccccctgtgccagcagctgttcttcatcgtgggctgcgaggtgatcttctgcgtgttcatcttctactacgtggtggaggagatcctggagctgcacatccacagactgagatacctgagcagcatctggaacatcctggacctggtggtgatcctgctgagcatcgtggccgtgggcttccacatcttcagaaccctggaggtgaacagactgatgggcaagctgctgcagcagcccaacacctacgccgacttcgagttcctggccttctggcagacccagtacaacaacatgaacgccgtgaacctgttcttcgcctggatcaagatcttcaagtacatcagcttcaacaagaccatgacccagctgagcagcaccctggccagatgcgccaaggacatcctgggcttcgccgtgatgttcttcatcgtgttcttcgcctacgcccagctgggctacctgctgttcggcacccaggtggagaacttcagcaccttcatcaagtgcatcttcacccagttcagaatcatcctgggcgacttcgactacaacgccatcgacaacgccaacagaatcctgggccccgcctacttcgtgacctacgtgttcttcgtgttcttcgtgctgctgaacatgttcctggccatcatcaacgacacctacagcgaggtgaaggaggagctggccggccagaaggacgagctgcagctgagcgacctgctgaagcagggctacaacaagaccctgctgagactgagactgagaaaggagagagtgagcgacgtgcagaaggtgctgcagggcggcgagcaggagatccagttcgaggacttcaccaacaccctgagagagctgggccacgccgagcacgagatcaccgagctgaccgccaccttcaccaagttcgacagagacggcaacagaatcctggacgagaaggagcaggagaagatgagacaggacctggaggaggagagagtggccctgaacaccgagatcgagaagctgggcagaagcatcgtgagcagcccccagggcaagagcggccccgaggccgccagagccggcggctgggtgagcggcgaggagttctacatgctgaccagaagagtgctgcagctggagaccgtgctggagggcgtggtgagccagatcgacgccgtgggcagcaagctgaagatgctggagagaaagggctggctggcccccagccccggcgtgaaggagcaggccatctggaagcacccccagcccgcccccgccgtgacccccgacccctggggccccggctgggccggcgagtag

SEQ ID NO: 336372 - protein, 760 aa, Artificial Sequence
  derived and/or modified sequence
MNAVGSPEGQELQKLGSGAWDNPAYSGPPSPHGTLRVCTISSTGPLQPQPKKPEDEPQETAYRTQVSSCCLHICQGIRGLWGTTLTENTAENRELYIKTTLRELLVYIVFLVDICLLTYGMTSSSAYYYTKVMSELFLHTPSDTGVSFQAISSMADFWDFAQGPLLDSLYWTKWYNNQSLGHGSHSFIYYENMLLGVPRLRQLKVRNDSCVVHEDFREDILSCYDVYSPDKEEQLPFGPFNGTAWTYHSQDELGGFSHWGRLTSYSGGGYYLDLPGSRQGSAEALRALQEGLWLDRGTRVVFIDFSVYNANINLFCVLRLVVEFPATGGAIPSWQIRTVKLIRYVSNWDFFIVGCEVIFCVFIFYYVVEEILELHIHRLRYLSSIWNILDLVVILLSIVAVGFHIFRTLEVNRLMGKLLQQPNTYADFEFLAFWQTQYNNMNAVNLFFAWIKIFKYISFNKTMTQLSSTLARCAKDILGFAVMFFIVFFAYAQLGYLLFGTQVENFSTFIKCIFTQFRIILGDFDYNAIDNANRILGPAYFVTYVFFVFFVLLNMFLAIINDTYSEVKEELAGQKDELQLSDLLKQGYNKTLLRLRLRKERVSDVQKVLQGGEQEIQFEDFTNTLRELGHAEHEITELTATFTKFDRDGNRILDEKEQEKMRQDLEEERVALNTEIEKLGRSIVSSPQGKSGPEAARAGGWVSGEEFYMLTRRVLQLETVLEGVVSQIDAVGSKLKMLERKGWLAPSPGVRFPIKEKRKP

SEQ ID NO: 336373 - DNA, 2283 bp, Artificial Sequence
  derived and/or modified sequence
atgaatgccgtgggatctcctgagggacaagagcttcagaaactaggctctggcgcctgggacaatcccgcttatagcgggccaccatctccgcacgggaccttgcgagtctgtaccatcagcagtacaggccccctgcaaccccagcctaagaagcctgaggatgagcctcaggagacagcttacagaacccaggtgtcttcctgctgcctccatatttgccaaggaattcgaggtctgtggggaactaccctgacagaaaacactgcagagaatagagagctgtatatcaagaccactctcagggaattgcttgtgtacattgtatttctggtcgatatctgcctgctgacgtacggcatgaccagttcatccgcatactattacactaaggtgatgtcagagttgtttctccacacacccagcgacactggagtgtcgttccaagcaattagcagcatggcagatttctgggattttgcccaggggcctctgctcgattcactctattggacaaagtggtacaacaatcagtctcttggccatggatcgcactcatttatttactacgaaaatatgctcttgggggtcccgcgcttgagacagttaaaagtgcgaaatgatagctgcgtcgtccacgaggacttccgggaggatatcctttcttgttacgatgtttatagcccagacaaagaagagcagttgccctttggcccgttcaatggtactgcctggacataccacagccaggatgaactgggaggtttcagtcactggggcagattgacctcttacagtggcggagggtactacctggatctgccaggatccaggcaggggagtgcggaggctcttagggctctacaggagggcctgtggctggataggggcacccgggtggtgtttattgatttcagtgtctataacgccaatatcaacctgttttgtgtgctgcgcctggtcgtggagtttcccgcaaccggcggcgcaattccttcttggcagatccgtacagtcaagcttatccgctatgtatcaaactgggattttttcattgtaggctgcgaagttatcttctgcgtgtttattttctattatgttgttgaggagatcttggagctccacattcacaggctgaggtacttatccagtatctggaatattctggatttggtggtgattttgctgtccatagtcgcagtgggattccatattttcagaacacttgaggtgaaccggctgatggggaaactgctgcaacagcccaacacatacgccgacttcgagttcttggccttctggcagactcagtacaacaacatgaatgccgttaacctttttttcgcctggatcaagatctttaagtacatctcattcaataagactatgacccagctgtcctccactctggctcgatgtgcaaaggatattctcgggttcgctgttatgtttttcatcgtcttctttgcttatgcccagctcggctacctgcttttcggcacgcaggtcgagaacttcagtacatttatcaaatgcatctttacccagttcaggattatcctcggggattttgactacaatgccatcgataacgcaaacagaatcctgggcccagcatatttcgtcacttacgttttctttgtttttttcgtcctgttgaatatgtttcttgccataatcaacgacacatattcagaagtgaaagaggagctggcagggcagaaagatgaactgcagctttctgaccttttaaaacagggctacaataaaaccctcctaagactccggttaaggaaagaaagggtgagtgatgtacagaaggtgctccagggcggagaacaagagatacagttcgaggacttcacaaatactttaagagaactcggacacgccgagcacgagattaccgagcttacagccaccttcacaaagtttgacagggatggaaatagaatcttggatgaaaaggagcaagaaaagatgaggcaggacttagaagaagagcgcgtcgccctgaacacagagatcgagaaactcgggaggtccattgtgtcttctccccagggcaagtctgggcccgaagccgcgcgtgccggcggctgggtgagcggtgaagagttctacatgttgactcggcgagtgcttcagctagagaccgtacttgagggtgtggtcagccaaatcgatgccgtgggcagcaaactgaagatgctcgagcgcaagggctggctcgccccttcgcctggagtgaggtttccaatcaaagagaagcgaaagccgtag

SEQ ID NO: 336374 - DNA, 2283 bp, Artificial Sequence
  derived and/or modified sequence
atgaatgctgtgggcagccctgagggccaggagctgcagaagctgggcagcggggcctgggacaacccagcctacagcggcccccccagcccccacggcaccctgcgggtgtgcaccatcagcagcacaggccccctgcagccccagcccaagaagccagaagatgagccccaggagacagcctaccgcacccaggtgagcagctgctgcctgcacatctgccagggcatccggggcctgtggggcaccaccctgacagaaaatacagcagaaaatcgggagctgtacatcaagaccaccctgcgggagctgctggtgtacatcgtgttcctggtggacatctgcctgctgacctacggcatgaccagcagcagcgcctactactacaccaaggtgatgtctgagctgttcctgcacacccccagcgacaccggggtgtccttccaggccatcagctccatggctgacttctgggactttgcccagggccccctgctggacagcctgtactggaccaagtggtacaacaaccagagcctgggccacggcagccacagcttcatctactatgagaacatgctgctgggcgtgccccggctgcggcagctgaaggtgagaaatgacagctgtgtggtgcatgaggacttccgggaggacatcctgagctgctatgatgtgtacagcccagacaaggaggagcagctgcccttcggccccttcaatggaacagcctggacctaccacagccaggatgagctgggcggcttcagccactggggccgcctgaccagctacagcggcggcggctactacctggacctgcccggcagccggcagggcagcgctgaggccctgcgggccctgcaggagggcctgtggctggaccggggcaccagggtggtgttcatcgacttctctgtgtacaatgccaacatcaacctcttctgtgtgctgcggctggtggtggagttccctgccactggaggagccatccccagctggcagatcagaacagtgaagctgatccgctacgtgagcaactgggacttcttcatcgtgggctgtgaggtgatcttctgtgtgttcatcttctactacgtggtggaggagatcctggagctgcacatccaccggctgcgctacctgagcagcatctggaacatcctggacctggtggtgatcctgctgagcatcgtggccgtgggcttccacatcttccgcaccctggaggtgaaccggctgatgggcaagctgctgcagcagcccaacacctacgccgactttgagttcctggccttctggcagacccagtacaacaacatgaatgctgtgaacctcttctttgcctggatcaagatcttcaagtacatctccttcaacaagaccatgacccagctgagcagcaccctggcccgctgtgccaaggacatcctgggctttgctgtgatgttcttcatcgtgttctttgcctatgcccagctgggctacctgctgtttggcacccaggtggagaacttcagcaccttcatcaagtgcatcttcacccagttccgcatcatcctgggggactttgactacaatgccatcgacaatgccaaccgcatcctgggccctgcctactttgtgacctacgtgttctttgtgttctttgtgctgctgaacatgttcctggccatcatcaatgacacctacagcgaggtgaaggaggagctggccggccagaaggatgagctgcagctgagtgacctgctgaagcagggctacaacaagaccctgctgcggctgcggctgaggaaggagcgggtgtctgatgtgcagaaggtgctgcagggcggggagcaggagatccagtttgaggacttcaccaacaccctgcgggagctgggccatgctgagcacgagatcacagagctgacagccaccttcaccaagtttgacagagatggcaaccgcatcctggatgagaaggagcaggagaagatgaggcaggacctggaggaggagcgggtggccctgaacacagaaattgagaagctgggccgcagcatcgtgagcagcccccagggcaagagcggccctgaggccgcccgggccggcggctgggtgtctggagaggagttctacatgctgacccggcgggtgctgcagctggagaccgtgctggagggcgtggtgtcccagattgatgctgtgggcagcaagctgaagatgctggagaggaagggctggctggcccccagccctggggtgcgcttccccatcaaggagaagaggaagccctag

SEQ ID NO: 336375 - DNA, 2283 bp, Artificial Sequence
  derived and/or modified sequence
atgaacgccgtgggcagccccgagggccaggagctgcagaagctgggttcaggggcatgggataatcccgcatactccggacccccctcgccacatggtacgctgagagtctgcacaattagcagtaccgggccactgcagccccagcctaaaaaacccgaagacgagcctcaggaaactgcatacagaacccaggtatcttcttgctgtctccacatctgccaaggtatacgcggcctctgggggaccacgctcactgaaaacaccgccgagaatagagaactatatattaaaacaacactcagggagttgcttgtgtacatagtttttctggttgatatctgtttgctcacttatggaatgactagcagctcagcctactattatacaaaggtgatgtccgaactttttctccacacgcctagtgatactggagtgagcttccaggccatttcgagcatggccgatttttgggactttgcacagggacctctactcgattccctgtactggacaaaatggtataacaaccagtcccttggacatggatcccactccttcatttattacgaaaatatgctgttgggtgtccctcgcttacgacagctgaaagtgcgcaacgactcctgcgtcgtgcacgaggattttagggaggatatcctcagctgctatgatgtctactcccccgataaagaagagcagcttccgtttgggccattcaacgggacagcctggacatatcattcacaggacgagctgggcggcttctctcactggggtaggctcacatcgtattccggcggggggtattatctcgatctgcccggcagcaggcagggaagtgcagaggctctgcgggctttgcaggaaggcttgtggctggatcgcggtacacgagtggttttcatcgatttctccgtgtataacgccaatataaacctgttttgtgttctgaggctcgtcgtggaatttcccgccactggcggagccatcccttcatggcaaattcgtactgtgaagctcatcaggtacgtgtctaactgggatttttttatcgtgggttgcgaagtcattttctgcgtctttatcttttactatgtggtcgaagaaatcctggagctccatatccatcgactgcgatatctttcatcaatctggaatatcctagacttggtggtgattctattgtccattgtggctgtagggttccacatcttcagaactttggaagtaaaccggctgatgggtaagttattgcaacaaccgaatacttatgcagatttcgaattcctagcgttttggcagacccagtataataatatgaacgctgtcaacctattctttgcttggatcaagatcttcaaatacatatcctttaacaaaactatgacacagctctcatccaccctcgcccggtgcgccaaagacatcttggggtttgcggtcatgttcttcattgtttttttcgcctatgcgcaactgggctaccttctatttgggactcaagtggagaatttcagcacatttataaagtgcatctttacccagtttagaatcattctcggagacttcgattataatgcaatcgacaatgccaacaggattctggggcccgcttatttcgtcacctacgtgttctttgtctttttcgtgctgctgaacatgttcctagcgatcataaatgatacatactccgaggtgaaagaggagctggccgggcagaaagatgaactgcagctctctgatttgttgaagcaggggtacaataaaacgctcctgcgcttgcgactccgcaaggaacgtgtgagtgacgtgcagaaggtgttacaaggaggggaacaggaaatccagttcgaagactttactaatactctgcgggaactgggacacgctgagcacgagatcactgaactgacggccacatttaccaaatttgatcgggacggaaacagaatactggacgagaaagaacaggagaagatgcgccaggaccttgaagaagagagagtcgcccttaatactgaaatcgaaaagcttggcagaagtattgtgtcttctcctcaagggaagtccggccctgaggctgctcgggccggcgggtgggtttctggagaagagttctatatgttaacccgcagggtgcttcaactggagacggtactggagggggttgtctcacagattgatgcggtgggaagtaaactcaagatgcttgagaggaaggggtggctcgccccaagccccggtgtccggttcccaattaaagaaaagcgcaagccctag

SEQ ID NO: 336376 - DNA, 2966 bp, Artificial Sequence
  derived and/or modified sequence
cagcatcgccttttcctcccgtttctccttccactcccagctccacatcctcctcctattctcccctctcccctcttcaaacccccaccttccagttccctcacctcccctttcggctggtcccctggggcttgcagcaagagggagagagagctcctgacaggattgatggtccttccccaccctgtcctctcatccgctccctccccagcaggcacagacatccccctacaaaaggcaggagcccaggctgtgtggaaacagctgctctcagacgcctttccatttgctctctgctggctaggctgggctgtgcctctgctccctcttcctctagctgagagtgggcacctggggtaccgggcccccccacctcattccccatgaatgctgtgggaagtcctgaggggcaggagctgcaaaagctggggagtggagcctgggacaaccccgcctacagtggtcccccttccccacacgggacgctgagagtctgcaccatctccagcacggggcctctccagccccaacccaagaagcctgaagatgaaccccaggagacggcatacaggacccaggtgtccagctgctgcctccatatctgtcaaggcatcagaggactttggggaacaaccctgactgagaacacagctgagaaccgggaactttatatcaagaccaccctgagggagctgttggtatatattgtgttcctggtggacatctgtctactgacctatggaatgacaagctccagtgcttattactacaccaaagtgatgtctgagctcttcttacatactccatcagacactggagtctcctttcaggccatcagcagcatggcggacttctgggattttgcccagggcccactactggacagtttgtattggaccaaatggtacaacaaccagagcctgggccatggctcccactccttcatctactatgagaacatgctgctgggggttccgaggctgcggcagctaaaggtccgcaatgactcctgtgtggtgcatgaagacttccgggaggacattctgagctgctatgatgtctactctccagacaaagaagaacaactcccctttgggcccttcaatggcacagcgtggacataccactcgcaggatgagttggggggcttctcccactggggcaggctcacaagctacagcggaggtggctactacctggaccttccaggatcccgacagggtagtgcagaggctctccgggcccttcaggaggggctgtggctggacaggggcactcgagtggtgttcatcgacttctcagtctacaatgccaatatcaatcttttctgtgtcctgaggctggtggtggagtttccagctacaggaggtgccatcccatcctggcaaatccgcacagtcaagctgatccgctatgtcagcaactgggacttctttatcgttggctgtgaggtcatcttctgcgtcttcatcttctactatgtggtggaagagatcctggagctccacattcaccggcttcgctacctcagcagcatctggaacatactggacctggtggtcatcttgctctccattgtggctgtgggcttccacatattccgaaccctcgaggtgaatcggctcatggggaagctcctgcagcagccaaacacgtatgcagactttgagttcctcgccttctggcagacacagtacaacaacatgaatgctgtcaacctcttcttcgcctggatcaagatattcaagtacatcagcttcaacaaaaccatgacccagctctcctccacgctggcccgctgtgccaaggacatcctgggcttcgccgtcatgttcttcattgttttcttcgcctatgcccaactcggctacctgcttttcgggacccaagtggaaaactttagcactttcatcaagtgcattttcactcagttccggataatcctcggggactttgactacaatgctatcgacaatgccaaccgcatcctgggccctgcctactttgtcacctatgtcttcttcgtcttcttcgtgctcctgaacatgttcctggccatcatcaatgacacatattcagaggtcaaggaggagctggctggacagaaggatgagctgcaactttctgacctcctgaaacagggctacaacaagaccctactaagactgcgtctgaggaaggagagggtttcggatgtgcagaaggtcctgcagggtggggagcaggagatccagtttgaggatttcaccaacaccttaagggaactgggacacgcagagcatgaaatcactgagctcacggccaccttcaccaagtttgacagagatgggaatcgtattctggatgagaaggaacaggaaaaaatgcgacaggacctggaggaagagagggtggccctcaacactgagattgagaaactaggccgatctattgtgagcagcccacaaggcaaatcgggtccagaggctgccagagcaggaggctgggtttcaggagaagaattctacatgctcacaaggagagttctgcagctggagactgtcctggaaggagtagtgtcccagattgatgctgtaggctcaaagctgaaaatgctggagaggaaggggtggctggctccctccccaggcgtgaggttccctataaaagagaagaggaagccttagaggagaggagactctcccgtggtgagattccaacgttgcagaggagttaagtgtgaggcactcccggagcaaagtctatgaaggatcttctgcaagaggctgcctcctggtccactgaacctggaaactgagtgggctttaaccaggagataaaaatggagcctgaagggaatcaggcaaggaaatgaactcaggattcagagatctttgaattaatatgtggtgggttctgacattattcttccataagaccatgtgggtttccatggtggctatcaataaaactccttaggaaaactt

SEQ ID NO: 336377 - DNA, 2283 bp, Artificial Sequence
  derived and/or modified sequence
atgaatgcggttgggtctccggagggacaggaattacaaaagcttggctcaggcgcatgggataacccggcatactctggcccaccatctccccacgggaccctaagagtatgcacaataagctctacgggacctctgcaacctcagcctaagaagccggaggacgagcctcaagaaaccgcctacagaacccaggtgtcttcctgctgtttgcacatctgtcaaggtattagggggctgtggggtacgacccttaccgagaataccgccgagaatagggagctgtatatcaagacaaccctgcgcgaactgctcgtgtacatcgtattcctggtggacatctgccttttgacctacggaatgacgtcaagcagtgcatattactataccaaggtgatgagcgagctcttcctacacacccccagcgacaccggcgtgtcatttcaggcgataagctctatggccgatttctgggattttgcccagggccctctcttggactctctctactggactaagtggtataacaatcagtccttgggtcatggtagccactccttcatctattatgagaacatgctgctgggcgtcccacggctccggcagttaaaggtgcgtaatgactcgtgcgtggtgcatgaagattttcgcgaggatatcctgagctgctacgacgtatacagcccggataaggaggagcaactcccatttggccctttcaacggaacggcctggacatatcattctcaggatgaactgggcggttttagccattggggcagactgacaagttatagcggcggaggatattaccttgatttgccaggatccaggcaagggtcggctgaagcattgcgcgctctccaagaaggtctgtggctcgatagaggcacacgggtcgtgttcatcgacttctctgtctataacgcaaatattaacctattctgcgtgttgaggctagtcgtggaattcccagcaaccggaggggcaatcccctcatggcagattcggacagttaagttgataaggtacgtctcaaactgggatttcttcattgtcggttgtgaggtcatattctgcgtgtttattttttattacgtggtggaggagattctggagctacacattcacaggctgcgttacctgtcctccatctggaatattctcgacctcgtggtgatactgttgagtatcgtggctgttggtttccacatattccggacactggaggttaatcgattgatggggaagctactgcaacagcctaatacttacgcagactttgagttcctcgccttctggcagactcagtataataatatgaacgcggttaacctcttctttgcatggatcaagatctttaagtacatctcgtttaataaaaccatgacccagctctccagcaccctggcccgatgcgctaaagatattctgggcttcgctgtgatgttctttatagtttttttcgcttatgcacagcttggctatctcttatttggcactcaagtggagaacttctccacatttatcaagtgcatcttcacccagttccggatcattctcggggatttcgactataatgctattgacaacgctaatagaattctggggccagcgtatttcgtgacatacgttttttttgtcttctttgtgctcctgaacatgttccttgcaatcattaatgatacttatagcgaggttaaggaagagttagcgggacagaaagacgagctccagctctccgacctgctgaagcagggctacaataagaccctactccgtctccggctgcggaaggagcgggtctccgatgtgcaaaaagtgctccagggcggtgaacaggaaatacagttcgaggatttcacaaatacgctgcgggagctggggcacgccgagcatgagattaccgaacttacagcaacttttactaagtttgatagggatggtaaccggatactcgacgaaaaagagcaggaaaagatgaggcaggaccttgaggaggagcgggtcgctttaaatactgaaatcgagaagttgggtagaagtattgtgagttctccccagggtaagtccgggccagaagccgctcgcgctgggggatgggttagtggggaggaattttacatgctgacacggcgtgttctgcagttagaaacagtgctggagggggtcgtgtctcagattgatgccgtcggatccaaactgaaaatgctggagagaaaagggtggctggctccaagtcctggggtgcgctttcccattaaagagaagcgcaaaccgtag

SEQ ID NO: 336378 - DNA, 2283 bp, Artificial Sequence
  derived and/or modified sequence
atgaacgccgtgggcagccccgagggccaggagctgcagaagctgggcagcggcgcctgggacaaccccgcctacagcggcccccccagcccccacggcaccctgagagtgtgcaccatcagcagcaccggccccctgcagccccagcccaagaagcccgaggacgagccccaggagaccgcctacagaacccaggtgagcagctgctgcctgcacatctgccagggcatcagaggcctgtggggcaccaccctgaccgagaacaccgccgagaacagagagctgtacatcaagaccaccctgagagagctgctggtgtacatcgtgttcctggtggacatctgcctgctgacctacggcatgaccagcagcagcgcctactactacaccaaggtgatgagcgagctgttcctgcacacccccagcgacaccggcgtgagcttccaggccatcagcagcatggccgacttctgggacttcgcccagggccccctgctggacagcctgtactggaccaagtggtacaacaaccagagcctgggccacggcagccacagcttcatctactacgagaacatgctgctgggcgtgcccagactgagacagctgaaggtgagaaacgacagctgcgtggtgcacgaggacttcagagaggacatcctgagctgctacgacgtgtacagccccgacaaggaggagcagctgcccttcggccccttcaacggcaccgcctggacctaccacagccaggacgagctgggcggcttcagccactggggcagactgaccagctacagcggcggcggctactacctggacctgcccggcagcagacagggcagcgccgaggccctgagagccctgcaggagggcctgtggctggacagaggcaccagagtggtgttcatcgacttcagcgtgtacaacgccaacatcaacctgttctgcgtgctgagactggtggtggagttccccgccaccggcggcgccatccccagctggcagatcagaaccgtgaagctgatcagatacgtgagcaactgggacttcttcatcgtgggctgcgaggtgatcttctgcgtgttcatcttctactacgtggtggaggagatcctggagctgcacatccacagactgagatacctgagcagcatctggaacatcctggacctggtggtgatcctgctgagcatcgtggccgtgggcttccacatcttcagaaccctggaggtgaacagactgatgggcaagctgctgcagcagcccaacacctacgccgacttcgagttcctggccttctggcagacccagtacaacaacatgaacgccgtgaacctgttcttcgcctggatcaagatcttcaagtacatcagcttcaacaagaccatgacccagctgagcagcaccctggccagatgcgccaaggacatcctgggcttcgccgtgatgttcttcatcgtgttcttcgcctacgcccagctgggctacctgctgttcggcacccaggtggagaacttcagcaccttcatcaagtgcatcttcacccagttcagaatcatcctgggcgacttcgactacaacgccatcgacaacgccaacagaatcctgggccccgcctacttcgtgacctacgtgttcttcgtgttcttcgtgctgctgaacatgttcctggccatcatcaacgacacctacagcgaggtgaaggaggagctggccggccagaaggacgagctgcagctgagcgacctgctgaagcagggctacaacaagaccctgctgagactgagactgagaaaggagagagtgagcgacgtgcagaaggtgctgcagggcggcgagcaggagatccagttcgaggacttcaccaacaccctgagagagctgggccacgccgagcacgagatcaccgagctgaccgccaccttcaccaagttcgacagagacggcaacagaatcctggacgagaaggagcaggagaagatgagacaggacctggaggaggagagagtggccctgaacaccgagatcgagaagctgggcagaagcatcgtgagcagcccccagggcaagagcggccccgaggccgccagagccggcggctgggtgagcggcgaggagttctacatgctgaccagaagagtgctgcagctggagaccgtgctggagggcgtggtgagccagatcgacgccgtgggcagcaagctgaagatgctggagagaaagggctggctggcccccagccccggcgtgagattccccatcaaggagaagagaaagccctag

SEQ ID NO: 336379 - DNA, 327 bp, Artificial Sequence
  derived and/or modified sequence
atggatctctctcacaaggccgtaaaacgccaggccagcttctgcaatgcaattacctttagcaaccggcccgttcttatctatgaacaggtcaggctgaaaataacgaagaagcaatgctgctggtcgggcgctctgaggctcgggtttaccagtaaggacccctctagaattcacccggactctctacccaaatatgcctgccccgacctggtcagccaatcaggattctgggccaaggccctgcccgaggaattcgctaacgaaggaaatatcatcgccttctgggtggacaaaaaaggacgcgttttccacaggatcaattag

SEQ ID NO: 336380 - DNA, 327 bp, Artificial Sequence
  derived and/or modified sequence
atggacctgagccacaaggctgtgaagaggcaggccagcttctgcaatgccatcaccttcagcaacagacctgtgctgatctatgagcaggtgcggctgaagatcaccaagaagcagtgctgctggagcggggccctgcggctgggcttcaccagcaaggaccccagccgcatccacccagacagcctgcccaagtatgcctgcccagacctggtgtcccagagcggcttctgggccaaggccctgcctgaggagtttgccaatgaaggcaacatcatcgccttctgggtggacaagaagggccgggtcttccaccgcatcaactag

SEQ ID NO: 336381 - DNA, 327 bp, Artificial Sequence
  derived and/or modified sequence
atggacctgagccacaaggccgtgaagcggcaggccagcttctgcaacgcaattaccttcagcaatcgacctgtgttgatctacgaacaggtgaggctaaagataactaagaagcaatgttgttggtcaggagcattgcgcctgggctttacatctaaagacccctcccggatccaccctgattccctacccaaatatgcatgtcctgacctggtgagccagtccggcttctgggcaaaggcattgcctgaggagttcgctaatgagggcaacattatcgcattctgggtagataaaaaaggaagagtctttcatagaataaactag

SEQ ID NO: 336382 - DNA, 628 bp, Artificial Sequence
  derived and/or modified sequence
ggtcaggctggtcttgaattcctgacctcgtgatccacctgtgtcggcctcccaaagtgctgggtttacaggtgtgagccaccgcgcttggctgattgtattttctttagggccttggactttcggcttgattcgggccaaacattttggattgctgcgttaaaactctatcgggggccccttccccgtcacttctcaccgatgccaccacaagcagaagcactgtccggcagtgctgcccagcggggggctcccagccacgccgctgctcttccacccgcacaccaagggctcccagatcctcatggacctcagccacaaggctgtcaagaggcaggccagcttctgcaacgccatcaccttcagcaaccgcccggtcctcatctacgagcaagtcaggctgaagatcaccaagaagcagtgctgctggagcggggccctgcggctgggcttcaccagcaaggacccgtcccgcatccaccctgactcgctgcccaagtacgcctgccccgacctggtgtcccagagtggcttctgggccaaggcgctgcctgaggagtttgccaatgagggcaacatcatcgcattctgggtggacaagaagggccgtgtcttccaccgcatcaac

SEQ ID NO: 336383 - DNA, 327 bp, Artificial Sequence
  derived and/or modified sequence
atggacttgtctcacaaagctgtaaagcgtcaggcatccttttgtaacgcaatcaccttcagcaatagacctgttctgatctatgagcaggttagactaaagataactaagaaacagtgctgctggagcggagctcttagacttgggtttacctccaaggacccatcacgcattcatcctgatagtctcccaaagtacgcctgtcccgacctggtgtcccagtctggtttctgggcaaaagctttacctgaggagttcgctaacgagggaaacatcattgcattctgggtggataagaagggaagggtctttcaccggatcaactag

SEQ ID NO: 336384 - DNA, 327 bp, Artificial Sequence
  derived and/or modified sequence
atggacctgagccacaaggccgtgaagagacaggccagcttctgcaacgccatcaccttcagcaacagacccgtgctgatctacgagcaggtgagactgaagatcaccaagaagcagtgctgctggagcggcgccctgagactgggcttcaccagcaaggaccccagcagaatccaccccgacagcctgcccaagtacgcctgccccgacctggtgagccagagcggcttctgggccaaggccctgcccgaggagttcgccaacgagggcaacatcatcgccttctgggtggacaagaagggcagagtgttccacagaatcaactag

SEQ ID NO: 336385 - DNA, 249 bp, Artificial Sequence
  derived and/or modified sequence
atgccagggaaactgcggagcgatgccgggctggaaagtgacacagccatgaagaaaggggagacattgagaaaacagactgaggaaaaggaaaagaaagaaaagcccaagtccgacaaaactgaggagattgcggaagaagaggaaacagttttcccaaaagccaagcaggttaaaaaaaaggccgagccaagtgaagtagacatgaactcgccaaaaagtaaaaagaagaagaagaagaagaaatag

SEQ ID NO: 336386 - DNA, 249 bp, Artificial Sequence
  derived and/or modified sequence
atgcctgggaagctgcggagtgatgctggcctggagagtgacacagccatgaagaagggggagaccctgaggaagcagacagaggagaaggagaagaaggagaagcccaagagtgacaagacagaggagattgctgaggaggaggagaccgtcttccccaaggccaagcaggtgaagaagaaggccgagcccagcgaggtggacatgaacagccccaagagcaagaagaagaagaagaagaagaagtag

SEQ ID NO: 336387 - DNA, 249 bp, Artificial Sequence
  derived and/or modified sequence
atgcccggcaagctgcggagcgacgccggcctggagagcgacaccgcgatgaagaaaggggaaacgctgagaaagcagaccgaggagaaggagaaaaaagaaaagccaaaatcagacaaaacagaggaaattgcagaagaggaggagaccgtgtttcccaaagccaagcaagtgaagaaaaaagcagagccctccgaagttgacatgaacagtcccaagtcaaagaaaaaaaagaagaagaagaaatag

SEQ ID NO: 336388 - DNA, 249 bp, Artificial Sequence
  derived and/or modified sequence
atgccaggtaaacttcggtcagacgccggacttgagtccgacactgcaatgaaaaagggggaaactctgcgtaaacaaactgaggagaaggagaaaaaagaaaagcccaagagtgacaaaactgaggagatcgccgaagaagaggaaaccgtgttccccaaggccaagcaggtgaagaaaaaggccgagccgagcgaagtggacatgaacagcccaaaaagcaaaaagaagaagaagaagaagaagtag

SEQ ID NO: 336389 - DNA, 299 bp, Artificial Sequence
  derived and/or modified sequence
ttcctctccacgcggttgagaagaccggtcggcctgggcaacctgcgctgaagatgccgggaaaactccgtagtgacgctggtttggaatcagacaccgcaatgaaaaaaggggagacactgcgaaagcaaaccgaggagaaagagaaaaaagagaagccaaaatctgataagactgaagagatagcagaagaggaagaaactgttttccccaaagctaaacaagttaaaaagaaagcagagccttctgaagttgacatgaattctcctaaatccaaaaagaaaaaaaaaaaaaaaaaa

SEQ ID NO: 336390 - DNA, 249 bp, Artificial Sequence
  derived and/or modified sequence
atgcccggcaagctgagaagcgacgccggcctggagagcgacaccgccatgaagaagggcgagaccctgagaaagcagaccgaggagaaggagaagaaggagaagcccaagagcgacaagaccgaggagatcgccgaggaggaggagaccgtgttccccaaggccaagcaggtgaagaagaaggccgagcccagcgaggtggacatgaacagccccaagagcaagaagaagaagaagaagaagaagtag

SEQ ID NO: 336391 - protein, 371 aa, Artificial Sequence
  derived and/or modified sequence
LQKQKIMPPSKPHPPVVGKVTHHSIELYWDLEKKAKRQGPQEQWFRFSIEEEDPKMHTYGIIYTGYATKHVVEGLEPRTLYRFRLKVTSPSGECEYSPLVSVSTTRPSLSKSLVKIRMVTSVLHGPPTENTGEPISSEHLHRAVSVNDEDLLVRILQGGRVKVDVPNKFGFTALMVAAQKGYTRLVKILVSNGTDVNLKNGSGKDSLMLACYAGHLDVVKYLRRHGASWQARDLGGCTALHWAADGGHCSVIEWMIKDGCEVDVVDTGSGWTPLMRVSAVSGNQRVASLLIDAGANVNVKDRNGKTPLMVAVLNNHEELVQLLLDKGADASVKNEFGKGVLEMARVFDRQSVVSLLEERKKKQRPKKSCVC

SEQ ID NO: 336392 - DNA, 1268 bp, Artificial Sequence
  derived and/or modified sequence
ttacagaagcaaaaaatcatgccaccctcaaagcctcatccacctgtcgtgggcaaagtgactcatcacagcattgaattatactgggatctggaaaagaaagccaaacgccaaggacctcaagagcagtggttcaggttctcgattgaagaagaagaccccaaaatgcacacttatggtatcatttatacgggatatgcaacgaagcatgttgttgaaggtctggaaccaaggacgctgtacagatttcgcctgaaggtcaccagcccctctggggagtgtgagtacagcccactcgtctcagtgtctacaaccaggccatctctgagcaagagccttgtaaaaattaggatggtcacaagtgttctccacggcccacccactgaaaacacaggagagcccataagtagtgagcacttgcaccgggctgtcagtgtgaatgatgaagatttgctggtccgaatacttcaaggaggccgtgttaaggttgatgttcccaataagtttggctttaccgctctgatggttgctgcccagaaaggatacaccaggcttgtgaaaatcctagtttctaatggcacagacgtgaatctgaagaatggaagtggcaaggacagtctaatgctggcgtgctatgcgggacacctagatgttgtgaaatatctccgaagacatggcgcttcttggcaggctagagacctgggaggctgtacagctctgcactgggctgcagatggaggccactgcagtgtgattgagtggatgataaaggatggctgtgaggtagacgtcgtggacactggttcaggatggaccccactcatgagagtctctgcggtgtcgggaaatcagagggtggcctctcttctaattgatgctggggccaatgtgaatgtgaaggacagaaatggaaagacgccccttatggtggctgtgttaaataatcatgaagagttagttcagttacttcttgacaaaggggcagatgcaagtgtaaaaaatgagttcggcaaaggtgtcctagaaatggccagagtttttgacagacagagtgtagtctccttattagaagaaaggaaaaaaaagcagaggccaaagaagtcttgtgtctgctgatgagagcaccactcatctgcgaaacgcacgtaaaacaaagtgaaccgtgactgttaaactagggatgggaaattctgcatcttggggggctgtacatttatttatttagttgaagattcactgatcccactttgaaatacatctttttacct

SEQ ID NO: 336393 - DNA, 1116 bp, Artificial Sequence
  derived and/or modified sequence
ctccagaaacagaaaatcatgccaccgtcaaagccacacccccctgtggtgggcaaggtcacacaccattctatcgagctgtattgggacctggagaaaaaagcgaaaaggcaggggccccaggagcaatggtttagattctccattgaggaagaggaccccaagatgcacacttatggaatcatctacactggctacgctactaagcatgtggtggagggcctggagcctagaactctatacaggtttcggctgaaggttacgtccccatccggagaatgtgagtacagtcctctcgtgtctgtatcaacaacccgaccgagcctctcgaagtcgttggtcaaaatccgcatggttacttccgtgctgcacggacctcccactgaaaatacaggcgagccaatcagctcagagcacctgcatcgagccgtttccgtgaacgatgaggatctgctcgtgaggatcctacaaggcggaagagtgaaggtggacgtcccaaacaagttcggtttcaccgcacttatggtagctgcccaaaagggctacaccagattggtcaagatactggtgtcaaacgggacggatgtaaatctcaaaaacggctcaggtaaagactccttgatgctcgcttgttacgcagggcacctggacgtcgtcaagtatttgaggcggcacggagcgagttggcaagcgagagacctgggagggtgcactgccctacactgggctgccgatggaggtcactgttcggttatcgaatggatgataaaggacggttgtgaagtcgacgtggtggacaccggaagcggatggacacctctgatgagggtcagtgccgtatccggcaaccagcgggtagcctctctccttattgacgccggggccaatgtaaatgtaaaagaccgtaatggcaaaactcctttgatggtggccgtgctgaacaatcacgaagagctcgtgcagctattactggataaaggcgcagacgctagtgtaaagaatgagtttggaaagggcgtgttggagatggcccgtgtctttgacagacagagcgtcgtgagtttactagaggagagaaagaaaaagcagcgtccaaagaagtcatgcgtatgctag

SEQ ID NO: 336394 - DNA, 1116 bp, Artificial Sequence
  derived and/or modified sequence
ctgcagaagcagaagatcatgccacccagcaagccccacccccctgtggtgggcaaggtgacccaccacagcattgagctgtactgggacctggagaagaaggccaagaggcagggcccccaggagcagtggttccgcttcagcattgaggaggaggaccccaagatgcacacctacggcatcatctacacaggctacgccaccaagcacgtggtggagggcctggagcccaggaccctgtaccgcttccggctgaaggtgaccagccccagcggagaatgtgagtacagccccctggtgtctgtgtccaccacccggcccagcctgagcaagagcctggtgaagatccgcatggtgacctctgtgctgcacggccccccaacagaaaatactggagagcccatcagcagcgagcacctgcacagagctgtgtctgtgaatgatgaggacctgctggtgcgcatcctgcagggcggccgggtgaaggtggatgtgcccaacaagtttggcttcaccgccctgatggtggccgcccagaagggctacacccggctggtgaagatcctggtgtccaatggaacagatgtgaacctgaagaatggcagcggcaaggacagcctgatgctggcctgctacgccggccacctggatgtggtgaagtacctgcggagacatggagcctcctggcaggcccgggacctgggcggctgcacagccctgcactgggccgcagatggcggccactgcagcgtcatcgagtggatgatcaaggatggctgtgaggtggatgtggtggacaccggcagcggctggacccccctgatgagggtgtctgctgtgtctggcaaccagagggtggccagcctgctgattgatgctggggccaacgtgaatgtgaaggacagaaatggcaagacccccctgatggtggccgtgctgaacaaccacgaggagctggtgcagctgctgctggacaagggagcagatgcctctgtgaagaatgaatttgggaagggcgtgctggagatggcccgggtgtttgaccggcagagcgtggtgtccctgctggaggagaggaagaagaagcagaggcccaagaagagctgtgtgtgctag

SEQ ID NO: 336395 - DNA, 1116 bp, Artificial Sequence
  derived and/or modified sequence
ctgcagaagcagaagatcatgccccccagcaagccccacccccccgtggtcggcaaggtcacacatcactctatcgagctgtactgggacctggagaagaaggccaaaagacagggcccgcaggaacagtggtttagattctccatcgaggaggaagaccccaagatgcatacctacggcattatatatacaggctatgctacgaaacacgttgtcgaaggcctggaacccagaaccctgtataggtttcggttgaaggtgactagccccagcggcgagtgcgaatacagccccttagtgagtgtcagcaccacaagacctagcctgtccaaatcactggtgaagattagaatggtgaccagcgtgctgcacgggccccctaccgagaataccggagaacccatttcttcggagcatctacatcgggcagtaagcgttaacgacgaggacttgctcgttcggatcctgcagggtgggagagtgaaggtggatgttcccaataaatttggattcaccgcgcttatggttgcagcgcagaaaggctacacacgtctcgttaagattcttgtcagcaacgggacagacgttaaccttaagaatggctccggtaaggactccttaatgctcgcctgttacgctgggcacttggacgtggtgaaatatctaagacgccacggagcttcttggcaggccagagacctgggaggctgtactgccttacattgggccgctgatggcgggcactgcagtgtaatcgagtggatgatcaaggatggctgcgaagtggacgtggtcgataccggtagtggctggactccgctgatgagagtgagcgctgtttctgggaatcagcgagtggcctcgctgctgattgacgcaggggccaacgtcaacgttaaagatcgcaatggcaaaacccccctgatggtcgcagtcttgaataaccacgaggagctggtccagctactgttggacaagggtgccgacgcatccgtaaagaatgaatttggcaagggcgtgctggagatggccagggtgtttgatagacagtcagtcgtgagcttgttagaagaacgcaagaaaaaacaacgaccaaaaaagtcatgtgtatgttag

SEQ ID NO: 336396 - DNA, 1116 bp, Artificial Sequence
  derived and/or modified sequence
ctgcagaagcaaaagattatgccaccatccaagccgcacccccctgttgtgggcaaggtgacacatcacagtatcgagctatactgggatctggagaagaaagctaaacgccagggcccacaagaacagtggttccggttttcgatcgaggaggaagatcccaagatgcacacttatggcatcatctacacgggttacgccactaagcatgtggtggaggggctcgagcctcgcacattgtataggtttagactgaaagtcacctcaccatccggagaatgtgagtacagccccttagtatccgtgtctactacacgaccttctctgagtaagtccctggtgaaaatccgaatggttacaagcgtgttacatggccctcccaccgagaacactggggagcctatcagcagcgagcacctccatcgggcagtttcagtgaacgatgaagaccttctggttcggatcctgcaaggaggcagggttaaggtggatgttcctaataaatttggatttactgcactcatggttgccgctcaaaaaggttacacccgattggtaaagatcctggtgtccaacggtacggacgtgaatctgaagaatggaagcggcaaggactcgttaatgctggcctgctacgccggtcacctagacgtcgtgaagtacttgcgccgacatggtgcctcctggcaagctagggacttggggggatgcaccgccctacattgggctgccgacggtgggcactgctccgtgattgagtggatgattaaggatggctgtgaagtggacgtggtcgatactggctcaggctggacccctcttatgcgcgtcagcgctgtgagcgggaatcaacgagttgccagcttactgatcgacgcaggagctaatgtaaatgtgaaggaccgtaacggcaagacacctctcatggtggccgtgctcaataatcatgaagagttggttcagctgctgttagacaagggagccgatgcctcggttaagaacgaatttgggaagggagtgctggaaatggccagagtctttgaccggcagagtgtcgtgagtctccttgaggaacggaagaagaagcagagacctaagaagagctgtgtatgctag

SEQ ID NO: 336397 - DNA, 1116 bp, Artificial Sequence
  derived and/or modified sequence
ctgcagaagcagaagatcatgccccccagcaagccccacccccccgtggtgggcaaggtgacccaccacagcatcgagctgtactgggacctggagaagaaggccaagagacagggcccccaggagcagtggttcagattcagcatcgaggaggaggaccccaagatgcacacctacggcatcatctacaccggctacgccaccaagcacgtggtggagggcctggagcccagaaccctgtacagattcagactgaaggtgaccagccccagcggcgagtgcgagtacagccccctggtgagcgtgagcaccaccagacccagcctgagcaagagcctggtgaagatcagaatggtgaccagcgtgctgcacggcccccccaccgagaacaccggcgagcccatcagcagcgagcacctgcacagagccgtgagcgtgaacgacgaggacctgctggtgagaatcctgcagggcggcagagtgaaggtggacgtgcccaacaagttcggcttcaccgccctgatggtggccgcccagaagggctacaccagactggtgaagatcctggtgagcaacggcaccgacgtgaacctgaagaacggcagcggcaaggacagcctgatgctggcctgctacgccggccacctggacgtggtgaagtacctgagaagacacggcgccagctggcaggccagagacctgggcggctgcaccgccctgcactgggccgccgacggcggccactgcagcgtgatcgagtggatgatcaaggacggctgcgaggtggacgtggtggacaccggcagcggctggacccccctgatgagagtgagcgccgtgagcggcaaccagagagtggccagcctgctgatcgacgccggcgccaacgtgaacgtgaaggacagaaacggcaagacccccctgatggtggccgtgctgaacaaccacgaggagctggtgcagctgctgctggacaagggcgccgacgccagcgtgaagaacgagttcggcaagggcgtgctggagatggccagagtgttcgacagacagagcgtggtgagcctgctggaggagagaaagaagaagcagagacccaagaagagctgcgtgtgctag

SEQ ID NO: 336398 - protein, 199 aa, Artificial Sequence
  derived and/or modified sequence
  misc_feature (1)..(1): Xaa can be any naturally occurring amino acid
XEPISSEHLHRAVSVNDEDLLVRILQGGRVKVDVPNKFGFTALMVAAQKGYTRLVKILVSNGTDVNLKNGSGKDSLMLACYAGHLDVVKYLRRHGASWQARDLGGCTALHWAADGGHCSVIEWMIKDGCEVDVVDTGSGWTPLMRVSAVSGNQRVASLLIDAGANVNVKDRNGKTPLMSVVSLLEERKKKQRPKKSCVC

SEQ ID NO: 336399 - DNA, 499 bp, Artificial Sequence
  derived and/or modified sequence
tgggctgtgaaaaaaatcatttgttcaacactgatgtcgtgatacaaggacgtgaagatgtgagtcattgtgacatcaccagccagaattgctgggattcagtgagatgactcacagtaagagaaatcatgccaccctcaaagcctcatccacctgtcgtgggcaaagtgactcatcacagcattgaattatactgggatctggaaaagaaagccaaacgccaaggacctcaagagcagtggttcaggttctcgattgaagaagaagaccccaaaatgcacacttatggtatcatttatacgggatatgcaacgaagcatgttgttgaaggtctggaaccaaggacgctgtacagatttcgcctgaaggtcaccagcccctctggggagtgtgagtacagcccactcgtctcagtgtctacaaccagagagcccataagtagtgagcacttgcaccgggctgtcagtgtgaatgatgaagatttgctggtccgaatact

SEQ ID NO: 336400 - DNA, 753 bp, Artificial Sequence
  derived and/or modified sequence
gagagcccataagtagtgagcacttgcaccgggctgtcagtgtgaatgatgaagatttgctggtccgaatacttcaaggaggccgtgttaaggttgatgttcccaataagtttggctttaccgctctgatggttgctgcccagaaaggatacaccaggcttgtgaaaatcctagtttctaatggcacagacgtgaatctgaagaatggaagtggcaaggacagtctaatgctggcgtgctatgcgggacacctagatgttgtgaaatatctccgaagacatggcgcttcttggcaggctagagacctgggaggctgtacagctctgcactgggctgcagatggaggccactgcagtgtgattgagtggatgataaaggatggctgtgaggtagacgtcgtggacactggttcaggatggaccccactcatgagagtctctgcggtgtcgggaaatcagagggtggcctctcttctaattgatgctggggccaatgtgaatgtgaaggacagaaatggaaagacgccccttatgagtgtagtctccttattagaagaaaggaaaaaaaagcagaggccaaagaagtcttgtgtctgctgatgagagcaccactcatctgcgaaacgcacgtaaaacaaagtgaaccgtgactgttaaactagggatgggaaattctgcatcttggggggctgtacatttatttatttagttgaagattcactgatcccactttgaaatacatctttttacctaa

SEQ ID NO: 336401 - DNA, 375 bp, Artificial Sequence
  derived and/or modified sequence
atgcccccttcgaaacctcatccgcccgtggtcggaaaagtgacccaccattccatagaactgtactgggacctggagaagaaagccaagcgtcagggccctcaagagcagtggtttagattcagcattgaggaggaggatcctaagatgcacacatacggaatcatatacaccgggtacgctactaagcatgtggttgaaggattggagcctagaacgctctatcgatttcgtctaaaagtgaccagcccatccggggagtgtgagtactccccccttgtttctgtgtcgaccactagagaaccaatcagcagcgaacacctgcatagagccgtgtccgtgaacgatgaggaccttctggttaggatactttag

SEQ ID NO: 336402 - DNA, 600 bp, Artificial Sequence
  derived and/or modified sequence
taagaacctattagcagtgaacacctgcacagggcagtgagtgtcaacgacgaggacctcttggtacgcatccttcagggggggcgcgtaaaggttgatgtgccaaacaagtttggcttcacagcactcatggtggctgctcagaagggctatacccggctggtcaaaatactggtgagcaatggaacagacgtgaaccttaagaacggtagcggcaaggatagtctgatgttggcctgctatgctggccatctggacgtagtcaaatacctgaggcggcacggcgcttcatggcaggcacgggatcttggagggtgcactgctcttcactgggccgccgatggtgggcattgctctgtcattgagtggatgatcaaagatggttgcgaagttgacgtggtagacactggctccggctggacccccctcatgcgcgtttccgccgtttcagggaaccagcgggttgcctctctcttgattgatgctggcgctaacgttaatgtgaaagataggaacgggaaaactcccctgatgagcgtcgtgagtcttctcgaggagagaaagaaaaagcaacggccaaagaagagctgcgtctgctag

SEQ ID NO: 336403 - DNA, 375 bp, Artificial Sequence
  derived and/or modified sequence
atgccacccagcaagccccacccccctgtggtgggcaaggtgacccaccacagcattgagctgtactgggacctggagaagaaggccaagaggcagggcccccaggagcagtggttccgcttcagcattgaggaggaggaccccaagatgcacacctacggcatcatctacacaggctacgccaccaagcacgtggtggagggcctggagcccaggaccctgtaccgcttccggctgaaggtgaccagccccagcggagaatgtgagtacagccccctggtgtctgtgtccaccacccgggagcccatcagcagcgagcacctgcacagagctgtgtctgtgaatgatgaggacctgctggtgcgcatcctgtag

SEQ ID NO: 336404 - DNA, 600 bp, Artificial Sequence
  derived and/or modified sequence
tgagagcccatcagcagcgagcacctgcacagagctgtgtctgtgaatgatgaggacctgctggtgcgcatcctgcagggcggccgggtgaaggtggatgtgcccaacaagtttggcttcaccgccctgatggtggccgcccagaagggctacacccggctggtgaagatcctggtgtccaatggaacagatgtgaacctgaagaatggaagtggcaaggacagcctgatgctggcctgctacgccggccacctggatgtggtgaagtacctgcggcggcacggggcctcctggcaggcccgggacctgggcggctgcacagccctgcactgggccgcagatggcggccactgcagcgtgattgagtggatgatcaaggatggctgtgaggtggatgtggtggacaccggcagcggctggacccccctgatgagggtgtctgctgtgtctggcaaccagagggtggccagcctgctgattgatgctggggccaacgtgaatgtgaaggacagaaatggcaagacccccctgatgtctgtggtgtccctgctggaggagaggaagaagaagcagaggcccaagaagagctgtgtgtgctag

SEQ ID NO: 336405 - DNA, 375 bp, Artificial Sequence
  derived and/or modified sequence
atgccccccagcaagccccacccccccgtggtgggcaaggtgacccatcatagtattgagttgtactgggacttggagaagaaggctaagcgccaggggccccaggaacagtggtttcgcttttccatcgaggaggaggatccaaaaatgcacacgtacggcataatatataccggatacgctactaaacacgtcgtcgagggactcgaaccacggactctttaccggtttaggctgaaggttacatcgccttctggcgagtgtgaatatagcccattagtgtccgtcagtacgaccagagaacctatctcgtccgagcatctgcacagggctgtctcagtgaacgatgaggacctgctggtacgtatcctctag

SEQ ID NO: 336406 - DNA, 600 bp, Artificial Sequence
  derived and/or modified sequence
tgagagcccatcagcagcgagcacctgcaccgggccgtgagcgtgaacgatgaggatctgctcgtgcgcatcctccagggcggccgggtgaaggttgatgtgccgaataagtttgggtttacagcccttatggtggccgctcaaaagggttatacacgcctagtgaagattttggtgagtaacggcacagacgtaaacctgaagaatggaagcggtaaagactctttgatgctggcatgctacgcagggcacctggatgtagtgaaatacctgcgaaggcacggggcatcttggcaagcgagggatctaggggggtgcaccgcgctccactgggctgccgatggaggacattgctcagtgattgaatggatgattaaagatggatgcgaggtggacgtggttgataccgggtccggctggacaccgctgatgagagtgtcggctgtctccgggaaccagcgtgtggcctcgctgctaattgacgccggcgccaacgtcaacgtgaaggacagaaatggaaaaacgcctctcatgtccgttgtgtctctgctggaggagcggaaaaagaaacagaggccaaaaaagtcttgcgtctgctag

SEQ ID NO: 336407 - DNA, 375 bp, Artificial Sequence
  derived and/or modified sequence
atgccgccttcaaagccacacccgccagtggtgggcaaggtaacccaccacagcatcgagctttactgggatctcgagaagaaggcaaagcgacaggggcctcaggagcagtggttcagattcagtattgaagaggaggacccaaaaatgcacacgtacggaattatttacaccggctacgctaccaaacacgtggtggagggacttgagcccagaactctttatcgctttagactgaaagttacctccccaagcggcgagtgtgagtattccccactggtttcagtctcaaccacccgagaacccatttcgtccgagcatctccatcgagccgtctccgtgaatgatgaagacctgcttgtgagaatcttgtag

SEQ ID NO: 336408 - DNA, 600 bp, Artificial Sequence
  derived and/or modified sequence
tgagaaccaatcagctccgaacatctacacagagccgtttccgtaaatgatgaagacctcttggtacgaattctgcagggaggaagagtcaaagtggacgtgcccaataagttcggttttacggctctgatggtggctgctcagaagggatacactcggttagtcaagattcttgtcagcaacggaaccgacgtgaaccttaagaatggctccgggaaagacagcctcatgctggcttgttacgcaggccatcttgacgtggtgaaatacttacggagacacggtgcttcttggcaggccagagacctgggtggatgtacagcactgcactgggctgcagatgggggacactgtagtgtgatcgagtggatgattaaagatggctgtgaggtggacgtggtggatactgggagcggctggacccccttaatgcgcgttagcgcggtttctggcaatcagcgggttgcttcactgctcatagacgcgggagctaatgtgaacgtcaaggaccgcaacgggaaaacacctctgatgagcgtggttagccttttggaagagcgcaagaagaagcagcgtccaaaaaagtcatgcgtttgttag

SEQ ID NO: 336409 - DNA, 375 bp, Artificial Sequence
  derived and/or modified sequence
atgccccccagcaagccccacccccccgtggtgggcaaggtgacccaccacagcatcgagctgtactgggacctggagaagaaggccaagagacagggcccccaggagcagtggttcagattcagcatcgaggaggaggaccccaagatgcacacctacggcatcatctacaccggctacgccaccaagcacgtggtggagggcctggagcccagaaccctgtacagattcagactgaaggtgaccagccccagcggcgagtgcgagtacagccccctggtgagcgtgagcaccaccagagagcccatcagcagcgagcacctgcacagagccgtgagcgtgaacgacgaggacctgctggtgagaatcctgtag

SEQ ID NO: 336410 - DNA, 600 bp, Artificial Sequence
  derived and/or modified sequence
tgagagcccatcagcagcgagcacctgcacagagccgtgagcgtgaacgacgaggacctgctggtgagaatcctgcagggcggcagagtgaaggtggacgtgcccaacaagttcggcttcaccgccctgatggtggccgcccagaagggctacaccagactggtgaagatcctggtgagcaacggcaccgacgtgaacctgaagaacggcagcggcaaggacagcctgatgctggcctgctacgccggccacctggacgtggtgaagtacctgagaagacacggcgccagctggcaggccagagacctgggcggctgcaccgccctgcactgggccgccgacggcggccactgcagcgtgatcgagtggatgatcaaggacggctgcgaggtggacgtggtggacaccggcagcggctggacccccctgatgagagtgagcgccgtgagcggcaaccagagagtggccagcctgctgatcgacgccggcgccaacgtgaacgtgaaggacagaaacggcaagacccccctgatgagcgtggtgagcctgctggaggagagaaagaagaagcagagacccaagaagagctgcgtgtgctag

SEQ ID NO: 336411 - DNA, 1283 bp, Artificial Sequence
  derived and/or modified sequence
gttcgcccgcggaggccggggagcagccgaccatggagccccagatgggctgtgaaaaaaatcatttgttcaacactgatgtcgtgatacaaggacgtgaagatgtgagtcattgtgacatcaccagccagaattgctgggattcagtgagatgactcacagtaagagaaatcatgccaccctcaaagcctcatccacctgtcgtgggcaaagtgactcatcacagcattgaattatactgggatctggaaaagaaagccaaacgccaaggacctcaagagcagtggttcaggttctcgattgaagaagaagaccccaaaatgcacacttatggtatcatttatacgggatatgcaacgaagcatgttgttgaaggtctggaaccaaggacgctgtacagatttcgcctgaaggtcaccagcccctctggggagtgtgagtacagcccactcgtctcagtgtctacaaccagtgagtattcagaccgtccacactcacctctctctagatcaatggagatgacaagcaatttagaaaaaatattctgcctctcgtttggccttaccagaagcagaaatgatacaatttttaaacactgcaataatatttgctagttgggccttgccataacttgtaatgtcagggaagtctaattatgctttcacaaactgggagagctatttttgtgccagaactgtcctgttagtagccattcagcacaaaagggtggagtcacctttcttaggaaatgggccacaggggtgtgggctgggtaagcctaagcgtccccacacagccaagcaggctgcctgcctgagcgtccttgggcaagcagctccattcagtgtcatatccattttagacaaccccagggtgtgcgtcttaactcgccacacaaacccgattcctggggtcacggtgagtgagggtgaacgaacagtgctgctgcatccacggagaatcctgtgagggagagccccacatggagacctctgagcccttcagccggctgagttttaaggttgtttctgagattggtattttaaagcattttaaagatgctatctatgtccagggccatctctgagcaagagccttgtaaaaattaggatggtcacaagtgttctccacggcccacccactgaaaacacaggcaagtaatttttcagttgcacaaaggaaaccttccttttgtgagtaaagctctttttccgttttattccaggtagcatttggcttggaggtatgtgctttccatggctttcaactgtgtcctttaggca

SEQ ID NO: 336412 - DNA, 441 bp, Artificial Sequence
  derived and/or modified sequence
atgcctccttctaagccccaccctccagtcgtggggaaggtgacccaccattccatcgaactgtattgggacctggagaaaaaggccaagcggcaaggcccccaagagcagtggtttcggttttcgatcgaggaggaggatcccaagatgcatacctacggaatcatatataccggatacgctacaaaacatgtcgtggaaggcttggaacctagaaccttgtatagattccgtcttaaggtgacatctcctagtggggagtgtgagtacagccccttggtgtcagtgagcaccacgtcagagtattctgatcgcccccacagccctttgtccagatcaatggagatgaccagcaacctggaaaagatcttctgcctgtcattcgggttaaccaggagcagaaacgatacaattttcaaacattgcaacaacatatgttag

SEQ ID NO: 336413 - DNA, 441 bp, Artificial Sequence
  derived and/or modified sequence
atgccacccagcaagccccacccccctgtggtgggcaaggtgacccaccacagcattgagctgtactgggacctggagaagaaggccaagaggcagggcccccaggagcagtggttccgcttcagcattgaggaggaggaccccaagatgcacacctacggcatcatctacacaggctacgccaccaagcacgtggtggagggcctggagcccaggaccctgtaccgcttccggctgaaggtgaccagccccagcggagaatgtgagtacagccccctggtgtctgtgtccaccaccagcgagtacagcgaccggccccacagccccctgagccgctccatggagatgaccagcaacctggagaagatcttctgcctgagctttggcctgaccaggagcagaaatgacaccatcttcaagcactgcaacaacatctgctag

SEQ ID NO: 336414 - DNA, 441 bp, Artificial Sequence
  derived and/or modified sequence
atgccccccagcaagccccacccccccgtggtgggcaaggtgacccaccattctattgaactttattgggacctggagaaaaaagccaaacgccagggcccccaggagcagtggtttagatttagtattgaggaggaagatccaaaaatgcatacatatggtattatctatacggggtacgccacgaagcatgtggtggaggggctggagccacgcacattgtatcggttcagactgaaggtaacatccccctctggtgaatgcgaatactctccactggtctctgtttcaacaacgagcgagtacagcgacagaccccactcgcccttgtccagatctatggagatgacatccaatcttgagaaaatcttctgtctctcattcggcttgacgagaagccgcaacgacaccatcttcaagcactgtaataatatatgctag

SEQ ID NO: 336415 - DNA, 441 bp, Artificial Sequence
  derived and/or modified sequence
atgccaccctccaagccacacccacctgttgtgggcaaggtcacacatcatagtatagaattgtattgggatctcgaaaagaaggccaagcgtcagggccctcaggaacagtggttccggttctctattgaggaagaggaccccaagatgcacacgtatggtatcatctataccggctacgccactaagcatgtcgtggaaggcctggagcccaggaccctgtatcgctttcgtttgaaagttacaagcccgagtggggagtgcgagtactcgccgttggtcagcgtgagtacgacctccgagtattccgaccgaccacatagtcccttatcccgcagcatggaaatgaccagtaatctggagaaaatcttctgcctgtcgtttggtttgactaggtctagaaacgataccatttttaagcattgcaacaatatctgctag

SEQ ID NO: 336416 - DNA, 441 bp, Artificial Sequence
  derived and/or modified sequence
atgccccccagcaagccccacccccccgtggtgggcaaggtgacccaccacagcatcgagctgtactgggacctggagaagaaggccaagagacagggcccccaggagcagtggttcagattcagcatcgaggaggaggaccccaagatgcacacctacggcatcatctacaccggctacgccaccaagcacgtggtggagggcctggagcccagaaccctgtacagattcagactgaaggtgaccagccccagcggcgagtgcgagtacagccccctggtgagcgtgagcaccaccagcgagtacagcgacagaccccacagccccctgagcagaagcatggagatgaccagcaacctggagaagatcttctgcctgagcttcggcctgaccagaagcagaaacgacaccatcttcaagcactgcaacaacatctgctag

SEQ ID NO: 336417 - protein, 216 aa, Artificial Sequence
  derived and/or modified sequence
MQVEKPYESYIGANVRLRYFLKVTIVRRLTDLVKEYDLIVHQLATYPDVNNSIKMEVGIEDCLHIEFEYNKSKYHLKDVIVGKIYFLLVRIKIQHMELQLIKKEITGIGPSTTTETETIAKYEIMDGAPVKGESIPIRLFLAGYDPTPTMRDVNKKFSVRYFLNLVLVDEEDRRYFKQQEIILWRKAPEKLRKQRTNFHQRFESPESQASAEQPEM

SEQ ID NO: 336418 - DNA, 651 bp, Artificial Sequence
  derived and/or modified sequence
atgcaggtggagaagccctacgagagctacatcggcgccaacgtgagactgagatacttcctgaaggtgaccatcgtgagaagactgaccgacctggtgaaggagtacgacctgatcgtgcaccagctggccacctaccccgacgtgaacaacagcatcaagatggaggtgggcatcgaggactgcctgcacatcgagttcgagtacaacaagagcaagtaccacctgaaggacgtgatcgtgggcaagatctacttcctgctggtgagaatcaagatccagcacatggagctgcagctgatcaagaaggagatcaccggcatcggccccagcaccaccaccgagaccgagaccatcgccaagtacgagatcatggacggcgcccccgtgaagggcgagagcatccccatcagactgttcctggccggctacgaccccacccccaccatgagagacgtgaacaagaagttcagcgtgagatacttcctgaacctggtgctggtggacgaggaggacagaagatacttcaagcagcaggagatcatcctgtggagaaaggcccccgagaagctgagaaagcagagaaccaacttccaccagagattcgagagccccgagagccaggccagcgccgagcagcccgagatgtag

SEQ ID NO: 336419 - DNA, 651 bp, Artificial Sequence
  derived and/or modified sequence
atgcaggtggaaaaaccttatgaaagctacattggagccaacgtgcgtctgcgctattttctgaaggtgacgatagtgagacgactgacagatctcgtgaaggaatatgatcttattgtccatcagctcgctacataccccgatgtcaacaattcgattaagatggaggtcgggatcgaagattgtctgcacatcgagttcgagtataataaatccaagtaccacctaaaggacgtcatcgtgggtaagatttacttcctgctggtccggatcaaaatccaacacatggaactccagctcattaagaaggaaatcaccgggatagggcctagtacgacaacagagaccgagaccatcgccaagtatgagattatggacggcgctccagtcaagggtgagagcataccaatcagattatttctagccggatatgatccgacacctacaatgcgggacgtcaacaagaagttcagcgtacggtactttctgaacttggtcctcgtggacgaggaagataggagatactttaagcagcaggagattattctgtggcggaaggctcctgaaaagttgcgcaaacagcgcactaacttccaccagaggtttgaatccccagagtcacaggcatcagcagagcagcccgaaatgtag

SEQ ID NO: 336420 - DNA, 651 bp, Artificial Sequence
  derived and/or modified sequence
atgcaggtggagaagccctatgagagctacatcggggccaacgtgcggctgcgctacttcctgaaggtgaccatcgtgcggcggctgacagacctggtgaaggagtatgacctgattgtgcaccagctggccacctacccagatgtgaacaacagcatcaagatggaggtgggcatcgaggactgcctgcacattgaatttgagtacaacaagagcaagtaccacctgaaggatgtgattgtgggcaagatctacttcctgctggtgcgcatcaagatccagcacatggagctgcagctgatcaagaaggagatcaccggcatcggccccagcaccaccacagaaacagagaccatcgccaagtatgagatcatggatggagcccctgtgaagggggagagcatccccatccgcctcttcctggccggctatgaccccacccccaccatgagagatgtgaacaagaagttctctgtgcgctacttcctgaacctggtgctggtggatgaagaagatcggcgctacttcaagcagcaggagatcatcctgtggaggaaggcccctgagaagctgaggaagcagaggaccaacttccaccagagatttgagagccctgagagccaggccagcgctgagcagcctgagatgtag

SEQ ID NO: 336421 - DNA, 651 bp, Artificial Sequence
  derived and/or modified sequence
atgcaggtggagaagccctacgagagctacatcggcgccaacgtgcgcctgcggtattttctgaaggttacgatcgtacgccgtctcaccgatttggtaaaggagtacgacttgattgtccaccagctggcaacatatccagatgtgaataacagtatcaagatggaggtcggcatcgaagactgcttgcatatagagttcgagtataacaagtctaagtatcaccttaaagatgtaatcgtgggaaaaatttattttctgctggtcaggattaaaatacaacatatggagcttcagctcatcaaaaaggagatcactgggatcggcccgtcaactacgacagagactgagacgattgccaagtatgaaattatggatggcgccccagtgaagggtgaaagtataccgatccggctgttcctggccggttatgatccgacacctaccatgagagacgtgaacaagaagttcagcgtgagatactttctcaatctggtgctggtcgacgaggaagaccgacgttattttaaacagcaggaaatcattttatggaggaaggccccagagaagctccgcaaacagagaaccaatttccatcagcgcttcgagtcacccgagtctcaggccagcgccgaacaacccgagatgtag

SEQ ID NO: 336422 - DNA, 651 bp, Artificial Sequence
  derived and/or modified sequence
atgcaggtggagaagccgtacgaatcgtatattggcgctaacgtgcggctgcggtacttcctaaaagtgaccatcgtaaggcgacttacagacctcgtgaaggaatacgatctgatcgtgcaccagcttgcaacgtatcctgatgtgaacaactccataaaaatggaggtggggatagaggactgtctacacattgagtttgaatataataagagtaagtaccatctcaaagacgttattgtgggcaaaatttactttctcttggttagaattaagattcagcatatggagcttcagctgatcaagaaggaaataaccggcataggcccatctacgaccacagagacagaaaccattgctaagtacgagataatggacggagccccagtgaagggtgaatccattccaatccgcttgttcctggcagggtacgaccccactcctacgatgcgcgatgtgaacaagaagttcagtgtccgatattttctgaacctcgtcctggtggacgaggaggaccgtaggtattttaagcagcaagagattatcctctggcgcaaggcccctgagaaactccggaagcaaaggacaaactttcatcagagatttgagagtcccgagagccaggcttccgcagagcaaccggagatgtag

SEQ ID NO: 336423 - protein, 286 aa, Artificial Sequence
  derived and/or modified sequence
MCLFQLCGLVRYMEFGPPTVNDKLMRFFDHCEKFLTEVEKNATALYHVEAFKTGPEMQNILKKVAATLQVPVNDLNADLIQVAFFTCSFDLAIKGVKSPWCDVFDIDDAKVLEYLNDLKQYWKRGYGYTINSRSSCTLFQDIFQHLDKAVEQKQRSQPISSPVILQFGHAETLLPLLSLMGYFKDKEPLTAYNYKKQMHRKFRSGLIVPYASNLIFVLYHCENAKTPKEQFRVQMLLNEKVLPLAYSQETVSFYEDLKNHYKDILQSCQTSEECELARANSTSDEL

SEQ ID NO: 336424 - DNA, 861 bp, Artificial Sequence
  derived and/or modified sequence
atgtgtttgttccaactgtgtggacttgtgcgttatatggagtttggccctccaaccgtgaatgacaagctcatgagattttttgatcattgtgagaagtttctcaccgaggtggagaagaacgccacagctctctaccatgtggaggcttttaaaactggccccgagatgcagaatattctgaagaaggttgcagccactttgcaagttcctgtgaatgacctgaacgccgatctcattcaagtcgcattctttacttgctcttttgatttggcaatcaaaggcgtcaagagtccttggtgcgacgtattcgacatcgatgacgccaaggtgctggaatacctcaacgacctaaaacagtattggaagcgaggatacggttacacaatcaatagccggagttcatgcaccctcttccaggatatcttccagcatctggacaaggcggttgaacagaagcagcgttcacagccaatctcctccccagtgatcttgcagttcggccacgcggagactctgttgccgctgctgagtctgatgggatacttcaaagataaggaacccctgactgcttataattacaagaagcagatgcataggaagttccgcagcgggctgatagtgccttatgcgagcaacctcatattcgtgttatatcactgtgaaaacgctaagactcccaaggaacagttcagagtccaaatgctgctcaatgagaaagttcttcccctcgcctacagccaagaaaccgtcagtttttatgaagacctgaagaaccattataaggacattctccagtcctgtcagacttccgaggagtgcgaactggcccgagccaattctaccagcgacgagctgtag

SEQ ID NO: 336425 - DNA, 861 bp, Artificial Sequence
  derived and/or modified sequence
atgtgcctcttccagctgtgtggcctggtgcgctacatggagtttggaccacccaccgtgaatgacaagctgatgaggttctttgaccactgtgagaagttcctgacagaggtggagaagaatgccacagccctgtaccacgtggaggccttcaagacaggccctgagatgcagaacatcctgaagaaggtggccgccaccctgcaggtgcctgtgaatgacctgaatgctgacctgatccaggtggccttcttcacctgcagctttgacctggccatcaagggcgtgaagagcccctggtgtgatgtgtttgatattgatgatgccaaggtgctggagtacctgaatgacctgaagcagtactggaagaggggctacggctacaccatcaacagccgcagcagctgcaccctcttccaggacatcttccagcacctggacaaggctgtggagcagaagcagaggagccagcccatcagcagccctgtgatcctgcagtttggacatgctgagaccctgctgcccctgctgagcctgatgggctacttcaaggacaaggagcccctgacagcctacaactacaagaagcagatgcacaggaagttccgcagcggcctgattgtgccctatgccagcaacctgatctttgtgctgtaccactgtgaaaatgccaagacccccaaggagcagttccgggtgcagatgctgctgaatgagaaggtgctgcccctggcctacagccaggagaccgtgtccttctatgaggacctgaagaaccactacaaggacatcctgcagagctgccagaccagtgaagaatgtgagctggcccgggccaacagcaccagtgatgagctgtag

SEQ ID NO: 336426 - DNA, 2215 bp, Artificial Sequence
  derived and/or modified sequence
gcgttttgtgctgctgtcagtagtttttgtccaaagcagaatctttgtaaagtaatacagagttgggaaggttaattgagaaaataaaatactctgtttagactttggcttagagtgaaaaaatagattccatatgttgaattctctctcaccttgtaagtagaaactttgctgatttttagtttgctttctaaagttttccgtgcctgacagaaacagtacttattaatgtatgatgcaatttcattgcgtagcatctctacaacacatttaatcttcaatctctatttctttagccttttctagctattctcatgcgttacagccattataaatggggaataattttaccccaagagtttcctgaccaatatgtgcttatttcagctgtgcggattagtaagatatatggagtttggacctccaacagttaatgataaactaatgagattttttgatcactgtgagaagtttttaactgaagtagaaaaaaatgctacagctctttatcacgtggaagccttcaaaactggaccagaaatgcagaacattttaaaaaaagttgcagctactttgcaagtgccagtaaatgatttaaatgcagatttaattcaagtagcctttttcacctgttcatttgacctggcaattaaaggtgttaaatctccttggtgtgatgtttttgacatagatgatgcaaaggtattagaatatttaaatgatctgaaacaatattggaaaagaggatatgggtatactattaacagtcgatccagctgcaccttgtttcaggatatctttcagcacttggacaaagcagttgaacagaaacaaaggtctcagccaatttcttctccagtcatcctccagtttggtcatgcagagactcttcttccactgctttctctcatgggctacttcaaagacaaggaacccctaacagcgtacaattacaaaaaacaaatgcatcggaagttccgaagtggtctcattgtaccttatgcctcgaacctgatatttgtgctttaccactgtgaaaatgctaagactcctaaagaacaattccgagtgcagatgttattaaatgaaaaggtgttacctttggcttactcacaagaaactgtttcattttatgaagatctgaagaaccactacaaggacatccttcagagttgtcaaaccagtgaagaatgtgaattagcaagggctaacagtacatctgatgaactatgagtaactgaagaacatttttaattctttaggaatctgcaatgagtgattacatgcttgtaataggtaggcaattccttgattacaggaagcttttatattacttgagtatttctgtcttttcacagaaaaacattgggtttctctctgggtttggacatgaaatgtaagaaaagatttttcactggagcagctctcttaaggagaaacaaatctatttagagaaacagctggccctgcaaatgtttacagaaatgaaattcttcctacttatataagaaatctcacactgagatagaattgtgatttcataataacacttgaaaagtgctggagtaacaaaatatctcagttggaccatccttaacttgattgaactgtctaggaactttacagattgttctgcagttctctcttcttttcctcaggtaggacagctctagcattttcttaatcaggaatattgtggtaagctgggagtatcactctggaagaaagtaacatctccagatgagaatttgaaacaagaaacagagtgttgtaaaaggacaccttcactgaagcaagtcggaaagtacaatgaaaataaatatttttggtatttatttatgaaatatttgaacattttttcaataattcctttttacttctaggaagtctcaaaagaccatcttaaattattatatgtttggacaattagcaacaagtcagatagttagaatcgaagtttttcaaatccattgcttagctaactttttcattctgtcacttggcttcgatttttatattttcctattatatgaaatgtatcttttggttgtttgatttttctttctttctttgtaaatagttctgagttctgtcaaatgccgtgaaagtatttgctataataaagaaaattcttgtgactttactaccaggacttttctcttccccatgtcaaaatacaatcaataattgatggtaaaagtttggaaattcaagc

SEQ ID NO: 336427 - DNA, 861 bp, Artificial Sequence
  derived and/or modified sequence
atgtgcctgttccagctgtgcggcctggtgcggtacatggagttcggcccccctaccgtgaacgacaagctcatgcggttctttgaccactgcgagaaattcttgactgaagttgagaaaaacgcgaccgccctttaccatgtggaggcctttaagactggcccggaaatgcagaatatattaaaaaaggttgccgccacgcttcaagtaccagtgaacgatctcaacgctgatctgattcaggttgcctttttcacctgcagcttcgacctggctatcaagggggtgaaatcgccatggtgtgacgtgtttgacatcgacgatgctaaggtcctggaatacttgaatgaccttaagcagtactggaagcgcggctatggttacacaatcaatagccggagcagttgcacgctttttcaggacatcttccaacatctggacaaggctgtagagcagaagcagaggagccagcctattagcagcccagtgatcttacagtttggacatgctgaaacactgttgcctcttctgtcattgatgggttatttcaaggacaaagagccactgacggcctataactataagaagcagatgcacagaaaattccgatcaggactgattgttccctacgcctctaatttaattttcgtgctgtaccattgtgagaacgccaaaactcccaaggaacaattcagggttcaaatgttgttgaatgagaaggtactgccactcgcctattctcaggagactgtctctttctatgaggaccttaaaaatcactataaggacatcctgcaatcatgtcaaaccagcgaagaatgtgaactcgcgcgggctaacagtacctcagacgaactgtag

SEQ ID NO: 336428 - DNA, 861 bp, Artificial Sequence
  derived and/or modified sequence
atgtgcctctttcagttgtgtggccttgtgagatacatggagtttgggcctcctacagtcaatgataaattaatgcggttttttgaccactgcgagaagtttctgacagaagttgagaaaaatgcgactgccttgtatcacgtggaagcatttaagacgggcccagagatgcagaatatactcaaaaaagtcgctgctacactgcaggtccctgtgaacgacctcaacgcagacctcattcaggtagcatttttcacctgttcctttgacctggccatcaaaggggtcaaaagcccctggtgtgatgtgttcgatatcgacgatgcgaaagttctggaatacctgaacgacctgaagcagtactggaaacgcggatacggctacaccattaattctcgatctagctgcacgctgttccaagatatctttcaacacctggacaaagccgtggagcagaaacagagaagccagcccatttcctctccagtgattctgcagttcggacatgctgaaacactgctcccactcctttcactcatgggatactttaaagacaaagaaccactgactgcatacaattataaaaagcagatgcatcgaaagttcaggtccggcctcattgtgccatatgcatccaacctgatctttgtgctgtaccactgcgagaatgccaagaccccaaaagaacagtttcgagtccagatgctcttgaatgaaaaggtcctgcctctggcctacagtcaggagactgtttcgttttacgaggatctgaagaaccattataaggatatcctgcaaagctgccagacctctgaagaatgcgaactggcaagggctaacagtacttctgatgaactgtag

SEQ ID NO: 336429 - DNA, 861 bp, Artificial Sequence
  derived and/or modified sequence
atgtgcctgttccagctgtgcggcctggtgagatacatggagttcggcccccccaccgtgaacgacaagctgatgagattcttcgaccactgcgagaagttcctgaccgaggtggagaagaacgccaccgccctgtaccacgtggaggccttcaagaccggccccgagatgcagaacatcctgaagaaggtggccgccaccctgcaggtgcccgtgaacgacctgaacgccgacctgatccaggtggccttcttcacctgcagcttcgacctggccatcaagggcgtgaagagcccctggtgcgacgtgttcgacatcgacgacgccaaggtgctggagtacctgaacgacctgaagcagtactggaagagaggctacggctacaccatcaacagcagaagcagctgcaccctgttccaggacatcttccagcacctggacaaggccgtggagcagaagcagagaagccagcccatcagcagccccgtgatcctgcagttcggccacgccgagaccctgctgcccctgctgagcctgatgggctacttcaaggacaaggagcccctgaccgcctacaactacaagaagcagatgcacagaaagttcagaagcggcctgatcgtgccctacgccagcaacctgatcttcgtgctgtaccactgcgagaacgccaagacccccaaggagcagttcagagtgcagatgctgctgaacgagaaggtgctgcccctggcctacagccaggagaccgtgagcttctacgaggacctgaagaaccactacaaggacatcctgcagagctgccagaccagcgaggagtgcgagctggccagagccaacagcaccagcgacgagctgtag

SEQ ID NO: 336430 - protein, 342 aa, Artificial Sequence
  derived and/or modified sequence
MRVRTSTGIRAVDFFGAFYMSNTTDVELAGLDGDKTVTVEFKHDDRLNEESGALLQCALLYTSCAGQRRLRIHNLALNCCTQLADLYRNCETDTLINYMAKFAYRGVLNSPVKAVRDTLITQCAQILACYRKNCASPSSAGQLILPECMKLLPVYLNCVLKSDVLQPGAEVTTDDRAYVRQLVTSMDVTETNVFFYPRLLPLTKSPVESTTEPPAVRASEERLSNGDIYLLENGLNLFLWVGASVQQGVVQSLFSVSSFSQITSGLSVLPVLDNPLSKKVRGLIDSLRAQRSRYMKLTVVKQEDKMEMLFKHFLVEDKSLSGGASYVDFLCHMHKEIRQLLS

SEQ ID NO: 336431 - DNA, 717 bp, Artificial Sequence
  derived and/or modified sequence
atgcctggtagaaccggcctggcaggcgaaatgcctgtgggctgggggcccggccgggccggagctagtgagccgaacgaaagcacatgtgcaccagaggctttagacggccaccttggagtggcgcggcgggagggaccaattctgggaactctattgggcaggggcaaagggcactgccaagccttatcacagctgggtcactgcccctcgccagcatggaataattactccggcatgatggacataggggtcgccccctcaagagtgggccctagcggccactgtggtgtgctgcggagccatagcaggcctggggagctggccgtcgtcatgaatcacaaggttccacgccatcgccccgtctcctcggtcgggactgagctgctctgggtgcgctgcgcccccaagatggtgcagctccccatttgttgtttgctgttaacccctgcaccaggaattgggccgagggcccacgggcacctccatacgaatcttgagacaaggggtcttcctcgagggactagggagtcccagcaggctgaaggtgagggagaggcaattcaagaaggaaggggcgcctgcaagagggcacagaggaaggagggggagggcccgagaggcccatgcgttgttagagccgggggggtaggttggggaacacggcaggtcgctggtgaaccacctctggttgattgctcgacagccggtacttag

SEQ ID NO: 336432 - protein, 975 aa, Artificial Sequence
  derived and/or modified sequence
MQISGAVAPAPPSSGLGFGPPTSLASASGSFPNSGLYGSYPQGQAPPLSQAQGHPGIQTPQRSAPSQASSFTPPASGGPRLPSMTGPLLPGQSFGGPSVSQPNHVSSPPQALPPGTQMTGPLGPLPPMHSPQQPGYQPQQNGSFGPARGPQSNYGGPYPAAPTFGSQPGPPQPLPPKRLDPDAIPSPQLSELPPQQKTRHRIDPDAIPSPIQVIEDDRNNRGTEPFVTGVRGQVPPLVTTNFLVKDQGNASPRYIRCTSYNIPCTSDMAKQAQVPLAAVIKPLARLPPEEASPYVVDHGESGPLRCNRCKAYMCPFMQFIEGGRRFQCCFCSCINDVPPQYFQHLDHTGKRVDAYDRPELSLGSYEFLATVDYCKNNKFPSPPAFIFMIDVSYNAIRTGLVRLLCEELKSLLDFLPREGGAEESAIRVGFVTYNKVLHFYNVKSSLAQPQMMVVSDVADMFVPLLDGFLVNVNESRAVITSLLDQIPEMFADTRETETVFVPVIQAGMEALKAAECAGKLFLFHTSLPIAEAPGKLKNRDDRKLINTDKEKTLFQPQTGAYQTLAKECVAQGCCVDLFLFPNQYVDVATLSVVPQLTGGSVYKYASFQVENDQERFLSDLRRDVQKVVGFDAVMRVRTSTGIRAVDFFGAFYMSNTTDVELAGLDGDKTVTVEFKHDDRLNEESGALLQCALLYTSCAGQRRLRIHNLALNCCTQLADLYRNCETDTLINYMAKFAYRGVLNSPVKAVRDTLITQCAQILACYRKNCASPSSAGQLILPECMKLLPVYLNCVLKSDVLQPGAEVTTDDRAYVRQLVTSMDVTETNVFFYPRLLPLTKSPVESTTEPPAVRASEERLSNGDIYLLENGLNLFLWVGASVQQGVVQSLFSVSSFSQITSGLSVLPVLDNPLSKKVRGLIDSLRAQRSRYMKLTVVKQEDKMEMLFKHFLVEDKSLSGGASYVDFLCHMHKEIRQLLS

SEQ ID NO: 336433 - protein, 258 aa, Artificial Sequence
  derived and/or modified sequence
MQISGAVAPAPPSSGLGFGPPTSLASASGSFPNSGLYGSYPQGQAPPLSQAQGHPGIQTPQRSAPSQASSFTPPASGGPRLPSMTGPLLPGQSFGGPSVSQPNHVSSPPQALPPGTQMTGPLGPLPPMHSPQQPGYQPQQNGSFGPARGPQSNYGGPYPAAPTFGSQPGPPQPLPPKRLDPDAIPSPASPYVVDHGESGPLRCNRCKAYMCPFMQFIEGGRRFQCCFCSCINDGRVGQKSQQSALALSPTIRCSTSIM

SEQ ID NO: 336434 - DNA, 2928 bp, Artificial Sequence
  derived and/or modified sequence
atgcagatcagcggcgccgtggcccccgccccccccagcagcggcctgggcttcggcccccccaccagcctggccagcgccagcggcagcttccccaacagcggcctgtacggcagctacccccagggccaggccccccccctgagccaggcccagggccaccccggcatccagaccccccagagaagcgcccccagccaggccagcagcttcaccccccccgccagcggcggccccagactgcccagcatgaccggccccctgctgcccggccagagcttcggcggccccagcgtgagccagcccaaccacgtgagcagccccccccaggccctgccccccggcacccagatgaccggccccctgggccccctgccccccatgcacagcccccagcagcccggctaccagccccagcagaacggcagcttcggccccgccagaggcccccagagcaactacggcggcccctaccccgccgcccccaccttcggcagccagcccggccccccccagcccctgccccccaagagactggaccccgacgccatccccagcccccagctgagcgagctgcccccccagcagaagaccagacacagaatcgaccccgacgccatccccagccccatccaggtgatcgaggacgacagaaacaacagaggcaccgagcccttcgtgaccggcgtgagaggccaggtgccccccctggtgaccaccaacttcctggtgaaggaccagggcaacgccagccccagatacatcagatgcaccagctacaacatcccctgcaccagcgacatggccaagcaggcccaggtgcccctggccgccgtgatcaagcccctggccagactgccccccgaggaggccagcccctacgtggtggaccacggcgagagcggccccctgagatgcaacagatgcaaggcctacatgtgccccttcatgcagttcatcgagggcggcagaagattccagtgctgcttctgcagctgcatcaacgacgtgcccccccagtacttccagcacctggaccacaccggcaagagagtggacgcctacgacagacccgagctgagcctgggcagctacgagttcctggccaccgtggactactgcaagaacaacaagttccccagcccccccgccttcatcttcatgatcgacgtgagctacaacgccatcagaaccggcctggtgagactgctgtgcgaggagctgaagagcctgctggacttcctgcccagagagggcggcgccgaggagagcgccatcagagtgggcttcgtgacctacaacaaggtgctgcacttctacaacgtgaagagcagcctggcccagccccagatgatggtggtgagcgacgtggccgacatgttcgtgcccctgctggacggcttcctggtgaacgtgaacgagagcagagccgtgatcaccagcctgctggaccagatccccgagatgttcgccgacaccagagagaccgagaccgtgttcgtgcccgtgatccaggccggcatggaggccctgaaggccgccgagtgcgccggcaagctgttcctgttccacaccagcctgcccatcgccgaggcccccggcaagctgaagaacagagacgacagaaagctgatcaacaccgacaaggagaagaccctgttccagccccagaccggcgcctaccagaccctggccaaggagtgcgtggcccagggctgctgcgtggacctgttcctgttccccaaccagtacgtggacgtggccaccctgagcgtggtgccccagctgaccggcggcagcgtgtacaagtacgccagcttccaggtggagaacgaccaggagagattcctgagcgacctgagaagagacgtgcagaaggtggtgggcttcgacgccgtgatgagagtgagaaccagcaccggcatcagagccgtggacttcttcggcgccttctacatgagcaacaccaccgacgtggagctggccggcctggacggcgacaagaccgtgaccgtggagttcaagcacgacgacagactgaacgaggagagcggcgccctgctgcagtgcgccctgctgtacaccagctgcgccggccagagaagactgagaatccacaacctggccctgaactgctgcacccagctggccgacctgtacagaaactgcgagaccgacaccctgatcaactacatggccaagttcgcctacagaggcgtgctgaacagccccgtgaaggccgtgagagacaccctgatcacccagtgcgcccagatcctggcctgctacagaaagaactgcgccagccccagcagcgccggccagctgatcctgcccgagtgcatgaagctgctgcccgtgtacctgaactgcgtgctgaagagcgacgtgctgcagcccggcgccgaggtgaccaccgacgacagagcctacgtgagacagctggtgaccagcatggacgtgaccgagaccaacgtgttcttctaccccagactgctgcccctgaccaagagccccgtggagagcaccaccgagccccccgccgtgagagccagcgaggagagactgagcaacggcgacatctacctgctggagaacggcctgaacctgttcctgtgggtgggcgccagcgtgcagcagggcgtggtgcagagcctgttcagcgtgagcagcttcagccagatcaccagcggcctgagcgtgctgcccgtgctggacaaccccctgagcaagaaggtgagaggcctgatcgacagcctgagagcccagagaagcagatacatgaagctgaccgtggtgaagcaggaggacaagatggagatgctgttcaagcacttcctggtggaggacaagagcctgagcggcggcgccagctacgtggacttcctgtgccacatgcacaaggagatcagacagctgctgagctag

SEQ ID NO: 336435 - DNA, 2928 bp, Artificial Sequence
  derived and/or modified sequence
atgcagatctctggggcagtcgcccctgcgcccccaagctctgggctgggtttcggaccaccaacgtcactggcctcggcctcggggagcttccccaattcaggactctatggtagctacccccaaggccaagccccaccactctcgcaggcgcaagggcatcccggcatacagacccctcagcgcagcgcaccatcacaggccagtagtttcacccccccggcgagtgggggaccacggctgcccagtatgaccggtccattgctgcccgggcaatcctttggcgggccctcggtcagtcagcctaatcacgtctcatcccccccgcaggctctccctcccggcacccagatgacagggcccctgggtccactcccaccgatgcactcaccccagcagccaggttatcaaccacagcaaaatgggtctttcgggcctgcccgcggaccccaaagtaattatgggggtccttatccagctgcccccacgttcggatcccagcctggacctccacagccactgcctcctaagagacttgaccccgacgcaattccatcaccccagctgtctgagctgccgccccagcagaagacacgtcatagaatcgaccctgacgcgatcccatcaccaatccaggtgatcgaggatgaccgtaacaataggggtacagagcctttcgtaacaggcgtgcgaggtcaggtgcctccattggttactacaaattttctcgtcaaggatcagggaaacgcatctcctagatacattagatgtaccagttataacatcccttgcactagcgatatggcaaagcaggctcaagtccctctggcggcggtgattaagccacttgctcgcctgcctccagaagaggcctccccctacgttgtcgatcacggcgagtcaggccccttacgatgcaaccggtgcaaggcctatatgtgtccattcatgcagttcatcgaaggaggtcggagatttcaatgctgcttttgttcatgcattaatgacgttcccccccaatacttccagcatctggaccacacaggcaagagagtggatgcgtacgatcgacccgagttaagcttgggctcctatgagtttctcgctaccgtggactactgtaagaataataagtttccatctccacctgcctttatattcatgatagacgtgtcgtacaatgcaatacggactggcctggtgcgccttttgtgcgaggagttgaaatcactgctggatttccttccacgtgagggcggcgctgaggagagcgcaattagggtggggttcgtgacttataataaagtactgcatttctacaatgtcaaatctagcctcgctcagcctcaaatgatggtggtcagcgatgtggccgatatgttcgtccccctcctagacggcttcctcgtgaacgtgaacgagtcaagagccgttattactagcctgctggatcagatccctgaaatgtttgccgataccagggagactgagacagtgtttgttccagttattcaggccggtatggaggctctgaaagcagccgagtgcgccggtaaactcttcctctttcacacctcgcttcccatagcagaggccccaggaaagttgaagaatcgcgacgaccggaaattgatcaatactgataaggaaaagaccttgtttcagccccagaccggagcatatcagactctggccaaagagtgcgtcgcccaaggttgctgcgtcgatctcttcttatttccaaaccagtacgtcgatgtggcaacactctccgtggtgcctcagctgaccggcggatccgtgtataagtacgcgagttttcaagtggagaatgatcaggagcgctttctatccgatctcaggcgagacgtgcagaaagtggtggggttcgacgctgtgatgcgcgtccgcacttccactgggattagggcggtggactttttcggcgctttttacatgtccaacacaacagacgtcgagctcgccggcttggatggcgacaaaaccgtcacagtcgaatttaagcatgatgatcgcctaaacgaggagagcggggcgctcctgcagtgtgcactcctgtacacatcctgcgccggtcaaagacgccttaggattcataacctcgccttgaactgttgcacccaactcgctgatttgtacagaaactgtgaaactgacacacttataaattacatggctaaattcgcgtaccgcggcgtactcaattcaccagtgaaggcagtacgggataccctgataacccaatgcgcccagatactagcctgctaccgtaaaaactgcgcctcaccctctagtgctggtcagttaatcctccctgaatgcatgaagttgttaccagtctacctgaattgcgtgctgaagtccgacgttctccagccaggcgcggaggtgactacggacgatcgggcgtatgtaaggcagcttgtgacaagtatggacgtgacagaaaccaatgtgttcttctaccctcggctgctgcccctcacgaaatcgccagtagaatccacaaccgaaccccctgcagtcagggcaagcgaggaacgactcagcaacggggatatttacctccttgaaaatgggctgaatctgttcctgtgggttggcgcctcagttcagcaaggggtggtgcaaagtttgttttcggtttcctcattcagccaaatcacatccggtctgtctgtgctgcctgtactagataaccccctgagcaaaaaagttcgcggtctgatagactctctgcgggcacagcgcagcagatacatgaagcttaccgtggtcaagcaggaagacaagatggagatgctgttcaaacatttcctggttgaggacaagtcattaagcgggggtgctagttatgtcgactttctctgccacatgcacaaagaaatccggcagcttcttagttag

SEQ ID NO: 336436 - DNA, 2928 bp, Artificial Sequence
  derived and/or modified sequence
atgcagatcagcggggctgtggccccagccccacccagcagcggcctgggcttcggcccccccaccagcctggccagcgccagcggcagcttccccaacagcggcctgtatggcagctacccccagggccaggccccacccctgagccaggcccagggccaccctggcatccagaccccccagaggtctgcccccagccaggccagcagcttcaccccaccagccagcggcggcccccggctgcccagcatgacaggccccctgctgcccggccagagctttggaggccccagcgtgtcccagcccaaccacgtgagcagccccccccaggccctgcccccaggcacccagatgacaggccccctgggccccctgccccccatgcacagcccccagcagcccggctaccagccccagcagaatggcagctttggacctgcccggggcccccagagcaactacggcggcccctacccagctgcccccaccttcggcagccagcccggccccccccagcccctgccccccaagaggctggaccctgatgccatccccagcccccagctgtctgagctgcccccccagcagaagaccaggcacagaattgatcctgatgccatccccagccccatccaggtgattgaagatgacaggaacaacagaggaacagagccctttgtgactggagtgcggggccaggtgccccccctggtgaccaccaacttcctggtgaaggaccagggcaatgccagcccccgctacatccgctgcaccagctacaacatcccctgcaccagtgacatggccaagcaggcccaggtgcccctggccgccgtcatcaagcccctggcccggctgcccccagaggaggccagcccctacgtggtggaccacggggagagcggccccctgcgctgcaaccgctgcaaggcctacatgtgccccttcatgcagttcatcgagggcggccgccgcttccagtgctgcttctgcagctgcatcaatgatgtgcccccccagtacttccagcacctggaccacacaggcaagagggtggatgcctatgacaggcctgagctgagcctgggcagctatgagttcctggccaccgtggactactgcaagaacaacaagttccccagccccccagccttcatcttcatgattgatgtgtcctacaatgccatcagaacaggcctggtgcggctgctgtgtgaggagctgaagagcctgctggacttcctgccccgggagggcggcgctgaggagagcgccatccgggtgggctttgtgacctacaacaaggtgctgcacttctacaacgtgaagagcagcctggcccagccccagatgatggtggtgtctgatgtggccgacatgtttgtgcccctgctggatggcttcctggtgaatgtgaatgaaagcagagctgtgatcaccagcctgctggaccagatccctgagatgtttgctgacacccgggagacagagaccgtgtttgtgcctgtgatccaggccggcatggaggccctgaaggccgcagaatgtgccggcaagctgttcctgttccacaccagcctgcccatcgccgaggcccctgggaagctgaagaacagagatgacaggaagctgatcaacacagacaaggagaagaccctcttccagccccagacaggagcctaccagaccctggccaaggaatgtgtggcccagggctgctgcgtggacctcttcctgttccccaaccagtatgtggatgtggccaccctgtctgtggtgccccagctgactggaggctctgtgtacaagtatgccagcttccaggtggagaatgaccaggagcgcttcctgagtgacctgcggagagatgtgcagaaggtggtgggctttgatgctgtgatgagggtgaggaccagcacaggcatccgggctgtggacttcttcggggccttctacatgagcaacaccacagatgtggagctggccggcctggatggagacaagacagtgacagtggagttcaagcatgatgaccggctgaatgaggagagcggggccctgctgcagtgtgccctgctgtacaccagctgtgccggccagaggcggctgcgcatccacaacctggccctgaactgctgcacccagctggccgacctgtacagaaactgtgaaacagacaccctcatcaactacatggccaagtttgcctacagaggagtgctgaacagccctgtgaaggctgtgcgggacaccctcatcacccagtgtgcccagatcctggcctgctacaggaagaactgtgccagccccagcagcgctggccagctgatcctgcctgagtgcatgaagctgctgcctgtgtacctgaactgtgtgctgaagagtgatgtgctgcagcccggggctgaggtgaccacagatgaccgggcctacgtgcggcagctggtgacctccatggatgtgacagagaccaacgtgttcttctacccccggctgctgcccctgaccaagagccctgtggagagcaccacagagcccccagctgtgcgggccagcgaggagcggctgagcaatggagacatctacctgctggagaatggcctgaacctcttcctgtgggtgggcgcctctgtgcagcagggcgtggtgcagagcctcttctctgtgtcctccttcagccagatcaccagcggcctgtctgtgctgcctgtgctggacaaccccctgagcaagaaggtgcggggcctgattgacagcctgcgggcccagaggagccgctacatgaagctgactgtggtgaagcaggaggacaagatggagatgctgttcaagcacttcctggtggaggacaagagcctgagcggcggggccagctatgtggacttcctgtgccacatgcacaaggagatccggcagctgctgtcctag

SEQ ID NO: 336437 - DNA, 2928 bp, Artificial Sequence
  derived and/or modified sequence
atgcagatcagcggcgccgtggcccccgccccccccagcagcggcctcggattcgggcctcccacttccctagccagcgcttccgggtccttccccaactccggactctacggcagctaccctcaagggcaagcacctcccctctcccaggcccagggccatccgggtattcaaacgccgcagcggtctgcaccctctcaggcatcaagtttcacaccccctgcctctggaggaccgcgcttaccttctatgacgggcccactgctccccggccaatctttcgggggacctagcgtatcacagccaaatcatgtatccagtcctcctcaagctcttcctccgggcacacagatgacaggacctctcggacccctgccacctatgcattcaccacaacagcctgggtatcagccccagcagaacggcagcttcgggccagccagaggcccccagtccaactatggaggaccttacccagccgcccccacatttgggtctcagcctggccccccccagcctctgccgcccaaacggcttgatccagacgccattcctagtccacagctttcagaactgcccccacagcaaaagacacgccatagaatcgaccctgatgccatccccagccccattcaagtcatagaggacgaccggaataatcggggaacggagccatttgtgactggagtccgcgggcaggttccaccactggtgaccacaaatttcctggtaaaagaccagggtaacgcctcaccgcgatatataaggtgcacttcatacaacatcccttgtacttctgatatggctaagcaggcccaggttcccttagccgcagtgattaaacctctggcccgactgccccccgaagaggcttctccatatgtggttgaccacggcgaaagcggacctctacgatgtaaccgatgtaaggcctacatgtgtccattcatgcaatttattgaaggtgggcgcaggttccagtgttgcttttgtagttgtatcaacgacgtcccgccgcaatactttcaacatttagatcataccggaaagagggttgatgcttatgatagaccagagctgtcgctgggctcttatgagttcctggccacagttgattactgtaaaaacaacaagtttccttcaccgcctgcatttattttcatgattgacgtttcttataacgctatcaggaccggcttggtgagactcctgtgcgaagaactaaaatcacttctggatttcctgccccgggagggcggtgcagaggaatcggccataagggtggggtttgtgacttacaacaaagtgcttcacttctataatgttaagtcctctttggctcagccgcagatgatggtggtatcagatgtcgcggatatgtttgtccccctgttggacggcttcctggtgaacgtgaatgaatctagagccgtgataacatcactccttgaccagatacctgaaatgtttgctgacacaagggagactgaaactgtgttcgtgcccgtgatccaggcgggtatggaggcactaaaagccgcggagtgtgctggaaagttattcctgtttcacacatccctgcccatcgcagaggctcctgggaaacttaagaaccgggacgaccggaagctaattaacactgataaagagaagaccctcttccagccccagacaggtgcctaccaaacattggctaaagagtgcgtggcacagggatgttgcgtggacctgtttttgttcccgaatcagtatgtggatgtggcaacactgtcagttgtgcctcagttgacaggtggtagtgtgtataaatacgcttccttccaggttgagaatgatcaggaaagatttctgtctgatctcagaagagacgttcagaaggtggtaggctttgacgctgtcatgagggtgcggacatccacaggtattcgggctgttgattttttcggagccttttacatgtccaacactacagatgttgagctagctggccttgatggggataagactgtcactgtggaatttaagcatgacgataggctaaacgaagagagcggagcactgttacagtgtgcacttctttatacatcttgcgccggtcaacgtcggcttcgcattcacaatctggctcttaattgctgcacccagttggccgatttgtatcgtaattgcgagaccgataccctcatcaattacatggcaaagttcgcatataggggagtgctgaattcgcctgtgaaggctgtcagggataccttgattacacagtgcgctcagattctcgcatgctataggaagaactgtgcttcaccctctagcgccggacaactcattctcccagaatgtatgaagttactgcctgtctatctgaattgtgtgttgaagtctgacgtcctgcaacctggcgccgaggtgaccaccgacgaccgcgcatacgtgcgacagctcgtgacaagtatggacgtgaccgaaacaaatgtcttcttctacccccgtctgctgcccctgacgaagtccccagtagagtctaccactgagccccctgctgtcagagccagcgaggagcgattgtccaatggcgacatttacctcctcgaaaacggtttgaacctattcttgtgggttggggcaagtgtgcagcagggtgtggtgcaatccctgttttccgtcagttctttcagccagatcacaagcggtctgtccgtcctgccggtactagacaaccccctgagtaagaaggtgcgggggctgatcgactccctcagagcacaacgctctagatacatgaagttaacagtggtgaagcaggaggacaagatggagatgctgtttaaacacttcctggtggaggacaaatctctttctggtggcgcgagttatgtcgattttctatgccatatgcacaaggagatccgccagcttctttcgtag

SEQ ID NO: 336438 - DNA, 2928 bp, Artificial Sequence
  derived and/or modified sequence
atgcaaattagcggcgcagtagcccctgcacctcccagctccggcctggggtttggtccccctacttccctggcctcggctagtggtagttttccaaatagcggactctacggcagttatcctcagggccaggctcccccactgtctcaggcccagggccatcccggtattcagactccacagaggtctgcaccttctcaggcttcatcctttacacctccagcaagtgggggtccccgattaccgtctatgacgggaccccttctgccaggacaaagctttggcggtccatccgtgagtcagccaaatcacgtgtctagcccaccccaggccttgccccctgggactcagatgacgggccctttaggtcctctgccaccaatgcacagtcctcaacagcccggttaccagccacagcaaaatggaagctttggacccgcaagggggccacagtctaattacggaggcccttacccggctgctccaacgtttgggagtcaaccaggtccacctcagcctcttccacctaagcgcttggaccccgacgcaatcccctccccccagctatcagagctgcctccccaacaaaagacacggcatcgaattgatcccgatgccatcccttcgcctatccaggtgatcgaagacgatcgtaacaatcgcggtacagagccgtttgtgactggggtacgaggtcaggttcctccactggtgactacaaactttctagtgaaggatcagggcaatgcatctccacgctacataaggtgcaccagctataatattccatgcacttccgacatggctaagcaagcacaggtgccattggcagctgtcatcaagcccctggccagactgccacccgaggaagcctccccttacgtcgtggatcatggcgaatcaggccctctgcgttgcaatcggtgcaaggcctacatgtgtccgttcatgcaattcatcgagggtggaaggcggttccagtgctgtttctgcagctgcattaatgatgtgccgccacagtattttcagcacctggatcatactggcaagcgtgttgacgcctacgatcgtccagagctgtctctaggcagctacgagttcctggcgaccgtggattattgcaagaataataaattcccatcgccaccagcttttatcttcatgattgatgtttcctacaacgctatccggaccggattggtgaggctgctttgcgaagaactgaaatcactcttggacttcctgccacgcgagggcggtgccgaggagtctgccatccgggtaggatttgtgacctataacaaagtgttgcacttctacaacgttaagagctctctggcacagcctcagatgatggttgtttctgacgtggcggatatgtttgtgcctttactggacgggttccttgtgaacgtgaacgagtcccgcgcagtcattacttccctgttggatcagattccagaaatgtttgccgatacacgtgaaacggagacggtctttgttcccgttatacaggccggaatggaagcgttaaaagctgcagaatgtgctgggaagttattcctcttccacacctcactgccaatcgcggaagcaccaggcaagttaaagaacagggacgaccgcaaactgattaataccgataaagaaaagacactgttccagccccagactggagcctatcagactctggcaaaagaatgcgtagcacaggggtgctgtgtggacctcttcctgtttcccaatcagtatgtcgatgttgcaaccctctctgtggttccgcagctgactggtggcagtgtgtataaatacgccagctttcaggtggaaaacgatcaggagcgttttctttcggaccttcgtagggatgtgcagaaggttgtcgggttcgacgcagttatgagggttcggacatccaccggtatcagagcggtcgatttctttggggcattctacatgtccaacaccaccgacgtcgagttggctggcctggatggtgacaaaaccgtcacggtcgagtttaagcacgatgatcggctgaatgaggagtctggcgcactcttgcagtgcgctttgttatacacttcttgcgctggccagcggagattgcggatccacaacctcgcacttaattgctgtacccaacttgctgatctttataggaactgtgaaactgacaccctgattaattatatggcaaagtttgcgtacagaggtgtgctgaactctccagtgaaggctgtccgagatacactgatcacccaatgtgctcagattctggcttgctacaggaaaaattgcgcttccccatcctctgccggacagttgattctcccagaatgcatgaagttactcccagtgtatctgaattgtgtgcttaagtcagatgtacttcagccaggggctgaagtgaccaccgatgatagagcctatgtgcggcaactggtaacgtctatggatgtgaccgagactaacgtctttttctacccgaggctgcttcccctgactaaatccccagttgagtcaactactgagcctccagcagtgcgggctagcgaggaacgtctttctaacggagacatttatctactcgaaaacggtcttaatctgtttctgtgggtgggcgcaagcgtccaacagggtgtggtccagtctctcttctctgtgagctcattcagccaaattacgagcggtctgagcgtcctgcctgttcttgacaatcccttatcaaagaaggtcagggggctgattgatagtctaagagcccagcgctcccgttatatgaagctaactgtagtgaaacaggaggataagatggagatgttgttcaagcacttcttggtagaagacaaaagcctgtctggtggagcgtcatatgtcgattttctgtgccacatgcataaggaaataaggcaattgctgtcctag

SEQ ID NO: 336439 - DNA, 3424 bp, Artificial Sequence
  derived and/or modified sequence
gacgttaggaacgaagtctaacctggatctggagccgggtgagatcaaattgggaatgctttcataatgaacgtcaaccagtcagttccacctgtgccaccatttgggcagccccagcccatctacccagggtatcatcagtccagctatggtgggcaatcagggtccacagcccccgccattccctatggagcctacaatggcccagtaccaggctatcagcaaacacctccccaaggctgcctgggtctcagccatttgggtccccattggcccctgtgggcaaccagccacctgtgcttcagccctatggccctcccccgacaagtgcacaggtggctacgcagctgtctggaatgcagatcagcggtgctgtggccccagcccctccttcttcagggctgggctttggcccaccaacatcgctggcttcagcctcaggaagtttccctaactctggtctgtatggctcctatcctcagggccaggctcctccccttagccaggcccaaggtcatcctgggatccagactccccagcgatctgccccatcacaggcctccagcttcacacccccagcttcagggggtcctcggctgccttcgatgactggtccactcctgcctggacagagttttggagggccctcagtgagccagcccaaccatgtgtcttcacctcctcaagctctgccccctggcacccagatgactgggcccctgggaccactgccacctatgcactccccgcagcagccaggctatcagccccaacaaaatggttccttcggaccagcccggggccctcagtctaattatggaggcccctacccagcagcacccacctttggcagtcagcctgggcctcctcagccactgcctcctaagcgcctggaccctgatgccatcccaagccctcaactcagtgagctgcctcctcagcagaaaaccaggcacagaatagaccccgatgccattcctagtccaattcaggtcattgaagatgacaggaacaaccggggtacagagccatttgttactggagtacggggccaggtgccacccttagtcactaccaacttcctggtgaaagaccaagggaatgcaagtccccgatacatccgatgtacatcctataatatcccttgcacatctgacatggctaagcaggctcaggtgcccctggcagcagtcatcaaaccgctggcaaggctgcccccagaggaggcttcaccgtatgttgtggaccatggggaatctggccctttgcgctgcaaccgctgcaaagcatacatgtgtcccttcatgcagttcattgaaggagggaggcgtttccagtgctgtttttgcagctgtatcaatgatgttcccccccagtattttcagcacctggatcataccggcaaacgtgtggatgcttatgaccgccctgagctatccctgggctcttatgaattcttggccactgtagattactgcaagaacaataagttccccagccctcctgcctttatcttcatgattgacgtctcctacaatgccatcaggactggtcttgttaggctcctctgtgaggagctcaagtcactgttagactttctacctagggagggtggggcagaagagtcagcaatccgcgttggctttgtcacctacaataaggtgctccacttctataatgtgaagagctcattggcccagccacagatgatggttgtgtctgatgtggctgacatgtttgtgccactgctggatggcttcctggtcaacgtcaatgagtctcgggcagttatcaccagcttattggatcagattccagaaatgtttgcagacacaagggaaacagagacagtatttgtaccagttatccaggctggaatggaggctctgaaggctgctgagtgtgcagggaagctctttctattccatacatccctgcccattgcagaggccccagggaaactgaagaacagagatgacaggaagctgatcaatacagacaaggagaagactctgttccagcctcagacaggtgcctatcagaccctggccaaagagtgtgtggcccaaggctgctgtgtagatctctttctcttccctaaccagtatgtggatgtggccacactctctgttgtgccccagctcactggtggctctgtctacaaatatgcttcctttcaggtggagaacgaccaggagcggttcctgagtgacctgcgtcgtgatgtccagaaggttgttggctttgatgctgtgatgcgggtccggacaagcactggtatccgtgctgtagatttctttggagctttctacatgagcaacacgacagatgtggagctggctgggctagatggggacaaaacagtgactgtggagttcaagcatgacgatcggctcaatgaagagagcggagctctcctgcagtgtgccctgctttacaccagctgtgcagggcagcgtcggctccgcatccataatctggccctgaactgctgcacccagctggctgatctatatcgaaactgtgagactgacacgctcatcaactacatggccaagtttgcatatcggggagtcctgaatagccctgtgaaggctgttcgtgacacgctcatcacccagtgtgcccagatcctggcctgttacagaaagaactgtgctagcccctcctctgcaggacagttgatccttcctgagtgcatgaagctactcccagtttacctgaactgtgtgttgaagagtgatgtcctgcagcctggagctgaagtcactactgatgaccgtgcctatgtccgacagctagttacctccatggatgtgactgagaccaatgtcttcttctaccctcggctcttacctttgacaaagtctcccgttgagagtactaccgaaccaccagcagttcgagcctctgaagagcgtctaagcaatggggatatatatttactggagaatgggctcaacctcttcctctgggtgggagcaagcgtccaacagggtgttgtccagagccttttcagcgtctcctccttcagtcagatcaccagtggtttgagtgttctgccagttctggataatccactgtccaagaaggttcgaggcctcattgatagcttacgggcacagagatcccggtacatgaagcttaccgtggtgaaacaggaagacaagatggagatgctgttcaagcacttcctggtggaagacaagagtctgagtgggggagcatcttatgtggactttctctgtcatatgcacaaggagattcggcagctactgagctaaagcaagtgggtaaatggcatagggcccaggctagcttccagaaagcaccccaggatgtcagagaaattgggacagtaacatatcttatgtaagctgacctcagtctctctggggggagggggagatataaggagacacct

SEQ ID NO: 336440 - DNA, 777 bp, Artificial Sequence
  derived and/or modified sequence
atgcagatcagcggcgccgtggcccccgccccccccagcagcggcctgggcttcggcccccccaccagcctggccagcgccagcggcagcttccccaacagcggcctgtacggcagctacccccagggccaggccccccccctgagccaggcccagggccaccccggcatccagaccccccagagaagcgcccccagccaggccagcagcttcaccccccccgccagcggcggccccagactgcccagcatgaccggccccctgctgcccggccagagcttcggcggccccagcgtgagccagcccaaccacgtgagcagccccccccaggccctgccccccggcacccagatgaccggccccctgggccccctgccccccatgcacagcccccagcagcccggctaccagccccagcagaacggcagcttcggccccgccagaggcccccagagcaactacggcggcccctaccccgccgcccccaccttcggcagccagcccggccccccccagcccctgccccccaagagactggaccccgacgccatccccagccccgccagcccctacgtggtggaccacggcgagagcggccccctgagatgcaacagatgcaaggcctacatgtgccccttcatgcagttcatcgagggcggcagaagattccagtgctgcttctgcagctgcatcaacgacggcagagtgggccagaagagccagcagagcgccctggccctgagccccaccatcagatgcagcaccagcatcatgtag

SEQ ID NO: 336441 - DNA, 777 bp, Artificial Sequence
  derived and/or modified sequence
atgcagatcagcggcgctgtcgccccggctcccccctccagcggactggggttcggaccacctacgtcgctggcaagcgccagcggtagttttcccaatagcgggctgtatggatcctacccacagggacaagcacctcccctgagccaggcccaggggcacccagggatccagaccccacagagatccgcgccatctcaggcgagctcttttacacctcccgcctctggaggccctcggctgcctagcatgacgggccccttattacctggccaatcctttggcggcccttctgtgagccaacccaaccacgtgtctagtccaccccaggcccttcctcctggaacacaaatgacagggcccctcgggcctcttccccccatgcactccccgcagcagcctggctaccagccccagcagaatggaagcttcggacctgcaagggggccacagagcaattacggtggcccttatcccgctgcgcccacatttggcagtcagcctggtcctcctcagccactcccgcctaaacgactggaccccgacgccatcccttctcccgccagcccttacgtggtggatcacggggagtcaggaccgcttaggtgcaaccggtgtaaggcgtacatgtgtccatttatgcagttcatcgagggcggccggcggtttcagtgctgtttctgctcctgtattaatgacgggcgcgtgggacagaagtctcagcagtctgcactggctctcagcccaactatccgctgttcaacttccattatgtag

SEQ ID NO: 336442 - DNA, 777 bp, Artificial Sequence
  derived and/or modified sequence
atgcagatcagcggggctgtggccccagccccacccagcagcggcctgggcttcggcccccccaccagcctggccagcgccagcggcagcttccccaacagcggcctgtatggcagctacccccagggccaggccccacccctgagccaggcccagggccaccctggcatccagaccccccagaggtctgcccccagccaggccagcagcttcaccccaccagccagcggcggcccccggctgcccagcatgacaggccccctgctgcccggccagagctttggaggccccagcgtgtcccagcccaaccacgtgagcagccccccccaggccctgcccccaggcacccagatgacaggccccctgggccccctgccccccatgcacagcccccagcagcccggctaccagccccagcagaatggcagctttggacctgcccggggcccccagagcaactacggcggcccctacccagctgcccccaccttcggcagccagcccggccccccccagcccctgccccccaagaggctggaccctgatgccatccccagccctgccagcccctacgtggtggaccatggagagagcggccccctgcgctgcaaccgctgcaaggcctacatgtgccccttcatgcagttcattgaaggaggaagacgcttccagtgctgcttctgcagctgcatcaatgatggccgggtgggccagaagagccagcagagcgccctggccctgagccccaccatccgctgcagcaccagcatcatgtag

SEQ ID NO: 336443 - DNA, 777 bp, Artificial Sequence
  derived and/or modified sequence
atgcagatcagcggcgccgtggcccccgccccccccagcagcggccttggttttggacctccgaccagtctggcctctgccagcggatcgtttcctaacagcggcttatatggctcatatccacaggggcaggcaccccctctctcccaggctcaaggccacccaggcatccagactcctcaaaggtctgcaccatcccaggccagctccttcaccccacccgctagcggggggccgaggctgccttcgatgacaggcccacttctaccagggcagtcttttggtgggcctagcgtcagccagcctaaccacgtttcaagtccccctcaggccctgcctccagggacgcaaatgacaggacccctgggcccgctgccgccaatgcatagtccacagcagccaggttatcagcctcagcagaatggaagtttcggtccagctcggggacctcagtccaattacggtggcccttacccggctgccccaacatttggctctcaacctggtccgcctcaaccgcttccaccaaaacggcttgatcccgacgccatcccttcacctgcttcaccctatgttgtcgatcatggcgagtcaggacccttgcgctgcaacagatgcaaggcttacatgtgcccctttatgcagtttatcgagggcgggcgaagattccaatgttgtttctgcagctgtataaacgatggacgcgtggggcagaagtcccagcaaagtgcactggcgctgtctcctacaataagatgtagcactagtattatgtag

SEQ ID NO: 336444 - DNA, 777 bp, Artificial Sequence
  derived and/or modified sequence
atgcagatatcgggagcggttgcacccgctccaccttcctcagggctgggatttgggcctcccaccagcctggcctctgcatctgggagtttccctaacagcggcttgtatggctcttatcctcaagggcaggctcctccactgagccaggcccagggccacccgggaatacagacacctcagcggtcggcccctagccaggctagctcatttacgccaccagcctccggcggacctaggttgccctcaatgacagggcctctgctgcctgggcagagctttgggggaccttctgtctctcaaccaaatcatgtttcttcaccccctcaggctctccctcctggaacgcagatgacaggaccactcggccctctgcctccaatgcactcccctcagcagcctggctatcagccccagcagaacgggtcttttgggcctgccagaggaccgcagtcgaactatggcggtccgtacccggctgccccaactttcggctcacagccaggtcctcctcagccacttcccccaaagagactagacccagacgccatccctagccctgcctctccttacgtcgtcgaccacggcgagagcggaccacttcgatgcaaccgctgtaaggcttatatgtgtccatttatgcagttcatcgaagggggtagacgcttccagtgttgcttctgtagctgtatcaatgatggtcgggtaggtcaaaagtctcagcagtccgccctggctctgtcccctacaatccggtgttccacaagcatcatgtag

SEQ ID NO: 336445 - DNA, 1117 bp, Artificial Sequence
  derived and/or modified sequence
ctcggaaccggaagtggagcctgggagccttgacgttaggaacgaagtctaacctggatctggagccgggctgcctgggtctcagccatttgggtccccattggcccctgtgggcaaccagccacctgtgcttcagccctatggccctcccccgacaagtgcacaggtggctacgcagctgtctggaatgcagatcagcggtgctgtggccccagcccctccttcttcagggctgggctttggcccaccaacatcgctggcttcagcctcaggaagtttccctaactctggtctgtatggctcctatcctcagggccaggctcctccccttagccaggcccaaggtcatcctgggatccagactccccagcgatctgccccatcacaggcctccagcttcacacccccagcttcagggggtcctcggctgccttcgatgactggtccactcctgcctggacagagttttggagggccctcagtgagccagcccaaccatgtgtcttcacctcctcaagctctgccccctggcacccagatgactgggcccctgggaccactgccacctatgcactccccgcagcagccaggctatcagccccaacaaaatggttccttcggaccagcccggggccctcagtctaattatggaggcccctacccagcagcacccacctttggcagtcagcctgggcctcctcagccactgcctcctaagcgcctggaccctgatgccatcccaagccctgcttcaccgtatgttgtggaccatggggaatctggccctttgcgctgcaaccgctgcaaagcatacatgtgtcccttcatgcagttcattgaaggagggaggcgtttccagtgctgtttttgcagctgtatcaatgatgggagggtggggcagaagagtcagcaatccgcgttggctttgtcacctacaataaggtgctccacttctataatgtgaagagctcattggcccagccacagatgatggttgtgtctgatgtggctgacatgtttgtgccactgctggatggcttcctggtcaacgtcaatgagtctcgggcagttatcaccagcttattggatcagattccagaaatgtttgcagacacaa

SEQ ID NO: 336446 - DNA, 1029 bp, Artificial Sequence
  derived and/or modified sequence
atgagagtgagaaccagcaccggcatcagagccgtggacttcttcggcgccttctacatgagcaacaccaccgacgtggagctggccggcctggacggcgacaagaccgtgaccgtggagttcaagcacgacgacagactgaacgaggagagcggcgccctgctgcagtgcgccctgctgtacaccagctgcgccggccagagaagactgagaatccacaacctggccctgaactgctgcacccagctggccgacctgtacagaaactgcgagaccgacaccctgatcaactacatggccaagttcgcctacagaggcgtgctgaacagccccgtgaaggccgtgagagacaccctgatcacccagtgcgcccagatcctggcctgctacagaaagaactgcgccagccccagcagcgccggccagctgatcctgcccgagtgcatgaagctgctgcccgtgtacctgaactgcgtgctgaagagcgacgtgctgcagcccggcgccgaggtgaccaccgacgacagagcctacgtgagacagctggtgaccagcatggacgtgaccgagaccaacgtgttcttctaccccagactgctgcccctgaccaagagccccgtggagagcaccaccgagccccccgccgtgagagccagcgaggagagactgagcaacggcgacatctacctgctggagaacggcctgaacctgttcctgtgggtgggcgccagcgtgcagcagggcgtggtgcagagcctgttcagcgtgagcagcttcagccagatcaccagcggcctgagcgtgctgcccgtgctggacaaccccctgagcaagaaggtgagaggcctgatcgacagcctgagagcccagagaagcagatacatgaagctgaccgtggtgaagcaggaggacaagatggagatgctgttcaagcacttcctggtggaggacaagagcctgagcggcggcgccagctacgtggacttcctgtgccacatgcacaaggagatcagacagctgctgagctag

SEQ ID NO: 336447 - DNA, 1029 bp, Artificial Sequence
  derived and/or modified sequence
atgagggtgcgaaccagtaccggcatcagagccgtggacttctttggggccttttatatgagcaacaccacagatgtggaactagcagggcttgacggggataagacagttacggtggaatttaaacacgatgatcggctgaacgaagaatccggcgcactactgcagtgcgctctgctgtatacaagctgcgctggacagcgacgattgcggatacacaacctggcattaaactgctgcacacagttagcggacctgtaccgcaattgtgagactgacaccctgatcaattatatggcaaagtttgcttatcgaggtgttttaaactcccctgtgaaggctgtgagggatacattaatcacacaatgtgcccagattctagcttgctaccggaaaaattgtgcaagccccagctccgctggacagttgatcctgcctgaatgcatgaaattgctcccagtctatctcaattgtgttctcaaaagcgatgtgttgcaacctggagcggaggtaaccaccgacgatagggcgtacgtgagacagctagtgactagtatggatgtgactgaaaccaatgtgtttttctaccctaggttacttcctctaactaagagccctgtagagagcacaacggaaccccctgcagtgcgagcttcagaggaacgtctgtccaatggcgatatatacctgctggaaaacggcctgaatttgttcctgtgggtcggtgcatcagttcagcaaggcgtcgttcaaagccttttcagtgtctcaagtttcagtcagatcacctctggactatctgtcctgccagttctggacaacccactgtcaaaaaaggtgcggggccttatcgattctcttcgggcccaaagatcacgctacatgaagctcacagtggtcaagcaggaagataagatggagatgttgttcaagcactttctcgtggaggataaatcgctgagcgggggcgctagttatgtggactttctttgccacatgcataaagaaattaggcagctgctgtcttag

SEQ ID NO: 336448 - DNA, 1029 bp, Artificial Sequence
  derived and/or modified sequence
atgcgggtcaggactagcacgggcatacgcgccgtcgatttttttggagcattttatatgagtaacaccactgacgtcgagctcgcaggactagatggagacaagactgtgacagttgaattcaaacatgatgaccggttaaatgaagaatctggcgccttgctccagtgtgcactgttatatacctcatgtgctggtcagaggagactgaggatccataatctggcattgaattgttgcacccaactggcggatctgtataggaattgtgagacagacacgcttattaattacatggccaagttcgcctatcgcggagtcctcaattctccagtaaaggctgtgcgggacacattgatcacccagtgtgcccagattctggcctgctatcggaagaactgtgcctcaccatctagcgcaggtcagcttattctgccagagtgtatgaagctcctgcccgtttacctgaactgtgttttgaagtccgatgtgctgcagcctggtgcagaggttaccaccgacgaccgggcctatgtcaggcagctggttacctcgatggacgttaccgaaacaaacgtattcttctaccccaggctgctgccactgacaaagagccctgtcgagagtacaaccgaacctccggccgtacgagcatcggaggaacgcctcagtaacggcgacatctacctgttggaaaacggtctgaacctctttctgtgggtcggagcctctgtgcagcagggcgttgttcagagtctctttagcgtatcatcttttagccagattacaagcgggctgtccgtgcttcccgtgttagataaccccctgtccaagaaagtgcggggtttgatcgactcattacgcgcgcaaagaagccggtacatgaagctcactgtggtgaaacaagaggacaagatggagatgctgtttaaacacttcttggtcgaagataagtccctgagcgggggagcttcttacgttgacttcctttgccacatgcacaaagagatccgacagctgctctcttag

SEQ ID NO: 336449 - DNA, 1029 bp, Artificial Sequence
  derived and/or modified sequence
atgagggtgaggaccagcacaggcatccgggctgtggacttctttggagccttctacatgagcaacaccacagatgtggagctggccggcctggatggagacaagacagtgacagtggagttcaagcatgatgaccggctgaatgaggagagcggggccctgctgcagtgtgccctgctgtacaccagctgtgccggccagaggcggctgcgcatccacaacctggccctgaactgctgcacccagctggccgacctgtacagaaactgtgaaacagacaccctcatcaactacatggccaagtttgcctaccggggcgtgctgaacagccctgtgaaggctgtgcgggacaccctcatcacccagtgtgcccagatcctggcctgctacaggaagaactgtgccagccccagcagcgctggccagctgatcctgcctgagtgcatgaagctgctgcctgtgtacctgaactgtgtgctgaagagtgatgtgctgcagcctggagctgaggtgaccacagatgaccgggcctacgtgcggcagctggtgacctccatggatgtgacagagaccaacgtgttcttctacccccggctgctgcccctgaccaagagccctgtggagagcaccacagagcccccagctgtgcgggccagcgaggagcggctgagcaatggagacatctacctgctggagaatggcctgaacctcttcctgtgggtgggcgcctctgtgcagcagggcgtggtgcagagcctcttctctgtgagcagcttcagccagatcaccagcggcctgtctgtgctgcctgtgctggacaaccccctgagcaagaaggtgcggggcctgattgacagcctgcgggcccagaggagccgctacatgaagctgactgtggtgaagcaggaggacaagatggagatgctgttcaagcacttcctggtggaggacaagagcctgtctggaggagccagctatgtggacttcctgtgccacatgcacaaggagatccggcagctgctgtcctag

SEQ ID NO: 336450 - DNA, 1029 bp, Artificial Sequence
  derived and/or modified sequence
atgcgggtgcggaccagcaccggcatccgggccgtggacttcttcggtgccttttacatgtccaatacaaccgacgtggagttggcgggtctggacggagataaaaccgttacggtggagttcaagcacgatgacagactgaatgaggaatctggggcactcctgcagtgcgctcttctgtacacatcttgcgccggacagcggcgactccgcatccataatttagccctgaactgctgtacccagttggccgacctgtatcggaattgtgagaccgacacactgatcaactacatggcaaagttcgcttaccgcggtgtattgaattctccggtaaaggcagtgagagacacactcattacgcaatgtgcccagattctggcatgttacaggaagaattgcgcttccccatctagcgccggacagctcatattgcccgagtgcatgaaattactacctgtgtacttaaattgcgtgctgaaatcagatgtgctccagcctggggcagaggtcacaaccgacgaccgggcgtatgtacggcagctcgttactagtatggacgtcacagagaccaatgtctttttctatccaagactccttcctctgacaaaaagtcctgtggagtcaacaacagaacccccagccgttagagcttcagaggagcggctctccaacggggacatatatctgttggagaatggacttaacctattcttatgggtgggcgcttcagtgcaacagggcgtggtccagagcctgttcagtgtatctagcttttcccaaatcacctctgggctatctgtgttgcctgtccttgataatccattgagcaagaaggtgagaggattaattgattcgcttcgggcgcaaaggtctagatacatgaaactcactgtcgtcaagcaggaggacaaaatggagatgctgttcaagcacttcctggtggaggataagagcctgtctggaggcgcttcttatgtcgactttctctgtcacatgcacaaggaaatcaggcaactgctctcttag

SEQ ID NO: 336451 - DNA, 1029 bp, Artificial Sequence
  derived and/or modified sequence
atgcgggtgcggaccagcaccggcatccgggccgtggacttcttcggcgccttctatatgagcaacactaccgacgtggagctcgcgggcctggacggggataagacggtgacagttgagtttaaacacgatgatcggttaaacgaggagagcggggccttattgcagtgtgctctgttgtatacttcctgtgctggacagcgccgcttgcggattcacaatctggcacttaactgttgcacgcagttggctgacttataccggaactgtgagaccgacacactgatcaattacatggcaaaatttgcttacaggggcgttctgaatagtcccgtcaaggcagtccgagacacgctgatcacccagtgcgcccagatcctcgcctgctacaggaagaattgtgcctcgccttcatctgcaggccagctgattctccctgaatgcatgaaactgctgccagtctacctgaattgcgtgttaaaaagcgatgtcctgcagcctggcgctgaggtgactaccgatgatcgcgcttacgttcggcagctggtcacaagcatggacgtaacagagactaatgtgtttttctaccctcgcctgcttccattaaccaaatccccggtggaatctacaacggagccaccagccgtacgcgcatcagaagaacgcttgtctaatggagatatctacctgctggaaaacggactgaatctgttcctgtgggtgggcgcatccgtgcagcaaggggtggtgcagtctctgttctccgtgagctcgttttcacaaatcacaagtgggctgtccgtgctgcctgtcctggacaaccccctttcaaaaaaagttaggggcttgattgatagcctgagggcgcaaaggtctcggtacatgaaactaaccgtggtgaagcaggaggacaagatggagatgctttttaagcacttcctcgtcgaagacaagtctctgtcaggtggcgcctcttacgtggacttcctttgtcatatgcacaaggagatccgccagctgctgagctag

SEQ ID NO: 336452 - DNA, 1029 bp, Artificial Sequence
  derived and/or modified sequence
atgcgggtgagaacctccaccggcatccgggcagtggatttcttcggtgcattctacatgtccaacacaactgatgtcgaactggcaggcctggatggcgataagaccgtgacggttgaattcaagcacgatgatagactgaacgaagagagcggagctttattgcaatgtgctctactttacacaagctgcgcgggtcagcgacgtctccgtattcataatctggcactcaactgctgtactcagcttgccgacttatatcgcaattgtgaaacagacacactaattaactacatggccaagttcgcctatcgcggtgtcctcaacagcccagtgaaagccgtaagggatacactgattactcagtgtgcacaaattctcgcatgctatagaaaaaattgtgcttcaccatcctctgcagggcagttaatcttgcccgagtgcatgaagctgctgccagtttaccttaactgtgtgcttaagtctgacgtgctccagcccggagccgaagtcaccacagacgaccgggcatacgtgaggcaactggttacgtctatggatgtcacagaaaccaacgttttcttttacccccgtctgctgcccctcactaaatcgccagtcgagtctaccacggagcctcccgcagtgcgtgccagcgaggaacgcctgtccaacggtgacatatacctgttagagaacggtttgaatttgttcctgtgggtgggggctagtgtacagcagggcgttgtgcagtccctgttttctgtgagctcttttagtcagatcacaagcggactgagcgtcttgccggtattggacaatcccctgtcaaaaaaggtccgtgggctaatcgactctctccgggctcagcgtagcaggtacatgaagctgacagtggttaagcaagaggacaaaatggagatgctgtttaagcatttcctggtcgaggacaagagcctgagcgggggagcaagttacgttgactttctatgccacatgcataaggaaatcaggcagttgctgagttag

SEQ ID NO: 336453 - DNA, 1029 bp, Artificial Sequence
  derived and/or modified sequence
atgagagtccgcacgagtaccggtattcgcgctgtggatttctttggggctttctatatgagtaatactaccgatgtggagctggccggactagacggggataagacggttaccgtggaatttaaacatgatgatagactcaatgaggagagcggcgcacttctgcagtgtgccctgctgtacacgtcctgcgccggtcaacgtcggctccggatccacaatctggcgctgaattgttgtacccagttggcggacttgtaccgcaattgcgagaccgatactctgatcaattacatggctaagttcgcctacagaggtgtcctcaacagtccagtcaaggccgtacgagatacactaattacgcaatgcgcccagatcctcgcgtgctatcggaaaaattgtgcttctccgagtagtgcaggccagctaatcctcccagaatgtatgaagctattgcctgtctatctcaattgcgttctcaagtcggatgtgttgcagcccggtgccgaagtgactaccgacgatcgggcatatgtgcggcagctggtgaccagcatggacgtgacagagactaacgtctttttctaccccaggttgctgccgctgaccaaatctcccgtggaatcgaccacagaaccccctgctgtgagggcttcagaggagagactctcaaatggcgacatctacctgttagaaaatggactcaatctcttcctgtgggttggcgcaagtgtgcaacaaggagtggtacagagcctgttcagcgtctcctccttttctcagatcacctccggcttgagcgttctacctgtgctcgacaatcctctgtcaaagaaggtaagaggtttgatcgattcactaagagcacagagatcacggtatatgaaattgacggtggttaaacaagaggacaagatggagatgctgttcaaacattttcttgtagaagataagtccctgagtgggggagcgagttacgtagacttcctttgtcatatgcataaggaaatcagacagctgctgagttag

SEQ ID NO: 336454 - DNA, 1430 bp, Artificial Sequence
  derived and/or modified sequence
cggccccctcggaaccggaagtggagcctgggagccttgacgttaggaacgaagtctaacctggatctggagccgggagataatctgaatgctggctggggcagaaaattactaagatcctgtggaagtgtgaggattattaaactgatcactgtctgataaggtggagaacgaccaggagcggttcctgagtgacctgcgtcgtgatgtccagaaggttgttggctttgatgctgtgatgcgggtccggacaagcactggtatccgtgctgtagatttctttggagctttctacatgagcaacacgacagatgtggagctggctgggctagatggggacaaaacagtgactgtggagttcaagcatgacgatcggctcaatgaagagagcggagctctcctgcagtgtgccctgctttacaccagctgtgcagggcagcgtcggctccgcatccataatctggccctgaactgctgcacccagctggctgatctatatcgaaactgtgagactgacacgctcatcaactacatggccaagtttgcatatcggggagtcctgaatagccctgtgaaggctgttcgtgacacgctcatcacccagtgtgcccagatcctggcctgttacagaaagaactgtgctagcccctcctctgcaggacagttgatccttcctgagtgcatgaagctactcccagtttacctgaactgtgtgttgaagagtgatgtcctgcagcctggagctgaagtcactactgatgaccgtgcctatgtccgacagctagttacctccatggatgtgactgagaccaatgtcttcttctaccctcggctcttacctttgacaaagtctcccgttgagagtactaccgaaccaccagcagttcgagcctctgaagagcgtctaagcaatggggatatatatttactggagaatgggctcaacctcttcctctgggtgggagcaagcgtccaacagggtgttgtccagagccttttcagcgtctcctccttcagtcagatcaccagtggtttgagtgttctgccagttctggataatccactgtccaagaaggttcgaggcctcattgatagcttacgggcacagagatcccggtacatgaagcttaccgtggtgaaacaggaagacaagatggagatgctgttcaagcacttcctggtggaagacaagagtctgagtgggggagcatcttatgtggactttctctgtcatatgcacaaggagattcggcagctactgagctaaagcaagtgggtaaatggcatagggcccaggctagcttccagaaagcaccccaggatgtcagagaaattgggacagtaacatatcttatgtaagctgacctcagtctctctggggggagggggagatataaggagacaccttctttctgggctcaagtatcctg

SEQ ID NO: 336455 - DNA, 1440 bp, Artificial Sequence
  derived and/or modified sequence
gagcctgggagccttgacgttaggaacgaagtctaacctggatctggagccgggtggagaacgaccaggagcggttcctgagtgacctgcgtcgtgatgtccagaaggttgttggctttgatgctgtgatgcgggtccggacaagcactggtatccgtgctgtagatttctttggagctttctacatgagcaacacgacagatgtggagctggctgggctagatggggacaaaacagtgactgtggagttcaagcatgacgatcggctcaatgaagagagcggagctctcctgcagtgtgccctgctttacaccagctgtgcagggcagcgtcggctccgcatccataatctggccctgaactgctgcacccagctggctgatctatatcgaaactgtgagactgacacgctcatcaactacatggccaagtttgcatatcggggagtcctgaatagccctgtgaaggctgttcgtgacacgctcatcacccagtgtgcccagatcctggcctgttacagaaagaactgtgctagcccctcctctgcaggacagttgatccttcctgagtgcatgaagctactcccagtttacctgaactgtgtgttgaagagtgatgtcctgcagcctggagctgaagtcactactgatgaccgtgcctatgtccgacagctagttacctccatggatgtgactgagaccaatgtcttcttctaccctcggctcttacctttgacaaagtctcccgttgagagtactaccgaaccaccagcagttcgagcctctgaagagcgtctaagcaatggggatatatatttactggagaatgggctcaacctcttcctctgggtgggagcaagcgtccaacagggtgttgtccagagccttttcagcgtctcctccttcagtcagatcaccagtggtttgagtgttctgccagttctggataatccactgtccaagaaggttcgaggcctcattgatagcttacgggcacagagatcccggtacatgaagcttaccgtggtgaaacaggaagacaagatggagatgctgttcaagcacttcctggtggaagacaagagtctgagtgggggagcatcttatgtggactttctctgtcatatgcacaaggagattcggcagctactgagctaaagcaagtgggtaaatggcatagggcccaggctagcttccagaaagcaccccaggatgtcagagaaattgggacagtaacatatcttatgtaagctgacctcagtctctctggggggagggggagatataaggagacaccttctttctgggctcaagtatcctgccactctgtcatgtcctgctgatggaaggtgcccctgttccctcattctaccctctttttcctgctaatcctgtcataatgaatgtagcttctcagttcactgtatatgattcggtattg

SEQ ID NO: 336456 - protein, 458 aa, Artificial Sequence
  derived and/or modified sequence
MSSSRPEPGPWAPLSPRLQPLSQSSSSLLGEGREQRPELRKTASSTVWQAQLGEASTRPQAPEEEGNPPESMKPARASGPKARPSAGGHWWSSTVGNVSTMGGSDLCRLRAPSAAAMQRSHSDLVRSTQMRGHSGARKASLSCSALGSSPVHRAQLQPGGTSGQGGQAPAGLERDLAPEDETSNSAWMLGASQLSVPPLDLGDTTAHSSSAQAEPKAAEQLATTTCHALPPAALLCGMREVRAGGCCHALPATGILAFPKLVASVSESGLQAQHGVKIHCRLSGGLPGHSHCCAHLWGPAGLVPEPGSRTKDVWTMTSANDLAPAEASPLSAQDAGVQAAPVAACKAVATSPSLEAPAALHVFPEVTLGSSLEEVPSPVRDVRWDAEGMTWEVYGAAVDLEVLGVAIQKHLEMQFEQLQRAPASEDSLSVEGRRGPLRAVMQSLRRPSCCGCSGAAPE

SEQ ID NO: 336457 - DNA, 7718 bp, Artificial Sequence
  derived and/or modified sequence
gtgggggacaatgaggatgcaggtacactgggcaagaggggattaaatgtcaggcaggataggtctgattgatggtactgggtgggcatcttatctcactgctgcaccgtccccaggggtacagaaaggtctgaatgaatcccatgttccctagccctacagctgggcacgcagtaggggctcaggagatgctgtggaatcaatgaccagatgctgaatgagtccctcatggaaaaagctgatgcatggggcctctccttgcccctggagctagaggtaggagtcagggaaccccagagacatgccagctcagcaaggctaggccaaggaggatgggggtggttgtggaagcccagggtgattctcagtgtcctctggtcattgctccctcgtcctgtgaactttctctgagctcccactctgtaccaaggagaccctgtccacagtgagttggatactgccagtcccaggaggaagtagcccagtattggcctgtccagctgtgcccgttaagaggccatagtgcttccgtgctggttgaccaagagctgttatcccacagccccaccccctagggctgcagtttcacccccaaagccccagcagatttggctctctcccttcccctcccacacaaaccagccagtaaagagttgagagctgatagagtggcggcctccaggaccccaccctagggcagattctaactgcttgagactgatgatgagataatttgcagtgtcatccttgtgtctaatgtgagatgaccttgatttgaagtgtctggtgtcttgtcactcactgccttgcatatggttctgaccagtcaggcaggctgggactgaaggtggctccctggtgaacctagcactgtgggagttcatagtagaatcggcttaggtgctgccacccaactcaactccactccctccctttctctcttctgcaggcagccatgagctccagccgccccgagccgggtccctgggcacccctgagcccccgccttcagcccctgtcccagagctcttccagcctgctgggtgaaggccgggaacagaggccagagctccgcaagactgccagcagcaccgtgtggcaggcccagctgggcgaggccagcaccagaccccaggccccggaggaagaggggaacccgcctgagagcatgaagccagcacgggcctctggccccaaggcgcgacccagtgctggaggccactggtggagcagcactgtgggcaatgtgtccaccatgggcggcagtgacctgtgtcgcctgcgggcccctagtgctgctgctatgcagaggagccattcagacctggtccgtagcacccagatgcggggacacagtggtgctcggaaggccagtctcagctgctcagcccttggcagcagccctgtccacagggctcagctgcagccaggtggtacttctggccagggtggccaggcccctgcaggcctggaaagggacctggctcctgaggatgagacttctaactcagcctggatgctgggggcgagtcagttgtcagtgccaccactagacctgggggacacaactgcccacagcagcagtgcccaggctgagcccaaagctgctgaacagctggctaccaccacctgccatgctctgcccccagctgctctactctgtggcatgagggaggtgagggctggtggctgctgccatgccctacctgccacagggatcctggcctttcccaaactagtggcgtcagtgagcgagtctgggctgcaggctcagcatggggtgaagatccactgtaggttgtctggggggctccctgggcattcccattgctgtgcccacctttggggtcccgctgggttagtcccagagcctggctctaggaccaaagatgtgtggaccatgacctcagccaatgacttggcccctgcagaggcatccccgctgtcagcccaggatgctggtgtgcaggcggccccagtggcggcctgcaaggctgtggccaccagtccgtccctggaagcgcctgcagccctgcatgtgttcccagaggtaactctggggtccagcctggaggaggtgccgtcccctgtgcgggatgtgcgatgggatgctgagggcatgacatgggaggtgtacggagctgcggtggacctggaggtgctcggtgtggccatccagaagcacctggagatgcagtttgagcagctgcagcgggcgcccgccagcgaggacagcctgtctgtggagggccggagggggccactgcgggctgtcatgcagtccctgcggcgccccagctgctgcggctgctccggcgcggcccccgagtgaggagctgtggcccttggagctggcctgggcccactgacttagtcctagacctgggccagggacggtgggggctccgtgccccctggacccaccggcagctgggcacatctctcacctgaatattggctgcctccagaccacaggactgcagcctggggcttccggccctacacagctgggctgttttcttaagggcttgatttccaagggccacatctctgcaccttccgggctctgaactttgagacagggctttagcactgtgcagaggggagatcctgagttttctgtaaaaaatgaccttttgttcactccaccctcagaactctgccatgttgcctcgtcagactcttggtggctttatttgaaatcagtgctgagaaatagtgaattctcgacatgaaatgtgaggccccagtgacagggactgcccaggtctttagggaaggggactgatgttatcagaggcctcctgtgtgccacatactgtgcttgtcctgtcttcacctcttcatcctggcaagccttcatttggcaaggctgtagccgatgtgccccacgctggacagcttgaagaggtgggactgagatccaaagccagggccagctgagccgtgggtgttgccctgtagcatgtgcccggtccagtcagtgcagtcatgtatgaggagaatttactgagctcatactctgtgctgggttctgtggattctgtggtgaatgagacagaggctgcccctgccctggctgagctcatggtgtgggttggggatggcaggggaggatgctgaccattacggagggctgccaggcttccagggtcattgtgtcagaggctggcctgaggaaggggagaatgggtggccacctgccctaatctcagttacaaagcctaaaattgcactattttcacctcattctgtcggctgaaggatttctccccagctggtgcagtttgtggaaggagggagggcaggaatggagggggacagggcaggagtttgccctggccctggggtaggggctgtgaggctgtgggggctcgcttgcccacatgacctgacctaggctaggcagtgggggccaggggccttggagagacagaaacatgggctttggcacagtctgacttcattgcccaaagatttctcgaggcctgtgaagaatgggagtgggcttgtgttcttgtcctgggtctttgtcttgaagatcctaagatcccgtgacacagccccccaatccacccgtgtgagggaccagagggctagtgtggggtcatggcccacgacctggcctgtttctggagcctcttctgcacctaggagcccaggacccccacagtggtggcttacttttccccatcctcaaggacctggtactcattgaggtggaaatgactcatgcaacagttggtgaatttgtaaagcaggagtggcatttcaacaggccacaaggacaaagtgacaaaggcgtgcgtcaggtcagatgcctcctgaagcccaacgatggaccattctcacccgtaaacatgcctttcccatatgcataggtgcaccccttgggattctggggctgtcagtccctttgtgtatggtgccagggcaggcagctcacgttctggggagtgacacatgggtatatgccatcttcatgcctggctccccatggagtctccaggaaccccagcctgttagggccacatgagagagaacaaatggctgtgggtgcatggggagggacctttcacacagggccatagctaagtagggtcttgaggatgcaggggttagacaggtgggtggagagagggcaggacctgcctggcagatggaacagcctggtcagatacttggatgtgcctgtcctgcctgggccataatgagtttctgcagtggcggctcatttggagcgtttgttgggttgggaggtgaccaggggtccccattgtgaagatcctgatgtaaatgaggaaaggaactttaagggaactgtggaaggggttctgaggtgggaccagatttcagtttagaaatatccatttggcttccagtggagatgtgccaggtgacaccaaggaggggcctgtttaggggcaatggagtgggcagctgggggctgggttcatacacgtgcacacacacgcatacacaggcacacatgtgtgcaatggatttggggaggaggcatttcaggatgctgaggtttccagtttgagcaagaggagggtgaggccactacctgggtcaaggtgaatggcatgttcagcaggtgcagaaagggccacctgccacagggtttggctgggaccagtgaaacctacttcatgaagagactttcttctgtgtcacgtgcagattcttatgcattcacgctggctgggtgccactctgtgctacctccatgctgccctggcttgccaggatggcaggccgggctgggctcagccaagctcccactcacctcatcgtcactgagatgagtatttgcagagcggtgctgaaatccaacacctgtgtcttggctggggccccagatgattctcctggctaaaccacgatccttgtctccctagcccagttgcacagctgctgctgacaggtctacctgaagtgactgcagcctcatttctgattggaactggagacccctcccaaccccctttgctgtgccctctcctggaacagccctgatgcctgcagtggtttagggccccagagcatggccagcggtttagtttacagatctcctccccttggactctagatttctggccagactttctgggtccctttcaggccctgctctgggaggtgttggagttcactgttgatgtgtttgtttggctttgaattcaaaacagatacaaatttggaggtgagagctttgccagaccccagcagggatggggcatcggtcctgactggtcttgtttattttgtcctggtaaattctgttctttggagcataaaccctggagtcctagagccccttgcctcagcaggaatcccccctctgtctgctccaggggctccctgcttctgcccacctgctctccttccatggcattcaggacccccgacagctgaagcctctcttcatatagcttgtcccctctgggcctgcctgtcttgtgtccaggacacaagacacgcatcccttgtctggccccaggctgccatcactgtcacaagaaactcatagagtagagctggtctgaggtcacagtgctggtggtggtggaaaagcagggatggcctgttccactgtgatcttacctcctgtgtcacctggattgggtctctgtccccttagacatgctagatcctaactttacaagggctgaaggggtcttctacacgcaggtcccaacactttgggctggggttggccaccgtagcttagtgggctaaagctggagtttgaatctggatatataggatccacacctatagccatgtgatcttgggcaagttacaagccttgatcatcttcctcatctgtaagatggggatgacaatggtgcctccttcacatgcttggtgtggagattaaatagaataacccaagtagtgcctggcactgagttagtgctcagcacacaggctggtagtgttgggcacccctctcatagccacattcaggggccacctcttaccctgccagcttggctgtgatcacagcccacatcccacttccttaaaagtcccttgttcagagcctctttccaggttcctcgccccacagctttgcaccctgcctgggacttggccctctggctggggcttctgaaaatgtagttcccagagtgcattgaggagggctaccctagccctcaccactcatcttgggctgggttccccagaagcttctgctgagatgaggatgctggagttattagggaggggagagcaagttaagggaggggcagaaggcaaggcagggtgtgatttcagtccaagtcagaccctaaaggggagccctggatgcagtcccacctcagagtaaggactacccaggggtgaagatgtagcctccaggcacttctgctctctggcaggcaggctaggaagctctaggagccccagggtaggtttctgctggagtcgtagggcctattttgggggaagttgtgcacagaaaccaccagagggagtcacaggcatctgggggtgcacccattgacatttgcatccatgtcatgccaagcttgtagcccacaaatgcccaacccttttctccatgcattgctctgtctcagttttgttcacgccaagcagccttggttagttaaatgcagagcttggcatttgcccatgttaaattccttctcctttttcattctggcctggcctggttttgccatctgaagctatgacaagtcctttatcagttttcatccaacttgtcaggcagggcagggctggtatgaagcccaggacatatcactgggacatcccataggtctgtgagattcccaggtccctccaaatccacacggtcatcatgggcaaattagtttaagtctgatctgttaagatccagatctctcacaccaacagcacacacccctttttcccatggccatggaaggagggtagcatagcctgactcgagtcctcgttctcagcagaactggttctgtggtggccacttccctttctcaacttttacctacttctgtttaataggttgttctgcaagtctgagagcaacagcaagcttagaagtgtggactcagcctggtacagtggctcatgcctgtaatcccagcactttgggaggctgaggtgggctgactgcttgagctcaggagttcgaaaccagcttgggcagcatggagaaatcccatctctacaaaaaatacaaaaattagctgggcatggtggtgtgcatctgtagcctcagctactcagggggttgaggtgggaagatggcttgagcccaggaggtggaggttgcagtgagccgagatagtgccactgtgctccagcctggatgacggagccagaccctgtttcaaaaaaagaaaaagacaagaaagaagtatggactctaccttcttgcccttgtggagattgggaactgcctgcccttggcctctttcctgtccatcttgtattatgaaaggctgtttctggcacacccgggctcctctgtgtggtttctgggaagtgactgagggtcaggggaatggagcccctctgcagccggccgctggtaccttccctattgaacccttctttaggtttgctcactctttttgatgggtgtctttccaaagctggctggggacctccctgattgagagacatggggccagttctgttgctgtggctacacgggaataataaagcagaagaacacctgaggaaagctgatgtttact

SEQ ID NO: 336458 - DNA, 1966 bp, Artificial Sequence
  derived and/or modified sequence
ggaatgctgcctgctgctttgcccagagttggccctgagtgttcctatcaggccccgttcactctggggtggattaaaccacctcctggagggtgctgtatccccactgtgcaatgggggtttgtgctgtgtgcattcctgcctggtccttgagagttgctgacaggtggaacctgaggcagcaggacagcctggcattggccacgggacatcggccacaaccatagcaacttcggcatcaaatggggcaggagagagaacattaaggcagccatgagctccagccgccccgagccgggtccctgggcacccctgagcccccgccttcagcccctgtcccagagctcttccagcctgctgggtgaaggccgggaacagaggccagagctccgcaagactgccagcagcaccgtgtggcaggcccagctgggcgaggccagcaccagaccccaggccccggaggaagaggggaacccgcctgagagcatgaagccagcacgggcctctggccccaaggcgcgacccagtgctggaggccactggtggagcagcactgtgggcaatgtgtccaccatgggcggcagtgacctgtgtcgcctgcgggcccctagtgctgctgctatgcagaggagccattcagacctggtccgtagcacccagatgcggggacacagtggtgctcggaaggccagtctcagctgctcagcccttggcagcagccctgtccacagggctcagctgcagccaggtggtacttctggccagggtggccaggcccctgcaggcctggaaagggacctggctcctgaggatgagacttctaactcagcctggatgctgggggcgagtcagttgtcagtgccaccactagacctgggggacacaactgcccacagcagcagtgcccaggctgagcccaaagctgctgaacagctggctaccaccacctgccatgctctgcccccagctgctctactctgtggcatgagggaggtgagggctggtggctgctgccatgccctacctgccacagggatcctggcctttcccaaactagtggcgtcagtgagcgagtctgggctgcaggctcagcatggggtgaagatccactgtaggttgtctggggggctccctgggcattcccattgctgtgcccacctttggggtcccgctgggttagtcccagagcctggctctaggaccaaagatgtgtggaccatgacctcagccaatgacttggcccctgcagaggcatccccgctgtcagcccaggatgctggtgtgcaggcggccccagtggcggcctgcaaggctgtggccaccagtccgtccctggaagcgcctgcagccctgcatgtgttcccagaggtaactctggggtccagcctggaggaggtgccgtcccctgtgcgggatgtgcgatgggatgctgagggcatgacatgggaggtgtacggagctgcggtggacctggaggtgctcggtgtggccatccagaagcacctggagatgcagtttgagcagctgcagcgggcgcccgccagcgaggacagcctgtctgtggagggccggagggggccactgcgggctgtcatgcagtccctgcggcgccccagctgctgcggctgctccggcgcggcccccgagtgaggagctgtggcccttggagctggcctgggcccactgacttagtcctagacctgggccagggacggtgggggctccgtgccccctggacccaccggcagctgggcacatctctcacctgaatattggctgcctccagaccacaggactgcagcctggggcttccggccctacacagctgggctgttttcttaagggcttgatttccaagggccacatctctgcaccttccgggctctgaactttgagacagggctttagcactgtgcagaggggagatcctgagttttctgtaaaaaatgaccttttgttcactcca

SEQ ID NO: 336459 - DNA, 1377 bp, Artificial Sequence
  derived and/or modified sequence
atgagcagcagcagacccgagcccggcccctgggcccccctgagccccagactgcagcccctgagccagagcagcagcagcctgctgggcgagggcagagagcagagacccgagctgagaaagaccgccagcagcaccgtgtggcaggcccagctgggcgaggccagcaccagaccccaggcccccgaggaggagggcaacccccccgagagcatgaagcccgccagagccagcggccccaaggccagacccagcgccggcggccactggtggagcagcaccgtgggcaacgtgagcaccatgggcggcagcgacctgtgcagactgagagcccccagcgccgccgccatgcagagaagccacagcgacctggtgagaagcacccagatgagaggccacagcggcgccagaaaggccagcctgagctgcagcgccctgggcagcagccccgtgcacagagcccagctgcagcccggcggcaccagcggccagggcggccaggcccccgccggcctggagagagacctggcccccgaggacgagaccagcaacagcgcctggatgctgggcgccagccagctgagcgtgccccccctggacctgggcgacaccaccgcccacagcagcagcgcccaggccgagcccaaggccgccgagcagctggccaccaccacctgccacgccctgccccccgccgccctgctgtgcggcatgagagaggtgagagccggcggctgctgccacgccctgcccgccaccggcatcctggccttccccaagctggtggccagcgtgagcgagagcggcctgcaggcccagcacggcgtgaagatccactgcagactgagcggcggcctgcccggccacagccactgctgcgcccacctgtggggccccgccggcctggtgcccgagcccggcagcagaaccaaggacgtgtggaccatgaccagcgccaacgacctggcccccgccgaggccagccccctgagcgcccaggacgccggcgtgcaggccgcccccgtggccgcctgcaaggccgtggccaccagccccagcctggaggcccccgccgccctgcacgtgttccccgaggtgaccctgggcagcagcctggaggaggtgcccagccccgtgagagacgtgagatgggacgccgagggcatgacctgggaggtgtacggcgccgccgtggacctggaggtgctgggcgtggccatccagaagcacctggagatgcagttcgagcagctgcagagagcccccgccagcgaggacagcctgagcgtggagggcagaagaggccccctgagagccgtgatgcagagcctgagaagacccagctgctgcggctgcagcggcgccgcccccgagtag

SEQ ID NO: 336460 - DNA, 1377 bp, Artificial Sequence
  derived and/or modified sequence
atgtcgtccagccggcctgagccaggcccttgggcccccctgtctccccgactgcagcccctgtctcaaagttcttcttcccttttaggtgaaggacgcgagcagcgccccgagttgcgaaaaactgcgtcctccaccgtatggcaggcccagcttggcgaagcgtctacccgccctcaggccccggaggaagaaggtaacccacccgagtcaatgaagccagctagagctagtggtcccaaagcacgcccttctgctgggggacactggtggtcatccacagtgggcaatgtgtcaacgatggggggctctgatctgtgcagattgcgggcaccatcggctgctgctatgcagcgatcccactccgatttggtccgatccacgcagatgagggggcactccggcgctagaaaggcgtccctgtcctgttccgccctcggctcatctccagtgcatagggcacagctccagcctggaggaacgagcggccagggaggacaagccccagccgggttggagagggacctcgcaccagaggatgagacaagtaactccgcttggatgttaggagcgtcccaactgtccgttcctcctcttgacctcggggacactactgcgcactccagcagcgcacaggcagaacctaaagcagccgaacagctggcgactacaacatgccatgctctgcctcctgcagctttgctatgcggaatgcgggaagtgcgtgccggtgggtgctgccatgctcttcctgcaacggggatacttgcttttccaaagctagtggcatccgtgagcgagtccggtcttcaggctcagcacggagtaaaaattcactgtagactaagcggcggattacctggccacagccattgttgcgcccatctgtgggggccggcgggcttggttcccgaaccgggatcacgaactaaagatgtgtggacaatgacttctgccaacgaccttgcccccgccgaagcatcacctctaagtgctcaggacgcgggggtgcaggctgcacctgttgccgcctgtaaagctgtcgccacatctcccagtctggaagcccctgccgctctgcacgtattcccggaggtgactctgggctcttcgctggaagaagtcccgtcacccgttagggacgttcgttgggatgctgagggcatgacctgggaagtgtatggcgcagccgtagatcttgaggtcctgggcgtggctatccaaaagcacctcgagatgcaatttgaacagttacagagggcccctgcatccgaagattctctttccgtagagggcagacggggacccctgcgcgctgttatgcagtccctccggagaccctcctgctgtggatgcagtggagctgccccagaatag

SEQ ID NO: 336461 - DNA, 1377 bp, Artificial Sequence
  derived and/or modified sequence
atgtctagcagtcgcccagagcccggtccttgggctccccttagtccccgattacagccattgtcacaaagctctagcagtctattgggagaaggtcgggaacagcgccctgagctcaggaagactgcatccagcaccgtctggcaggcccagctcggtgaagcatcaacgagacctcaggcccccgaagaggaaggcaatcctcctgaatcgatgaaacctgcccgagcctcaggccccaaagcaagaccttctgctggcgggcactggtggtcctccaccgtgggaaatgtctctacgatgggcggaagtgacctgtgcaggctgcgcgccccctcagccgcggccatgcagagaagccacagcgatctggtgaggtctacccagatgagggggcactccggcgcaaggaaggctagcctgagttgctcagccctcgggagttcaccagttcatagggcacagctgcagcctggcggcacttctggacagggtggacaagctccagccggactcgaaagggatctcgctccagaagacgaaacatccaacagcgcctggatgctgggggcctcccaactgagtgtcccacccctggatttgggggatacgaccgctcacagcagcagtgctcaggccgaacccaaggccgcagagcaactagcaaccactacatgccatgcccttccccctgctgctctgctctgtggcatgagagaagtgcgtgccgggggatgctgccacgcactgccagctacgggcattttagccttcccaaaacttgtggcttccgtgagtgagtccggcctccaggctcagcatggggtgaagatccactgcagattgtctggtgggctaccaggacattctcactgctgtgcccatctgtggggacctgctggcctggtccccgaacccggaagccgtacaaaggacgtctggaccatgacatccgccaacgacttggccccagcggaggcctctcccctttctgcacaggatgctggtgtacaggccgctcctgtggccgcgtgcaaggcagtcgccacctcacctagcctggaggcgcctgccgcactgcacgtctttccagaagtgaccttaggatcttccctggaagaggtgccaagtcccgtgcgcgatgtccggtgggatgccgaaggaatgacatgggaagtctacggcgccgccgttgatctggaagtattgggcgtagccattcaaaaacatctggagatgcagtttgagcagctgcagcgggcccctgcttccgaagacagtctgagcgtcgagggacgccgcggccccctgcgggctgtgatgcaatccttgcgtaggccctcctgctgcggttgctctggagcagcacccgagtag

SEQ ID NO: 336462 - DNA, 1377 bp, Artificial Sequence
  derived and/or modified sequence
atgagctcctctcggccagagccagggccatgggcccccttaagcccgcgattacagccattaagtcagtcttcgtctagcctgctgggggaaggacgggagcagagaccggagttacgcaagaccgcttcttcaaccgtgtggcaagcacagttgggcgaggcgagcacccgccctcaggctccggaggaggaggggaatcccccggaatcaatgaagcccgccagggctagcgggcccaaggcaaggcctagcgcaggcggccattggtggagttcaaccgttggaaacgtgtccacaatgggaggatcggatctgtgcagacttagagcgccgtctgccgccgcgatgcagcgcagccattccgacctggtgcgctccacccagatgcgcggccacagcggcgcgaggaaagcttccctgtcttgctcagctctcggaagctctccagttcacagagctcagctccagcccggtggtacaagcggacaaggcggccaagcgcctgctggccttgagagggatctagctcctgaggacgagacctctaattcggcatggatgctgggtgcttctcagctgagcgttcctcctttggatctgggagacacaactgcccatagttcctctgctcaggccgaacctaaggccgcagaacagctggcaacgacgacctgccacgccttaccacccgctgcactgttatgcggtatgagagaggtcagggccgggggatgttgccacgccttgcccgccactggtatcctggctttccctaagctggtggcaagcgtctccgaatcaggcctccaggcgcaacacggagtgaaaattcactgccggctctcaggcggactgcctggacatagccactgctgcgctcatctgtgggggcctgcagggcttgtcccagaacctgggtctcgcacaaaagatgtgtggacaatgacctccgcgaatgacctcgcgccagccgaagccagtcctctcagcgctcaggatgccggagtacaggccgcgcctgttgctgcctgtaaggcagtagccacaagcccgtccttagaggcccccgcagcattacacgtcttccccgaagtgacccttggctctagtctcgaagaggtgccgtccccagttagggatgtccgatgggacgccgagggcatgacttgggaggtgtatggggctgcagtcgatctagaggtacttggtgtggctattcagaaacacctggaaatgcagttcgaacaactccagagagcgccggcttcagaagattcactgtctgtggaaggaagacgcggccccctcagggccgtgatgcagtccttaaggaggcccagctgctgtggctgttcgggggcagcacccgagtag

SEQ ID NO: 336463 - DNA, 1377 bp, Artificial Sequence
  derived and/or modified sequence
atgagcagcagcaggcctgagcccggcccctgggcccccctgagcccccggctgcagcccctgagccagagcagcagcagcctgctgggggagggccgggagcagaggcctgagctgaggaagacagccagcagcacagtgtggcaggcccagctgggggaggccagcacccggccccaggcccctgaggaggagggcaaccccccagagagcatgaagccagcccgggccagcggccccaaggcccggcccagcgctgggggccactggtggagcagcacagtgggcaatgtgtccaccatgggcggcagtgacctgtgccgcctgcgggcccccagcgctgctgccatgcagaggagccacagcgacctggtgcgcagcacccagatgaggggccacagcggggccaggaaggccagcctgagctgcagcgccctgggcagcagccctgtgcaccgggcccagctgcagcccggcggcaccagcggccagggcggccaggccccagctggcctggagcgggacctggccccagaagatgagaccagcaacagcgcctggatgctgggcgccagccagctgtctgtgccccccctggacctgggggacaccacagcccacagcagcagcgcccaggccgagcccaaggctgctgagcagctggccaccaccacctgccacgccctgcccccagctgccctgctgtgtggcatgagggaggtgcgggccggcggctgctgccacgccctgcctgccaccggcatcctggccttccccaagctggtggcctctgtgtctgagagcggcctgcaggcccagcacggcgtgaagatccactgccgcctgagcggcggcctgcccggccacagccactgctgtgcccacctgtggggccctgctggcctggtgcctgagcccggcagcaggaccaaggatgtgtggaccatgaccagcgccaatgacctggccccagctgaggccagccccctgagcgcccaggatgctggggtgcaggccgcccctgtggccgcctgcaaggctgtggccaccagccccagcctggaggccccagctgccctgcacgtgtttcctgaggtgaccctgggcagcagcctggaggaggtgcccagccctgtgagagatgtgcgctgggatgctgagggcatgacctgggaggtgtatggagctgctgtggacctggaggtgctgggcgtggccatccagaagcacctggagatgcagtttgagcagctgcagagggccccagccagcgaggacagcctgtctgtggagggcagaagaggccccctgcgggctgtgatgcagagcctgcggcggcccagctgctgcggctgcagcggggccgcccctgagtag

SEQ ID NO: 336464 - DNA, 1377 bp, Artificial Sequence
  derived and/or modified sequence
atgagcagcagccggcccgagcccggcccctgggcccccctgagccctaggctacagccattaagccagagttcctcctcactgctcggagagggacgcgagcaacgcccggagctgcgtaagactgcctcctccacggtgtggcaggcccagttaggagaggcttccaccaggccgcaagctccagaggaagaaggaaaccccccggagagcatgaagccagctcgggcctctggccctaaggcccgcccaagtgccggcggccattggtggtcttccaccgtcgggaatgttagtactatggggggtagcgacctatgtcggcttcgggctccatccgccgcagctatgcagcggagccacagcgaccttgtgcggagcactcaaatgcggggccattctggggctcggaaagccagtctctcctgttctgcattaggatcctcccctgtgcatcgagcacagctacagccagggggaacaagcggacagggcggccaagcccccgccggactcgaacgggacctggccccagaggatgaaacctccaactctgcctggatgctgggagctagtcagctctccgtgcctcctttagatctcggagacaccactgcccactccagttcggcacaagccgagccgaaagcagccgaacagttagccacgacaacatgtcacgcccttcctccagccgctcttctttgcggcatgcgggaggtcagagccggagggtgttgtcatgcattgcccgcgactgggattctggccttcccaaagctcgtcgcctccgtatcggaatctggactgcaggctcagcacggcgttaaaattcactgcagactctcaggcggtttgccaggccacagccattgctgcgctcacctctggggtccagcaggcctggtacccgagcctgggtcaagaactaaggacgtgtggactatgaccagtgctaatgatctcgccccagccgaagcttcacccctgtctgctcaagacgctggcgttcaggccgcgccagtagccgcatgtaaagcagtggcaacaagcccctcactcgaggcgcccgcagcccttcatgtgttccccgaagtgactctggggagcagtctggaagaggtcccgtctcctgttagggacgtcaggtgggacgctgagggaatgacatgggaggtctatggagccgccgtggaccttgaagtgcttggggtagccatacagaaacacctggagatgcagttcgagcagctccagcgtgccccagccagcgaggattccctttcagtggaaggccgtcggggtcctctgcgcgccgtgatgcaaagcttgcggagaccttcttgctgcggctgtagtggggctgcacccgagtag

SEQ ID NO: 336465 - DNA, 1377 bp, Artificial Sequence
  derived and/or modified sequence
atgagcagcagccggcccgagcccggcccctgggcccccctgagcccccgactccagcctctgtcccagtctagcagtagtctcctaggcgaaggtcgggagcagagacccgaactccgaaagaccgcttcaagtacagtctggcaggcacaactcggagaggctagtactcggcctcaggcgcctgaggaggaaggcaatcccccagagtcaatgaaacccgcacgtgcgtccggcccaaaggcaaggccctcagctggcggacattggtggtccagtaccgtaggtaatgtaagtaccatgggaggctcagatctgtgccgactgagggctccctctgccgcagctatgcaacgctcccattctgacctagtgcgcagcacacagatgcgaggtcactctggcgccagaaaagcctcgcttagttgctccgctctcggaagctcaccagtccaccgagcccaactccagcctggtgggacgtcaggtcagggcggccaagcccccgcaggcttggaacgcgacctggcccccgaggatgagactagcaattctgcctggatgctgggcgcttcacagctctccgtgccccctcttgacttgggggatacaactgctcacagctcctccgcccaggccgagccaaaagctgccgagcaactggccaccaccacatgccacgcgctgccccctgccgctcttctctgtgggatgagagaggtgcgtgccggaggatgctgccatgcattgcccgcaactggcatactggcctttccaaagttagtcgcatctgtgagcgagtccggcctgcaggcccaacatggggtgaaaatccactgtcggctgtcgggcggactgccagggcacagccactgctgcgcccatctttggggtccagccggcctggttcctgagcccgggagcaggacgaaagatgtgtggactatgacctccgcgaatgacttggctccggccgaggcttcacctcttagcgcacaggatgctggagttcaggcagctccagtggcagcatgcaaggcagtcgctacatccccctctctagaagctccagctgcgttacacgtattccccgaagtgacgctgggcagtagcttggaagaggtcccttcccccgtccgagatgtacgctgggacgctgagggcatgacgtgggaagtgtacggggctgcagttgatctggaagtgctcggcgtggccattcagaagcaccttgaaatgcaatttgagcagttgcagcgagccccagcatccgaggatagtttgagcgtagaggggcggcgagggccactgcgcgccgtcatgcagtcacttaggcgccctagttgttgcggctgttcaggtgctgcacctgagtag

SEQ ID NO: 336466 - DNA, 1377 bp, Artificial Sequence
  derived and/or modified sequence
atgagcagcagccggcccgagcccggcccctgggcccccctgagccctcgcctgcaacccttgagccagtcttcttcctcgctcctgggagaaggtcgggagcagcgacccgaattacggaaaacggcctcaagtactgtgtggcaggctcaattgggagaagcgtcaacgcgacctcaggcccctgaggaggagggcaacccgcccgaaagcatgaagccagctcgggcctcaggcccgaaggcacgtccttctgccggtgggcattggtggagctcaacggtgggaaacgtgtctaccatgggcggcagtgacctctgcagactccgcgcaccgagcgctgcggctatgcaaaggtcgcacagtgacctggtgcggtccacacagatgcgcgggcattccggcgctaggaaagcctcactatcttgttctgcgctgggaagctcccctgtacaccgagcgcagttacagcctgggggtacatctggccagggcggacaggcacccgccggcttggagagggacctggcccctgaggatgagaccagtaactccgcgtggatgctgggtgcctcccagttgagcgtgccaccactagacttaggtgacacaacagcacactctagtagcgcccaagcagaacctaaagcagccgagcaactggccacgacaacatgccatgccctgccgcctgccgccttgctctgcgggatgagagaggtgcgagccggtgggtgttgtcacgccctccccgccacgggaattctagctttcccaaaactggtggccagtgtcagcgagtcagggttacaggcccagcatggtgtcaagatccactgtcgcctgtctggtggtctgccaggccactcgcactgctgtgcacatctgtggggtcccgcaggtcttgtcccagaaccgggctcaagaactaaggacgtctggaccatgacatcggctaatgatctggccccagctgaggcgtcccctctctctgcgcaagatgctggtgttcaagctgctccggtggccgcttgcaaggcagttgctacaagtcctagtttggaggctccggctgcgctgcatgttttccctgaagtgactctgggaagctctctcgaagaggtaccttcgccagtcagggatgtgcgctgggatgccgaaggcatgacctgggaagtttatggcgcagccgtagacctggaagtgcttggtgttgcaattcagaaacacctggagatgcaattcgagcagctccagagagctcccgcaagcgaagattccttgtccgtagagggccgccgaggccccctccgggccgtaatgcagtctctacgcaggccatcctgctgcggctgtagcggtgccgctcccgagtag

SEQ ID NO: 336467 - DNA, 1377 bp, Artificial Sequence
  derived and/or modified sequence
atgagtagttcacgacctgagcccggaccatgggcccctcttagtcccaggttgcagcccctctcccagtcgtccagcagcttgctcggcgaggggcgagagcagcggcctgaattgcgcaaaactgcctcgtccaccgtctggcaggcccagctgggcgaggcaagcaccagaccacaggccccagaggaagagggcaaccctccagagagcatgaaacccgctcgcgcttctggtccaaaggcccgacccagcgcaggagggcactggtggtcaagtactgtgggtaacgtgtctaccatgggtgggtcagatttgtgccggcttcgagccccttctgctgcggcaatgcagcgttcccattctgatctggttcgttccacgcaaatgcggggacacagcggtgcacgcaaggcttcattgagctgtagtgcacttggttcttctcctgtgcaccgcgcacaactgcagcctgggggaacgagtggccaagggggtcaggcccctgccggtctcgagagggacctggcacctgaagatgagacttccaatagcgcatggatgttgggagccagtcagctctccgtcccccctctggatctcggggacaccaccgctcattctagctcagcccaagctgaacccaaggctgctgagcaactggccacaactacttgccatgcactcccacccgcagccctattatgtggcatgagagaggtccgcgctggaggttgctgccacgccctacccgcaactggtattctggcctttcctaagctcgttgccagcgtttcagagtcaggccttcaagcacagcacggagtgaagatccactgtcgactgagcggagggttgccaggtcatagtcactgctgcgctcacttgtggggcccagccggtctggtcccggaaccaggctctcgtaccaaagacgtctggactatgacatcagctaatgatctggcacctgccgaagcatctcctctgtctgcacaggacgctggggtgcaggctgcacctgtggctgcctgcaaggcagtggccaccagtcctagcctagaagcccctgccgctctgcacgtgtttcccgaagttaccctggggagctcgctggaagaggttccaagcccagtccgggatgttcgatgggatgcggaggggatgacatgggaagtgtacggtgctgccgtggacctggaggtccttggagtggctatccagaaacacttggaaatgcagttcgagcagctgcaacgagctcctgctagcgaggatagcctgagcgtcgagggaagaagaggcccactgcgggctgttatgcaatcactccgcagaccctcgtgctgcgggtgttctggggctgcccctgaatag

SEQ ID NO: 336468 - DNA, 1377 bp, Artificial Sequence
  derived and/or modified sequence
atgtccagttccagacctgaaccaggaccctgggcaccattaagcccacggctgcagccgctgagtcagtccagctccagcctgctgggcgagggaagggagcagcgacccgagcttcgaaaaaccgcgagtagtactgtgtggcaagcgcagctgggggaggcttcgactcggccacaagctccagaggaggagggcaatcctcccgaatctatgaagcccgcacgtgccagcggccctaaagctcgcccatcagccggaggccactggtggtcctccaccgtggggaatgtcagtactatggggggatccgatctgtgtagactcagggctccctcggctgctgctatgcagcgcagccattccgatctcgtaaggtccacccaaatgcgcggacactccggcgctcggaaggcctcgcttagttgtagcgccctgggttcatcacccgtgcatcgagcccagctccagccaggcggaacttccggtcaggggggtcaggcccctgccggacttgaacgtgacttagccccagaagacgaaacttccaattccgcttggatgctcggggcatctcagcttagtgtcccacccctcgaccttggagatacgacagctcactcatcgtcagctcaagctgagcccaaggccgctgagcagctggccaccactacttgccatgccttgccgccagctgcactgctgtgcggcatgagggaagtgagggcgggagggtgttgccatgcactcccagctacgggaattctggcatttccaaagctggtcgcctccgtctccgaatctggtttacaggctcagcacggggtgaagatccattgtcgcctctcgggcggtttacctgggcacagccattgttgcgctcacctttggggcccagccggtctcgttcccgagccaggatccagaactaaagatgtgtggaccatgaccagtgccaacgacctggcacccgctgaggccagtcctcttagcgcgcaggacgctggcgtgcaagcggctccagtggccgcatgtaaggcagtggccactagcccatcactggaggctcccgcagcccttcatgtctttccagaggtgacattgggtagtagcctggaggaagtgcccagccccgtacgcgacgttaggtgggatgctgagggaatgacctgggaggtgtacggggcagccgtggatttggaggtattaggagtggctatccagaagcatttggagatgcagtttgagcaactccaacgagccccagcttccgaggattctctgtccgtggaggggagacggggaccactgcgcgctgttatgcagtctctgcggaggcccagttgttgtggctgctctggagctgccccagagtag

SEQ ID NO: 336469 - DNA, 1377 bp, Artificial Sequence
  derived and/or modified sequence
atgtctagctcccggccagagcctgggccatgggcaccgctgtcacctcggctacagccactgtcccagtccagcagctctctccttggggaaggcagagagcagcgacctgaattaaggaagaccgccagctctactgtctggcaggcgcaattaggggaggcgtctacaaggcctcaggcccctgaagaagaggggaatccgccagagagcatgaagcctgcccgtgctagtggccctaaagctaggccttctgcgggaggccattggtggagctctaccgtgggaaacgtgtccacaatgggaggttctgatctttgtaggctgcgagcaccctcagctgccgctatgcagagaagccatagcgacctcgtcaggagcacacagatgcggggtcacagcggcgctcgaaaggcctctctaagctgcagcgcactcggttccagcccggtacacagggctcagctgcagcccggtggcactagcgggcagggcggacaggcacctgcgggactggaacgtgacctcgccccagaagatgaaacgtccaactccgcctggatgttgggagcaagccagctttcagtaccgcctctcgacctgggagatactaccgcacactcttctagtgctcaagcggagcctaaggccgcagagcaactcgccaccacaacctgccacgcccttcccccagccgctctcctctgcgggatgcgggaggtcagagcgggaggctgctgtcatgctctcccagctaccggcatactggccttccccaagcttgtggcatctgtctccgagtctggcctccaggcacagcatggagtgaagatccactgccgcttgtctggtggcttacctggccactcacattgttgtgctcatttatgggggcctgccggattagtacccgagcccggtagtagaacaaaggacgtgtggacaatgacctccgctaatgacctggccccagcagaggcaagcccgcttagcgcacaggacgccggagtgcaggcagcaccagtggctgcatgcaaagctgtggccacatccccgtccttggaagccccagcagccctacatgtttttcctgaagtaactctgggatccagccttgaggaagtgccgtctccagtgcgagacgtgagatgggatgcagaagggatgacctgggaagtgtacggagctgccgtcgatttagaggttttgggagtcgctatacagaaacatttggagatgcagttcgagcagctacaaagagcccctgccagcgaagatagcctcagcgtagagggcaggcgcggaccgttaagagcggtgatgcagtccctgaggaggccaagctgctgcggttgcagtggagctgctcccgagtag

SEQ ID NO: 336470 - protein, 421 aa, Artificial Sequence
  derived and/or modified sequence
MRAPGCGRLVLPLLLLAAAALAEGDAKGLKEGETPGNFMEDEQWLSSISQYSGKIKHWNRFRDDDYIKSWEDNQQGDEALDTTKDPCQKVKCSRHKVCIAQGYQRAMCISRKKLEHRIKQPTVKLHGNKDSICKPCHMAQLASVCGSDGHTYSSVCKLEQQACLSSKQLAVRCEGPCPCPTEQAATSTADGKPETCTGQDLADLGDRLRDWFQLLHENSKQNGSASSVAGPASGLDKSLGASCKDSIGWMFSKLDTSADLFLDQTELAAINLDKYEVCIRPFFNSCDTYKDGRVSTAEWCFCFWREKPPCLAELERIQIQEAAKKKPGIFIPSCDEDGYYRKMQCDQSSGDCWCVDQLGLELTGTRTHGSPDCDDIVGFSGDFGSGVGWEDEEEKETEEAGEEAEEEEGEAGEADDGGYIW

SEQ ID NO: 336471 - DNA, 1266 bp, Artificial Sequence
  derived and/or modified sequence
atgagagcccccggctgcggcagactggtgctgcccctgctgctgctggccgccgccgccctggccgagggcgacgccaagggcctgaaggagggcgagacccccggcaacttcatggaggacgagcagtggctgagcagcatcagccagtacagcggcaagatcaagcactggaacagattcagagacgacgactacatcaagagctgggaggacaaccagcagggcgacgaggccctggacaccaccaaggacccctgccagaaggtgaagtgcagcagacacaaggtgtgcatcgcccagggctaccagagagccatgtgcatcagcagaaagaagctggagcacagaatcaagcagcccaccgtgaagctgcacggcaacaaggacagcatctgcaagccctgccacatggcccagctggccagcgtgtgcggcagcgacggccacacctacagcagcgtgtgcaagctggagcagcaggcctgcctgagcagcaagcagctggccgtgagatgcgagggcccctgcccctgccccaccgagcaggccgccaccagcaccgccgacggcaagcccgagacctgcaccggccaggacctggccgacctgggcgacagactgagagactggttccagctgctgcacgagaacagcaagcagaacggcagcgccagcagcgtggccggccccgccagcggcctggacaagagcctgggcgccagctgcaaggacagcatcggctggatgttcagcaagctggacaccagcgccgacctgttcctggaccagaccgagctggccgccatcaacctggacaagtacgaggtgtgcatcagacccttcttcaacagctgcgacacctacaaggacggcagagtgagcaccgccgagtggtgcttctgcttctggagagagaagcccccctgcctggccgagctggagagaatccagatccaggaggccgccaagaagaagcccggcatcttcatccccagctgcgacgaggacggctactacagaaagatgcagtgcgaccagagcagcggcgactgctggtgcgtggaccagctgggcctggagctgaccggcaccagaacccacggcagccccgactgcgacgacatcgtgggcttcagcggcgacttcggcagcggcgtgggctgggaggacgaggaggagaaggagaccgaggaggccggcgaggaggccgaggaggaggagggcgaggccggcgaggccgacgacggcggctacatctggtag

SEQ ID NO: 336472 - DNA, 1266 bp, Artificial Sequence
  derived and/or modified sequence
atgagagctccaggatgtggcagacttgttctgcccttgctgctgttggccgcagcggctctggccgagggggacgcgaaggggctgaaggaaggagagactcctggcaattttatggaggacgaacaatggctgtcatctatcagccagtatagcggcaaaattaagcactggaaccgcttcagagacgacgactatataaagagctgggaggacaaccagcaaggggacgaggccctcgacactaccaaggatccgtgccaaaaggtcaagtgctcccggcataaggtgtgcattgctcagggttaccagagagctatgtgcatcagcaggaagaagttggagcatcgcatcaaacagccaaccgtcaaattgcatgggaacaaagattccatatgtaaaccctgtcatatggcacagcttgcatcggtctgtgggtccgatggacatacttattcatctgtttgtaagctggagcagcaagcatgcctgagctcaaaacagctggcagtgaggtgtgaggggccatgcccctgtcccacagagcaggccgctactagcacagctgatggcaaacctgagacatgtacggggcaagacctggcagacctaggagatcgcctccgcgactggttccaactgctgcacgagaactccaagcagaacggttctgctagttcagtcgccgggcctgccagtggcctggacaagtcacttggggcgagttgtaaagattccattggatggatgttcagtaaattagacacgtccgccgacttgttcttggaccagacagaactggctgcaatcaacctggataaatatgaggtgtgtatccgacctttcttcaatagttgtgacacctataaagatggcagggtgtctactgccgaatggtgtttttgtttttggcgcgagaagccgccttgtcttgccgaactagaaaggatacagatccaagaggctgctaaaaagaagcctgggatcttcatccccagctgcgacgaggacggttactaccggaaaatgcagtgcgaccagagctccggcgattgctggtgcgtcgatcagctggggcttgagttaactggcacccgtacccatgggtctccggactgcgatgacattgtcgggttctctggagatttcggatccggggtaggttgggaggacgaagaagagaaggagaccgaggaagccggagaggaggcagaagaagaagagggtgaagccggtgaggctgatgacggggggtacatttggtag

SEQ ID NO: 336473 - DNA, 1266 bp, Artificial Sequence
  derived and/or modified sequence
atgagggcccctggctgcggccgcctggtgctgcccctgctgctgctggccgctgctgccctggccgagggagatgccaagggcctgaaggagggggagaccccaggcaacttcatggaggatgagcagtggctgagcagcatcagccagtacagcggcaagatcaagcactggaaccgcttcagagatgatgactacatcaagtcctgggaggacaaccagcagggagatgaggccctggacaccaccaaggacccctgccagaaggtgaagtgcagccgccacaaggtgtgcatcgcccagggctaccagagggccatgtgcatcagcaggaagaagctggagcaccgcatcaagcagcccaccgtgaagctgcacggcaacaaggacagcatctgcaagccctgccacatggcccagctggcctctgtgtgtggcagtgatggccacacctacagctctgtgtgcaagctggagcagcaggcctgcctgagcagcaagcagctggccgtgcgctgtgagggcccctgcccctgccccacagagcaggccgccaccagcacagcagatggcaagccagagacctgcaccggccaggacctggccgacctgggggaccggctgcgggactggttccagctgctgcacgagaacagcaagcagaatggcagcgccagctctgtggccggccctgccagcggcctggacaagagcctgggcgccagctgcaaggacagcatcggctggatgttcagcaagctggacaccagcgctgacctcttcctggaccagacagagctggccgccatcaacctggacaagtatgaggtgtgcatccggcccttcttcaacagctgtgacacctacaaggatggccgggtgtccacagctgagtggtgcttctgcttctggagggagaagccaccctgcctggccgagctggagcgcatccagatccaggaggccgccaagaagaagccaggcatcttcatccccagctgtgatgaagatggctactacaggaagatgcagtgtgaccagagcagcggggactgctggtgtgtggaccagctgggcctggagctgaccggcaccaggacccacggcagcccagactgtgatgacatcgtgggcttcagcggggactttggaagtggagtgggctgggaggatgaggaggagaaggagacagaggaggccggggaggaggccgaggaggaggagggggaggccggggaggctgatgatggcggctacatctggtag

SEQ ID NO: 336474 - DNA, 1266 bp, Artificial Sequence
  derived and/or modified sequence
atgcgggcccccggctgcggccggctggtgctgcccctgctgctgcttgccgccgctgcccttgctgaaggagacgcaaagggtctcaaggaaggagagacccccggtaatttcatggaggacgagcagtggctgtctagtatctcccagtattctggaaaaatcaagcattggaatcgctttagggatgatgactatatcaagtcttgggaggacaaccagcagggcgatgaagccttggataccaccaaggacccctgtcagaaggtgaaatgctctagacataaggtctgcatagctcagggatatcagagggcaatgtgtatctcccgtaaaaagttagaacacagaatcaaacagcccacagtgaaacttcatgggaataaagattctatctgcaagccttgccatatggcgcagctggcatctgtatgcggtagcgacggccatacatacagctctgtatgtaaacttgagcagcaagcttgcctgtcctccaaacagctggcagtccgatgtgaaggaccttgcccgtgtcccaccgagcaggctgcaacaagtactgctgacgggaagcctgagacatgcaccggccaagatttggcggacttgggggataggctgagggactggttccaattacttcatgagaactcaaagcagaatgggtctgcatcttccgtggcgggcccggcaagcgggctggataagtccctaggtgccagctgcaaggactctataggatggatgtttagtaaacttgacacgagtgccgatctctttctggaccagacagagttagcggccatcaatctggataagtacgaagtgtgcataaggcccttcttcaattcatgtgatacctacaaagacggtcgagttagtacagctgagtggtgtttttgcttctggcgcgagaaaccaccgtgtctggccgagttagaacgcattcaaatccaggaagctgcgaaaaagaagccaggtattttcattccgtcctgtgacgaagacggctactacaggaaaatgcaatgcgatcaatctagcggtgactgctggtgcgtggatcagcttggtctcgaactgacgggcactagaactcacggctctcctgattgcgatgatatagttggctttagtggggatttcggttctggggtggggtgggaggatgaggaggagaaagaaacagaggaggccggagaagaagccgaggaagaagagggagaagcaggagaagctgacgacggtggctatatttggtag

SEQ ID NO: 336475 - DNA, 1266 bp, Artificial Sequence
  derived and/or modified sequence
atgcgagctcctgggtgtggcaggttagtacttcctctgcttctgttagccgcagccgctctggccgaaggcgacgcaaaaggactgaaggaaggggagactcctgggaatttcatggaagacgagcagtggctgtcatccatcagccagtacagtgggaagatcaaacattggaatcggttccgcgatgacgactacatcaaatcttgggaggacaatcagcagggggacgaggcattagacactacaaaagacccgtgtcaaaaggtgaagtgttctagacacaaggtgtgtattgctcaaggataccagagggcgatgtgtatttctaggaagaagctcgagcatcgcatcaagcaacccacagtgaagctacacggaaataaagactcaatttgtaagccttgccatatggcacaattagcatctgtgtgcgggtctgatgggcatacttattctagcgtctgtaagttggagcaacaggcatgcctttctagcaaacagctggctgtcagatgcgagggcccttgtccatgccccactgaacaggccgctacttccaccgccgacggtaagccagagacgtgcaccggccaggacctcgcagaccttggtgatagactgcgggattggttccagctgttgcatgagaattccaagcagaacggctccgcaagttcagtggcaggtccagcttccggactggataaaagcctgggcgcttcttgtaaagacagcattggctggatgttttcgaaactggacacctccgctgacctgtttctcgatcaaacggaattggcagccattaatctcgacaaatatgaagtgtgcatccgcccattttttaactcttgtgacacatacaaagatggacgggtgagtactgccgagtggtgcttctgcttctggcgagaaaaaccgccttgtctcgctgagctggagcgtatccagattcaggaggcggctaaaaagaaacctggaatcttcatcccatcttgcgacgaggacggctattacaggaaaatgcaatgtgatcagagctctggagactgctggtgtgtggatcaattgggattggagctcaccgggaccaggactcacggaagcccagactgcgacgacattgtgggtttctctggggattttggcagcggtgtcgggtgggaggatgaagaagagaaagagacagaggaagccggtgaagaagcagaagaggaagaaggtgaggccggagaggctgacgacggcggatatatttggtag

SEQ ID NO: 336476 - DNA, 5436 bp, Artificial Sequence
  derived and/or modified sequence
cagggacatttcgggattctggatttcttggtctgcaactccctgtgtgccaggcggggctgggccccgctgcggctggctggcgtttggcgctctcatcgagggagcgcttcgctttgaaatctacccactccttttttttttttttttttaaaccaggtatgatgatgtcaaacgtgatgctgatgctacagttacagcccctgctggcgcagcctctctgattctctctccctctccgcgtccagtgctgggctttttcagacaagtgcatctcctaaccaggtcacatttcagccgcgacccactctccgccagtcaccggaggcagaccgcgggaggagagctgaggacagccgcgtgcgcttcgccagcagcggggtgggaggaaggacattaaaatactgcagaagtcaagacccccccaggtcgaacccagaccacgatgcgcgccccgggctgcgggcggctggtgctgccgctgctgctcctggccgcggcagccctggccgaaggcgacgccaaggggctcaaggagggcgagacccccggcaatttcatggaggacgagcaatggctgtcgtccatctcgcagtacagcggcaagatcaagcactggaaccgcttccgagacgatgactatatcaagagctgggaggacaatcagcaaggagatgaagccctggataccaccaaggacccctgccagaaggtgaagtgcagccgccacaaggtgtgcattgcccagggctaccagcgggccatgtgcatcagtcgcaagaagctggagcacaggatcaagcagccgaccgtgaaactccatggaaacaaagactccatctgcaagccctgccacatggcccagcttgcctctgtctgcggctcagatggccacacttacagctctgtgtgtaagctggagcaacaggcgtgcctgagcagcaagcagctggcggtgcgatgcgagggcccctgcccctgccccacggagcaggctgccacctccaccgccgatggcaaaccagagacttgcaccggtcaggacctggctgacctgggagatcggctgcgggactggttccagctccttcatgagaactccaagcagaatggctcagccagcagtgtagccggcccggccagcgggctggacaagagcctgggggccagctgcaaggactccattggctggatgttctccaagctggacaccagtgctgacctcttcctggaccagacggagctggccgccatcaacctggacaagtacgaggtctgcatccgtcccttcttcaactcctgtgacacctacaaggatggccgggtctctactgctgagtggtgcttctgcttctggagggagaagcccccctgcctggcagagctggagcgcatccagatccaggaggccgccaagaagaagccaggcatcttcatcccgagctgcgacgaggatggctactaccggaagatgcagtgtgaccagagcagcggtgactgctggtgtgtggaccagctgggcctggagctgactggcacgcgcacgcatgggagccccgactgcgatgacatcgtgggcttctcgggggactttggaagcggtgtcggctgggaggatgaggaggagaaggagacggaggaagcaggcgaggaggccgaggaggaggagggcgaggcaggcgaggctgacgacgggggctacatctggtagacgccctcaggagccggctgccgggggggactcaacagcagagctctgagcagcagcaggcaacttcgagaacggatccagaaatgcagtcagaaggaccctgctccacctggggggactgggagtgtgagtgtgcatggcatgtgtgtggcacagatggctgggacgggtgacagtgtgagtgcatgtgtgcatgcatgtgtgtatgtgtgtgtgtgtgtggcatgcgctgacaaatgtgtccttgatccacactgctcctggcagagtgagtcacccaaaggccccttcggcctccttgtagctgttttctttccttttgttgttggttttaaaatacattcacacacaaatacaaattgacaggtcaaaatccatgaaatgagatcccccagccgtgtcctccagcccagccctgaccccttggtttctaccctggctccccttggtttctaccctggctcaaccgacccctgtctgcccttctccctcttgcttctgaggtcaagctctggcctgcgagcctgtccccattgcaaaggggagggaggggcagggagctgtctaccagctgaggtcctcccaaaactgggccgatgtggtgtgacatccccaccagcctcagatgagacgggccaggacgcccagccacagcaagccctgtccctttgccggatccccaaacactagagaagctctcctaacccaaggcggagaatgaaggtggtggcggcagaggaggagggcagcagctgagaggccagggacagggtgcctcgccaagctgtctgaggtctgtcccaggtggcccaggtggtgcaggtagaacagggtgaggagagggggtcggctcagcaggaggaggctgtggctgcagagcctgggggagcttttaggtgttgagatggggcagctctgaatcctagaccctggaatagcctgtcccttttctctgggtctcgtggtggagccatgatctgggctgctctcttggggacactgggtggtggttacacagttgacctctgcctggctcccccttggtgcaactcctgcctccatcccccttgctggggtcccctcatccacttgagggcgcctgagggccaggagcagcaggcaaggagcctgggtctaggctaagggggtgtgtgcccacctcctccctgacccttaacactcctgtcctgcccagaccaacagagagagctgtccctgagaccccggagagaagcagctgccgaaagctgcagcctttccgcactctgagaccatgatcttcctcctgccaggggagagccacccacaggccatgtccagccccacttccctcagcccccagggcttccttctggcccctctgaggattccctagggctgccccgcagaggggcttccccaagctctgttttgaagcctgcaatgtggaaaagtgagaagtcagagggaacaggacaggtgcagccgggctctgaggccacacctcacacctcgctgttccccaacatcccctgagcagtgtgagctcatctcaccagatgagaagaggccctgtgcatttcttttgtttgtttgttgctgttttcccccacccatccagttctcctcagcaaagcaaattccttaacacctttggtggagaatttcttacccagacttggggctgtgatgcccttcagtgcgtggtgagtgcagcgtgtgtgcgtgtgcctgtgtgtgaacctgggggccatcctggtggcctgggagcgtgaggagaggccccctgtgtgctgggtgagtggtgggtgtggggtcaatgcagtgaggctctctgggtgaggctcccaacctggcagtccccagcctcccagcatctgtgagcgtctgttggactttacagaagagcctcatcctgtctgcccctcactctgccctggaatcaacatcttccgagtccttcttgggggaaatagcagagccccacttaactccataaactgcttcccattccgcagcccagttctgattgttgaggtgtcgcgtcgttccaggtcccccagtcccctctttctcctgtcctctctctgtccttcacctccccactccagccccggctcagttcagggaaatgctgttccacatcagccctctgctctctgaggcagccgcgcctctgactcggagctacttgaaacttctgctcttgctaggattggagtctacctatctcttccatttgtcccagctggagttctggaactttcctcctcggggtgggggtgggggttgttaaggatgctggggggcctggggaaggaaggagttcagaggaagggtgtcccctgtcctcttgatgtcaccctccgctcctgggacacgtgctctctctgtctctgggtcttctggctgtgcacgtttgtgtgtccttgtaaatatgttttaggaagaaagcaaaagggactgaactagcctctggtaggattgcaggggtccagccttgcctgtttccgaagcccccacactgcctttcgccctactgagactggtcccctcaaaaggtagacaaaacagcagctccctgtggagctgaagggcggcctcaaagtggctttttgttagacaaggttaaggtttcctcatgagcaaggttgcagatcggtccttcctcagctccttgatttgtgaccttgaccaaggggcctgccacccagcccctccagtgccctctcctcgatgcctcgctccttcctgcccccactcccctggcttaggcaggtaggggaattagggccatgctggaagaagcttaaccatgtgttcaaagaacggtttcttgcttgcttggtcctggaactccccttggctgccccaggcctccttggcccatgggtgctgggggaggtggatgtcagatctggtaggttgcagcagagaaaataaatgtgccttgagagaccactcagagagggtccaagggtgatggagaaggaagcatggcctgggagcttggaagggaggggtggtgggtggcggcatcttgactgccccctgttgtcccacacgtggggggtggtcaccccccttcactccagcccgcctgccttcagccttccatgagcttcacctgcttccaacttcactttggagggggtggggtccgttggcatcaacacggggaccctctgcttcaccaaagcccgagccctcagcccctggggagaacaaatggctgagctttgatacctggggtcgtcgagaggctgcgggctggcggcagtcccaggggagagacaccacagaaggagacccagacatcccgaggaagttcccagcagagcaaactgctttccagcctgaagcctgcttaaactgtgtgatgtgcaataactgagcttagagttaggaattgtgttcaagtgcttggatttccgtctgtagatttaactgctgaaattgtatctctcagtaattttagatgtcttttaaaaaattgaaaaacaaagtgttagactgtgtgcgtgtgcgttgatgggcactcaagagtcccgtgagtcatccagccctgcctttcccctgcgcccccatcctctcacgtcccgccccgcctccacttggggaccctgcctcgtgtcgtctttatctgcctattactcagcctaaggaaacaagtacactccacacatgcataaaggaaatcaaatgttatttttaagaaaatggaaaataaaaactttataaacacc

SEQ ID NO: 336477 - protein, 696 aa, Artificial Sequence
  derived and/or modified sequence
MDADMDYERPNVETIKCVVVGDNAVGKTRLICARACNTTLTQYQLLATHVPTVWAIDQYRVCQEVLERSRDVVDEVSVSLRLWDTFGDHHKDRRFAYGRSDVVVLCFSIANPNSLNHVKSMWYPEIKHFCPRTPVILVGCQLDLRYADLEAVNRARRPLARPIKRGDILPPEKGREVAKELGLPYYETSVFDQFGIKDVFDNAIRAALISRRHLQFWKSHLKKVQKPLLQAPFLPPKAPPPVIKIPECPSMGTNEAACLLDNPLCADVLFILQDQEHIFAHRIYLATSSSKFYDLFLMECEESPNGSEGACEKEKQSRDFQGRILSVDPEEEREEGPPRIPQADQWKSSNKSLVEALGLEAEGAVPETQTLTGWSKGFIGMHREMQVNPISKRMGPMTVVRMDASVQPGPFRTLLQFLYTGQLDEKEKDLVGLAQIAEVLEMFDLRMMVENIMNKEAFMNQEITKAFHVRKANRIKECLSKGTFSDVTFKLDDGAISAHKPLLICSCEWMAAMFGGSFVESANSEVYLPNINKISMQAVLDYLYTKQLSPNLDLDPLELIALANRFCLPHLVALAEQHAVQELTKAATSGVGIDGEVLSYLELAQFHNAHQLAAWCLHHICTNYNSVCSKFRKEIKSKSADNQEYFERHRWPPVWYLKEEDHYQRVKREREKEDIALNKHRSRRKWCFWNSSPAVA

SEQ ID NO: 336478 - DNA, 2091 bp, Artificial Sequence
  derived and/or modified sequence
atggacgccgatatggactatgagcgtcccaacgtagagacaattaagtgcgtggtggtcggagataatgccgtgggtaaaaccagactgatctgtgcccgggcttgtaatacaactctgactcaatatcaactgcttgccactcatgtgccaaccgtctgggccatcgaccaatatagagtgtgccaagaggtcttggagcggtcccgagacgtggtggatgaggtttctgtttctctgcggctctgggatacttttggcgaccatcacaaggatagaagattcgcttatggacgaagtgatgtggtagtcctgtgtttctccatcgccaaccccaacagtcttaaccacgttaaaagtatgtggtatcccgagattaaacacttctgtccacgcacccctgtgatcctcgttggatgtcagttggatctgaggtacgcggacctagaggcagtcaatcgcgctcgccggcccctggcccggccaatcaaaaggggggacattctgccccctgaaaagggccgcgaggtggcgaaagagctcggcctcccctactatgagacaagcgtattcgaccaattcggtatcaaggatgtctttgataatgcaatcagggcagccctcatttcccgtcgacatttgcagttctggaagagtcatttgaagaaagtccaaaaacccctcttacaagctccatttcttccgcccaaagctcctccaccagtcattaagatcccagagtgtcctagcatgggtacaaatgaggccgcttgccttcttgacaatcctctgtgcgcagacgtgctgttcatcctgcaggaccaggagcacatctttgcacaccggatctacttggccactagcagtagtaagttttacgacctgttcctgatggagtgcgaggagtctcccaatggttctgaaggcgcatgtgagaaggaaaagcagtcaagggattttcagggtcgaatcctttccgtggatccagaggaggagcgggaagaggggccaccccgaattccccaggctgatcagtggaaatcaagcaacaagagcctcgtcgaggccctgggcttggaagccgagggagctgtgcctgagacccagactcttacaggatggtccaaaggattcattgggatgcacagggaaatgcaggttaatccaataagcaaaagaatgggtccgatgactgtggtcagaatggacgcttccgtccagccaggtccctttaggacacttctgcagttcttgtacaccgggcagctggacgagaaagaaaaggacctagtgggcctcgcccaaatcgctgaagtgctggaaatgttcgatctccgcatgatggtggaaaacatcatgaacaaggaagcttttatgaatcaggagatcaccaaagcattccatgttcgcaaggccaatcgaatcaaggagtgcctttctaagggaaccttctccgatgttaccttcaaactggacgatggagccatctccgctcacaagcctctgttaatttgcagctgcgaatggatggcagcaatgtttggcggatcttttgtagaaagcgccaactccgaggtttacctgcccaacataaacaaaatatccatgcaggccgtgctcgactatctttacacgaagcagctctcgcccaacctggacctggatcccctggagctgattgccctggccaatcgtttttgcttgccccatttagtggccctagcagaacaacacgccgtacaggagctgaccaaagccgccacatcaggcgtggggatcgacggcgaggtactgagttatctggaactggctcagttccacaatgcccatcagctggcagcatggtgtctgcatcacatttgtacgaattataactctgtctgcagtaagtttaggaaggaaataaagtcaaaatctgccgataaccaggaatacttcgagcggcatcggtggcctccggtctggtacttgaaggaagaggatcattaccagagggttaaacgcgaaagagagaaagaggatattgctctcaacaagcatcgcagtcgccgcaagtggtgtttttggaactcctcccctgccgtagcctag

SEQ ID NO: 336479 - DNA, 2091 bp, Artificial Sequence
  derived and/or modified sequence
atggacgccgatatggattatgagagacctaacgttgaaaccattaagtgcgtggtggtaggagataacgccgtaggaaagacacgcctcatctgcgcccgtgcatgcaataccaccctcacacaataccagctgcttgctacacacgttccaaccgtctgggccatagatcagtaccgagtgtgccaagaagtgttagagaggtcgagagacgtcgttgatgaagtctcagtcagccttaggctctgggatacatttggagatcatcataaggaccgtcggtttgcctacggacggtcagacgtggtggtgctgtgtttcagcattgcaaaccccaactccctgaatcatgtgaaaagtatgtggtacccagagatcaaacatttctgccctcgcacacccgtgattctggttggctgccagttggatctgcgatatgctgacctggaagccgtcaatcgcgcccgcaggccactagctagacctataaaaaggggcgacattctgccgccggagaagggcagagaggtagctaaggaattgggcttgccttattacgagaccagcgtgtttgaccagttcggaatcaaggatgtttttgacaatgccatacgtgctgcccttatctccaggcggcatctgcagttttggaagtctcatctcaagaaggtccagaagccactcttgcaggccccctttctcccccctaaagcgccacctccagtgatcaagattccagagtgtccttcaatggggactaatgaggctgcttgcttactcgataatcccttatgtgctgacgtcctgttcattttacaggaccaggaacacatcttcgcccaccgcatatatctggccacctcctccagcaagttctacgacctgttcctgatggaatgtgaggaatctcctaacggcagtgagggggcttgtgaaaaggagaagcagagcagagactttcagggacggatactgtctgttgatccagaagaggagcgcgaggaggggcccccgagaatccctcaagctgaccagtggaaatcgagcaacaaatctcttgttgaggcactgggcctggaggccgaaggcgcagtccccgagacccaaacactgactgggtggtctaaaggctttatcggtatgcacagagaaatgcaagtgaaccctatttccaaacgtatggggcccatgaccgtggtgagaatggatgcctctgtgcaacccggcccattcaggactcttctgcaattcttatacacaggccagctggatgaaaaagaaaaggatctcgtggggcttgcccagattgcagaagtgctggaaatgtttgatctaagaatgatggttgagaatatcatgaacaaagaggcatttatgaaccaggaaatcaccaaggcttttcatgttaggaaggccaatcgaatcaaggagtgtttgtctaagggaacattctcagacgtgacctttaagctcgatgatggggccatttccgcccataagccgctcttaatatgttcttgtgaatggatggcagctatgttcgggggaagctttgtagaatcagcaaactccgaggtgtacttgcccaacatcaacaagatctccatgcaagctgtgctggactacctctatactaagcagctgagtcctaatctcgaccttgaccctctagaactgatcgctctcgcgaacagattctgcttgcctcacttggttgctctggccgaacagcacgccgtccaggaactgacgaaggcagctacttcgggcgtggggattgacggcgaggttctgtcttatctggagctggcacagttccataatgctcaccagctcgctgcttggtgccttcaccacatctgcaccaactataactctgtgtgttcaaaattccgtaaagagatcaagtctaagagtgctgataatcaggaatactttgaacggcaccgttggccacccgtatggtatctcaaagaagaggaccactatcagagagtgaaacgagaacgcgaaaaggaggatatcgctctgaacaaacacaggtcacgaagaaagtggtgcttctggaacagcagccctgctgtagcatag

SEQ ID NO: 336480 - DNA, 2091 bp, Artificial Sequence
  derived and/or modified sequence
atggatgctgacatggactatgagcggcccaacgtggagaccatcaagtgtgtggtggtgggggacaatgctgtgggcaagaccaggctcatctgtgcccgggcctgcaacaccaccctgacccagtaccagctgctggccacccacgtgcccaccgtgtgggccatcgaccagtacagagtgtgccaggaggtgctggagaggagcagagatgtggtggatgaggtgtctgtgtccctgcggctgtgggacaccttcggggaccaccacaaggacagaagatttgcctacggccgcagtgatgtggtggtgctgtgcttcagcatcgccaaccccaacagcctgaaccacgtgaagtccatgtggtacccagagatcaagcacttctgccccaggacccctgtgatcctggtgggctgccagctggacctgcgctatgctgacctggaggccgtgaacagagcccggcggcccctggcccggcccatcaagagaggagacatcctgcccccagagaagggccgggaggtggccaaggagctgggcctgccctactatgagacctctgtgtttgaccagtttggcatcaaggatgtgtttgacaatgccatccgggccgccctgatcagcagaagacacctgcagttctggaagagccacctgaagaaggtgcagaagcccctgctgcaggcccccttcctgccccccaaggcccctcctcctgtgatcaagatcccagaatgtcccagcatgggcaccaatgaggccgcctgcctgctggacaaccccctgtgtgctgatgtgctcttcatcctgcaggaccaggagcacatctttgcccaccgcatctacctggccaccagcagcagcaagttctatgacctcttcctgatggagtgtgaggagagccccaatggaagtgaaggagcctgtgagaaggagaagcagagccgggacttccagggccgcatcctgtctgtggaccctgaggaggagcgggaggagggccccccacgcatcccccaggccgaccagtggaagagcagcaacaagagcctggtggaggccctgggcctggaggccgagggcgctgtgcctgagacccagaccctgaccggctggagcaagggcttcatcggcatgcaccgggagatgcaggtgaaccccatcagcaagaggatgggccccatgacagtggtgaggatggatgcctctgtgcagcccggccccttccgcaccctgctgcagttcctgtacacaggccagctggatgagaaggagaaggacctggtgggcctggcccagattgctgaggtgctggagatgtttgacctgaggatgatggtggagaacatcatgaacaaggaggccttcatgaaccaggagatcaccaaggccttccacgtgaggaaggccaaccgcatcaaggaatgtctgagcaagggcaccttcagtgatgtgaccttcaagctggatgatggagccatcagcgcccacaagcccctgctgatctgcagctgtgagtggatggccgccatgtttggaggcagctttgtggagagcgccaacagcgaggtgtacctgcccaacatcaacaagatctccatgcaggccgtgctggactacctgtacaccaagcagctgagccccaacctggacctggaccccctggagctgattgccctggccaaccgcttctgcctgccccacctggtggccctggccgagcagcacgctgtgcaggagctgaccaaggccgccaccagcggcgtgggcattgatggagaggtgctgagctacctggagctggcccagttccacaatgcccaccagctggccgcctggtgcctgcaccacatctgcaccaactacaacagcgtgtgcagcaagttcaggaaggagatcaagagcaagtctgctgacaaccaggagtactttgagcggcaccgctggccccctgtgtggtacctgaaggaggaggaccactaccagagggtgaagcgggagcgggagaaggaggacatcgccctgaacaagcacaggagcaggaggaagtggtgcttctggaacagcagccctgctgtggcctag

SEQ ID NO: 336481 - DNA, 2091 bp, Artificial Sequence
  derived and/or modified sequence
atggacgccgacatggactacgagcggcccaacgtggagaccatcaaatgcgtggtggtgggggacaatgccgtcggcaagaccagactgatttgtgcccgggcatgtaataccaccttgacccaatatcagttattggcgacacacgtgcctactgtgtgggccattgaccagtatcgtgtgtgccaggaggtgctggaaagatcgcgagatgttgtggatgaagttagcgtgagtctccggctttgggacacctttggggaccatcataaagacagaaggttcgcgtatggcagaagtgacgttgtggtgttgtgtttctccatcgcaaaccccaatagccttaatcatgtcaagagtatgtggtaccctgagatcaaacatttctgcccacgaacacccgtcatcctggtaggttgccagctggacctgaggtacgcggatttggaggctgttaaccgcgctcgcaggcctttagctcgacctatcaagaggggggacattttgcccccggagaaaggtcgagaggtggccaaggaacttggccttccatactacgaaacttcggttttcgaccaattcggcatcaaggacgtctttgacaacgctatccgagctgctctgatatcccggcgccacctgcagttttggaagagtcacctcaaaaaggttcagaagcctctgctacaagctcccttcctgccccccaaggcccccccgcctgtcattaaaatcccagagtgcccctccatgggaaccaacgaggccgcctgtctgctggacaacccactgtgcgcggacgttctattcattctgcaggaccaggaacatattttcgcgcaccggatatatctcgctacctcctcttcaaaattctacgatttgtttttgatggaatgcgaggaaagcccaaatgggtccgaaggtgcatgcgagaaggaaaagcagtccagggacttccagggacgaatattatctgtcgacccagaggaagagagggaggaggggccacctcggatccctcaggccgaccagtggaaaagctcaaacaaatctctggtagaggcccttgggcttgaagctgagggtgctgtcccggagacacagaccctgaccgggtggtctaaaggatttataggaatgcaccgcgaaatgcaggtcaatccaatcagcaagcggatggggccaatgactgtcgtgaggatggacgcctccgtgcaaccagggccttttcggacactactgcagtttttatacactgggcagcttgacgaaaaagagaaagacctggtaggactggcccagattgcagaggtgctggaaatgtttgatctgaggatgatggtcgaaaatattatgaataaggaagcgttcatgaatcaggagatcactaaagcgttccacgtgagaaaggccaatcggatcaaagagtgcctgtctaaaggcacattcagcgacgtaacctttaaacttgatgacggggctatttcagctcataagccactgctgatttgcagttgtgagtggatggcggcaatgtttggggggagttttgtagaatcggctaacagtgaggtgtatttgccgaacatcaacaagatctcaatgcaggctgtgcttgactacttgtatacgaagcagctcagcccaaatctggatttagaccctctggagttgatagcactcgcaaatagattctgcctgccacatctggtcgccctggctgaacaacacgccgtccaggaactgacgaaggctgccactagtggggttgggatagatggcgaagtactctcctacctagaattagcgcagtttcacaatgctcatcagctggccgcatggtgcctgcatcatatttgtaccaattacaactcagtgtgcagcaaatttaggaaggaaatcaaatccaagagtgccgacaaccaagaatacttcgaaaggcatagatggccccccgtatggtacctgaaggaggaggaccattatcaaagagtcaagcgagagagggagaaggaagatatcgcattgaacaagcatcgcagtcggcgtaagtggtgcttctggaattcttcaccagctgtggcatag

SEQ ID NO: 336482 - DNA, 2091 bp, Artificial Sequence
  derived and/or modified sequence
atggacgccgacatggactacgagcggcccaacgtggagaccatcaaatgcgtggttgtcggcgacaacgccgtcggaaagactcggctgatttgcgcccgtgcttgcaacactacccttactcagtaccagttgttggcaacccatgtgcccaccgtttgggccattgaccagtatcgggtgtgccaggaggtgctggaacgctcaagggatgtcgtagacgaggtaagcgttagcttgcgactttgggacacatttggcgatcaccacaaggataggcggtttgcgtacggccggtccgacgtcgtggtactttgcttttcgattgccaatcctaacagtctgaaccacgtcaaatctatgtggtaccctgagatcaagcacttctgtcctcgcaccccagtcattctggtcggctgtcagctggatctgcgatatgctgatttagaagccgtaaaccgcgcacggcgacccctggctcgaccaatcaaaagaggggacatcctgccacccgaaaagggacgagaggtcgccaaggaactgggcctgccttattacgagacttctgtctttgatcaattcggcatcaaggatgtgtttgacaacgccataagggccgccttgatctctcgacgacatttgcagttctggaaaagccatttgaagaaggtccagaagcctcttttacaggccccttttctgcctcccaaagccccacctcccgttataaaaatccctgagtgccctagcatgggtaccaatgaagccgcttgcctcctagacaatccattgtgcgcagacgttctattcatcctccaggaccaggaacacatctttgcgcaccggatatatttggccacctccagctcaaagttttatgatttattcttgatggagtgtgaggagagcccgaatgggtccgagggtgcttgcgagaaggaaaaacagagcagggattttcagggccgaatcctgtcagtggatcccgaagaggaaagagaggaaggaccacctaggataccccaggccgaccaatggaagtcttctaataagtcactcgtggaagctttgggacttgaggcggagggagccgtgcctgagacccagacactgaccgggtggagtaaggggttcataggaatgcacagggagatgcaggtcaatcccatatcaaagaggatgggtccgatgactgtggtaagaatggatgcaagcgtacaacccggtccctttaggactctgctgcagttcctctacaccggacaactcgacgagaaggagaaagatctggtcggtcttgctcaaatcgcagaggtccttgaaatgttcgatctccgtatgatggtcgaaaacatcatgaacaaggaggccttcatgaaccaggagattacaaaggctttccatgtgcggaaggcgaacagaatcaaggaatgcctctccaaaggaactttctctgatgtgacttttaaattagacgatggagctatctctgcgcacaagccactgctcatctgctcatgtgagtggatggccgccatgtttggcggctcctttgtcgagtctgcaaattccgaagtctacctgccaaatatcaacaagatcagcatgcaggcagtcttagactacctttacactaagcagctctcacctaatctcgatctagatcctttggagttgattgcccttgccaaccgtttttgcctacctcacctagtcgccctggccgagcagcatgccgttcaggaactgacaaaggctgcaaccagcggagtgggaattgacggcgaggtcttatcataccttgagctggcgcagttccacaacgcccaccagttagcggcctggtgcctgcaccatatctgtacaaactataactcagtctgttcaaagtttcgcaaagagatcaaaagcaaatccgccgataatcaggagtacttcgaacgtcaccgttggccgccagtgtggtatctgaaggaggaggaccactatcagcgggtgaagagagagcgggaaaaggaagatattgctttgaacaagcaccgcagtcgaaggaaatggtgtttttggaactcctcccctgccgtcgcatag

SEQ ID NO: 336483 - DNA, 2091 bp, Artificial Sequence
  derived and/or modified sequence
atggatgctgatatggactatgagaggcctaatgtggagaccataaaatgcgtagtggtcggagataatgccgtgggtaaaactcggctgatctgcgctagagcatgcaatacaaccctgactcagtatcaactgctggccactcacgtacccaccgtttgggctatagaccagtatcgcgtatgtcaggaggtgctggaaagaagtcgagacgtggtggacgaggtatccgtgagtctccgtctgtgggatacctttggcgaccaccacaaggaccgaagattcgcttacggcagaagcgacgtggtggtgctgtgcttctctatcgccaaccccaactcattgaatcacgtgaagagtatgtggtatccggaaattaaacacttctgcccaagaacacccgtcattctcgttgggtgccagctggacctacgctacgcagatctggaagcagtgaaccgggctcgacgcccactggcccgtcctataaagaggggtgacattctacctcctgaaaaagggcgagaagtggctaaagagctcggattaccatactatgagacctctgtattcgaccagtttggtatcaaggacgttttcgacaatgccataagagccgcactgatctctaggcgccatctgcagttctggaaatcgcacctgaaaaaagtgcaaaaacccttattacaggccccttttctgccccctaaggcacccccaccggtgatcaaaattccagagtgccctagcatgggcactaatgaggcagcgtgcctccttgacaatcccctctgtgctgatgtcctgtttatcctgcaagaccaggagcacatcttcgcccacagaatctacctagccactagttcaagcaagttttacgacctgtttctgatggaatgtgaagaatcgcctaatgggtcagagggggcttgcgaaaaggaaaagcaaagcagggacttccagggcaggatcctgtcggtggaccccgaagaggagagggaggagggccctccgcgaatcccacaggccgatcagtggaaaagctctaacaaatccttagttgaggcactggggctggaggctgagggggcagtcccagagactcagaccctgactggctggagtaagggttttatcgggatgcaccgggagatgcaggtgaacccaatctccaagaggatgggcccaatgaccgtcgttcggatggatgcatcagttcagccgggtccattcaggacactgctacaattcctgtacaccgggcagcttgatgagaaggagaaagacctggtggggctggcccagatcgccgaggtgctggaaatgtttgatcttcgcatgatggtagaaaatataatgaacaaggaggcctttatgaatcaggagatcactaaggccttccacgtccgtaaggcgaaccgcatcaaagagtgcctctcaaaaggcaccttctccgacgttacctttaaactcgatgacggcgctatcagtgcccataaacctctcctgatctgctcttgtgaatggatggctgccatgttcggtggctctttcgtggagagcgccaattctgaagtgtacttaccgaatatcaataagatttcgatgcaggctgtgttagattacctctacacgaagcagctctcccccaacctggacctggaccccttagaattaatagctcttgcaaatcggttctgtctgccccatctggtggccctagccgaacagcatgccgtgcaggagctcacgaaagccgcaacctctggtgttggaattgatggcgaggttctgtcttaccttgagcttgcacagtttcacaatgcccaccagctggcagcctggtgcttgcaccacatctgcacgaactacaatagcgtctgctcgaagttccgcaaagagatcaagtccaaaagcgccgacaaccaggagtattttgaaaggcacaggtggccgccagtctggtacctcaaggaagaagatcattatcaacgggttaaacgagaacgcgagaaagaagatatcgccctgaacaaacataggagcagaaggaaatggtgcttctggaactccagccctgcggtcgcatag

SEQ ID NO: 336484 - DNA, 2091 bp, Artificial Sequence
  derived and/or modified sequence
atggatgctgacatggactatgagcgcccaaacgtggaaacaattaagtgcgtggtggtgggggacaacgctgtcgggaagacacgcctcatctgcgcccgtgcctgtaatacaaccttgacccagtaccaactactggcgacccacgtgcccacagtgtgggctatcgatcaataccgcgtatgtcaagaggttctggaaaggagtcgggatgtcgtcgacgaagtgtcggtttcactgaggctgtgggataccttcggagaccatcacaaagaccgcaggttcgcctacggcagatccgacgtggtggtcctgtgcttctctatcgccaaccctaatagtctgaatcatgtaaagagcatgtggtacccagagatcaaacatttctgtccaagaacccccgtgatcctggtgggatgtcagctcgatctgcgttacgccgacctggaagccgtaaatcgcgcacgcagacccctggctcggcctattaaaaggggcgacatattgcctccagaaaaggggagggaagtggccaaggaactgggactgccttactatgaaacctccgtgtttgaccagtttggtataaaagacgtgtttgataatgccattcgcgcagccctcattagcaggcgtcacttgcagttttggaaaagccacctgaagaaagtgcaaaagcccctcctgcaagcgccatttttgcctccaaaggcccctcctccagtcatcaaaatcccagaatgtccgagcatggggaccaatgaggcagcgtgtctactcgacaaccctctctgtgcagacgttctcttcatcctgcaggatcaggagcacatcttcgcgcacagaatctacctggcaacgagcagctcgaaattctatgacctctttctcatggagtgcgaggagtccccgaacggttctgagggagcctgcgagaaggaaaaacaatcacgcgatttccaaggacggattttgtcagtggatcccgaggaggagcgggaagagggccctcctcgcattccacaggccgaccaatggaaatcatcaaacaagtcactagtcgaggccctcggcctggaagcagaaggcgcagtccctgaaacacagactctgactgggtggtcaaaagggttcatcgggatgcaccgagagatgcaagtgaaccccatcagcaaacgaatgggccctatgactgtcgtccgcatggacgctagtgttcagccgggaccatttagaacgctgttgcagtttctgtacacaggccagctcgacgaaaaggagaaagatctggttgggttagcccagattgcagaagttttagagatgtttgacctccgaatgatggtggaaaacatcatgaacaaggaggcattcatgaaccaggagattacaaaggcatttcatgtgaggaaagccaacaggattaaagagtgtttgtcgaaaggaacgttcagtgatgtgaccttcaaactggatgacggagcgatctctgcacacaagccactattgatttgtagttgtgaatggatggccgcaatgttcgggggttcattcgtcgaatccgcaaattctgaggtgtaccttcccaatatcaacaagatctctatgcaggcagtccttgattatctgtacactaagcagctttccccaaatctggatctggatcctctcgagctgatcgcacttgcgaatagattttgcctgcctcacctagttgctctcgccgaacagcatgccgtgcaagagctcacgaaagccgcaacgagcggcgtcggcatcgatggcgaagtgctgtcctacctcgagttggcccaatttcataacgcccaccagctcgccgcttggtgcttacaccacatctgcaccaactacaactcagtgtgtagtaagtttcgtaaagaaattaaatcgaagtccgcagataaccaggaatactttgaacggcaccgctggccacctgtgtggtacctaaaagaggaggatcactatcaacgggtcaaaagggagagggagaaagaagatattgccctgaataaacacaggtcccgtagaaaatggtgtttttggaacagtagcccagctgtggcatag

SEQ ID NO: 336485 - DNA, 4473 bp, Artificial Sequence
  derived and/or modified sequence
ggggtgggggcaggcgaaggggagggctgcgggtggaaaggggcgagcccctctcgcccgggactgggaagagcggccacggcgccgggcgaggcggcagggcgaggcagtgccatgctgcctttgtgcaaagttgggcggcgggcggcgcgccgcgcgcaggggccccgcacacccgcgaccgcgcgcagccgtggctgctgctgagtggcgggggcccccccgctccccccggcccttgaaggcggagagagctcgcgtctcgctcggcttcagggtaagtccagctgtgagcagagtgttctgttcttcacttccagcaagccagagtttcataaatggacgctgacatggactacgaaagacccaacgttgaaactatcaaatgtgtggtcgtgggtgacaatgccgtggggaagacgcgcttgatctgtgccagggcgtgcaacaccacactcacgcagtatcagctgctggccacccacgtgccaacagtgtgggcgattgaccagtaccgcgtgtgccaggaggtcttggagcgttctcgggatgttgttgatgaagtgagtgtttctctcaggctttgggatacttttggtgatcatcacaaagacagacgctttgcatatggcaggtctgatgttgtggtcctctgtttttcgattgctaatcccaattccctaaatcatgtgaaaagcatgtggtatccagaaatcaagcacttttgccctcgaacacccgttatccttgttgggtgccagcttgatctccgctatgccgacctggaagctgttaatcgagccaggcgcccgttagcaaggcccataaagagaggggatattttgcccccagaaaaaggccgagaggtagcaaaggaacttggcttaccatactatgaaacaagcgtgtttgaccagtttggtatcaaggatgtgtttgacaatgcaatccgagcagcgctgatttcccgcaggcacctgcaattctggaaatcccacctaaagaaagtccagaaacctttacttcaggcacccttcctacctccaaaagcccctccaccggtcatcaaaattccagagtgtccttccatggggacaaatgaagctgcctgtttactggacaatcctctatgtgccgatgttctgttcatccttcaggaccaggaacacatctttgcacatcgaatttacctcgctacctcttcttccaaattttatgatctgtttttaatggaatgtgaagaatccccaaatgggagtgaaggagcctgtgagaaagagaagcagagcagagatttccaggggcggatattgagtgtcgacccagaggaagaaagggaggagggcccgcctaggattcctcaggccgaccagtggaagtcttcaaacaagagcctggtggaggctctggggctggaagccgagggtgcagttcctgagacacagactttgaccggatggagtaaggggttcattggcatgcacagggaaatgcaagtcaaccccatttcaaagcggatggggcccatgactgtggtcaggatggacgcttcagtccagccaggcccttttcggaccctgctccagtttctttatacgggacaactggatgaaaaggaaaaggatttggtgggcctggctcagatcgcagaggtcctcgagatgttcgatttgaggatgatggtggaaaacatcatgaacaaggaagccttcatgaaccaggagattacgaaagcctttcacgtaaggaaagccaatcggataaaagagtgtctcagcaagggaacgttctcggacgtgacatttaaattggacgatggagccatcagtgcccacaagccgctgctgatctgtagctgtgagtggatggcagccatgttcggggggtcatttgtggaaagtgccaacagtgaggtgtatctcccgaacataaacaagatatcaatgcaagcagtattggattatctctataccaagcagttgtctcctaacttggatctggacccgctggaattaattgccttggcaaacagattttgcctgccacacttggttgcacttgcagaacagcatgccgttcaggagttgaccaaagccgccacgagtggcgtgggcattgacggagaagtgctctcttacttggaattggctcagtttcacaatgcccaccagttggccgcctggtgtttgcaccacatctgcaccaactacaacagtgtatgctccaagttccgtaaggaaatcaaatcaaaatctgcagacaaccaggaatacttcgagcggcaccgctggccccctgtgtggtacctgaaggaagaagatcactaccagcgtgtgaaaagggaacgagagaaggaagatattgcactaaataagcatcgctcaagacgaaagtggtgcttctggaattcatctccagcagtggcctgaagaggaagagaaaaaaaacaaaaaacagaaaccaatcggtaatctgatccaccacttttcaaagcactactataaaattcgtcttgttagagatacgacatagttcaggtttcgggcactgatcttcctccacttttgtgcatttatctttgttaggatcaaagcacaagctcaccatcaatgagcctggacaaaaagggaagctgactctcactgcattccttaaactgatatgtatattttttttgttaggaggcttaataaactttagtctgttattttgtttctttttatacaaagaaaaaaaattcagctttcatgtttctgattccagattggaaaatatttttatatggtctgttgtattttgttgaaatgaaaatactgtgtattactttattttacaggccacaattgattatgaagtcaccctgtgattctctttgcccacatgaccaccgagcattattacgtaattagagggttatccttttgttgtgaaaggaaggaggggactgaaatctcccaaagtgcaaattggagagtgtttaatctttgttctgttgaataacatcggtgtaattacaaagtcaactccaagaatgtgtatttacaatatttgccatgttaagtgctggtaattatatggttatatgtgccatgtaaaatatagtgatatcaaatattctgttgtttccaatgtctagtttcaagaggacaatctttataatcattagaagggcttattaaatcccagcattatccagggcaaactcactggtggacctgaatacataagataccattagtgcgctggtgttcggattgctgtattagggtttacatctctcagtattccttgaacttgccatgcttctgcatgcagattcttcactgacttgaattgagatgggcaagggaaaaggtccctggactccctcctgccatctacaggcttgtcacatctcaccaccagaaacaggcttcctcaggcttctcacctgtggccaacttcactttgtaagacccatatttttaactcttcccagggaaaattcatgttgctgcagaagtaggctaaggcagaccacccacttctgctgaaatgcattgggagcctgtgaaagcacaaagctggaggctgggcgcctgcgttctcctacacggaaaggaatctaattccaagagtctaggaaatggtgctattgtgagttcgttctgactctttctcattctgagttttcagtgttaaactaggaagtgtgacagcaggggagctttcgtgaggcagtcagtcattgcttctctgtaaattaaaatgttacagcacacacatacacacacagagagcatttcaaggccacagctccacacctgccatgggatgttaatgtggcagggggtggggctcattctgttgggaggtcaaattaccaatgccaaggactgttgattttgtttttatttttattttttcttctagcttttcagaagatggaaatgagacagttgagtccaaaccccaatgctgacagccatatgcatttgaaaatctatctagattacagatgggcatttattactggcagtggaaacaccagatagaagatcttaggagaggcccagaaatgcatcaccttgtcatgacaaaagagaaggcagtagagtagggatagttacaaatgcatccatcttaattattttcaataggcttgtaaatcttatcgatggaaggagaaaggagacaagatgtggaagaattgacatgtatcccaccataaaatggtagaagatgagttttcaatgagtagtcatagttgaaattttacaaccaaagctcccatttgattgtaatcttgccaaaatataatggatgtataaatgaacttggggtataagcaataatatccactagtgttgttatcagctactgtaaccaagtggctggttcatttggttgatgctgattatggcctttaaccatggtggtttgttgtgtgttttttatttcacaaaaagccaataaaattgtttagctataaaa

SEQ ID NO: 336486 - DNA, 4339 bp, Artificial Sequence
  derived and/or modified sequence
ggcgggacccagagccgccgcgggagcttccagcgtccccaggttttataataatcaagaagcacatgaaagaggcctcttcatcaagcattcttgactaagttatgaaaatggaattgaagtttattttcccccttcatatggtaagtccagctgtgagcagagtgttctgttcttcacttccagcaagccagagtttcataaatggacgctgacatggactacgaaagacccaacgttgaaactatcaaatgtgtggtcgtgggtgacaatgccgtggggaagacgcgcttgatctgtgccagggcgtgcaacaccacactcacgcagtatcagctgctggccacccacgtgccaacagtgtgggcgattgaccagtaccgcgtgtgccaggaggtcttggagcgttctcgggatgttgttgatgaagtgagtgtttctctcaggctttgggatacttttggtgatcatcacaaagacagacgctttgcatatggcaggtctgatgttgtggtcctctgtttttcgattgctaatcccaattccctaaatcatgtgaaaagcatgtggtatccagaaatcaagcacttttgccctcgaacacccgttatccttgttgggtgccagcttgatctccgctatgccgacctggaagctgttaatcgagccaggcgcccgttagcaaggcccataaagagaggggatattttgcccccagaaaaaggccgagaggtagcaaaggaacttggcttaccatactatgaaacaagcgtgtttgaccagtttggtatcaaggatgtgtttgacaatgcaatccgagcagcgctgatttcccgcaggcacctgcaattctggaaatcccacctaaagaaagtccagaaacctttacttcaggcacccttcctacctccaaaagcccctccaccggtcatcaaaattccagagtgtccttccatggggacaaatgaagctgcctgtttactggacaatcctctatgtgccgatgttctgttcatccttcaggaccaggaacacatctttgcacatcgaatttacctcgctacctcttcttccaaattttatgatctgtttttaatggaatgtgaagaatccccaaatgggagtgaaggagcctgtgagaaagagaagcagagcagagatttccaggggcggatattgagtgtcgacccagaggaagaaagggaggagggcccgcctaggattcctcaggccgaccagtggaagtcttcaaacaagagcctggtggaggctctggggctggaagccgagggtgcagttcctgagacacagactttgaccggatggagtaaggggttcattggcatgcacagggaaatgcaagtcaaccccatttcaaagcggatggggcccatgactgtggtcaggatggacgcttcagtccagccaggcccttttcggaccctgctccagtttctttatacgggacaactggatgaaaaggaaaaggatttggtgggcctggctcagatcgcagaggtcctcgagatgttcgatttgaggatgatggtggaaaacatcatgaacaaggaagccttcatgaaccaggagattacgaaagcctttcacgtaaggaaagccaatcggataaaagagtgtctcagcaagggaacgttctcggacgtgacatttaaattggacgatggagccatcagtgcccacaagccgctgctgatctgtagctgtgagtggatggcagccatgttcggggggtcatttgtggaaagtgccaacagtgaggtgtatctcccgaacataaacaagatatcaatgcaagcagtattggattatctctataccaagcagttgtctcctaacttggatctggacccgctggaattaattgccttggcaaacagattttgcctgccacacttggttgcacttgcagaacagcatgccgttcaggagttgaccaaagccgccacgagtggcgtgggcattgacggagaagtgctctcttacttggaattggctcagtttcacaatgcccaccagttggccgcctggtgtttgcaccacatctgcaccaactacaacagtgtatgctccaagttccgtaaggaaatcaaatcaaaatctgcagacaaccaggaatacttcgagcggcaccgctggccccctgtgtggtacctgaaggaagaagatcactaccagcgtgtgaaaagggaacgagagaaggaagatattgcactaaataagcatcgctcaagacgaaagtggtgcttctggaattcatctccagcagtggcctgaagaggaagagaaaaaaaacaaaaaacagaaaccaatcggtaatctgatccaccacttttcaaagcactactataaaattcgtcttgttagagatacgacatagttcaggtttcgggcactgatcttcctccacttttgtgcatttatctttgttaggatcaaagcacaagctcaccatcaatgagcctggacaaaaagggaagctgactctcactgcattccttaaactgatatgtatattttttttgttaggaggcttaataaactttagtctgttattttgtttctttttatacaaagaaaaaaaattcagctttcatgtttctgattccagattggaaaatatttttatatggtctgttgtattttgttgaaatgaaaatactgtgtattactttattttacaggccacaattgattatgaagtcaccctgtgattctctttgcccacatgaccaccgagcattattacgtaattagagggttatccttttgttgtgaaaggaaggaggggactgaaatctcccaaagtgcaaattggagagtgtttaatctttgttctgttgaataacatcggtgtaattacaaagtcaactccaagaatgtgtatttacaatatttgccatgttaagtgctggtaattatatggttatatgtgccatgtaaaatatagtgatatcaaatattctgttgtttccaatgtctagtttcaagaggacaatctttataatcattagaagggcttattaaatcccagcattatccagggcaaactcactggtggacctgaatacataagataccattagtgcgctggtgttcggattgctgtattagggtttacatctctcagtattccttgaacttgccatgcttctgcatgcagattcttcactgacttgaattgagatgggcaagggaaaaggtccctggactccctcctgccatctacaggcttgtcacatctcaccaccagaaacaggcttcctcaggcttctcacctgtggccaacttcactttgtaagacccatatttttaactcttcccagggaaaattcatgttgctgcagaagtaggctaaggcagaccacccacttctgctgaaatgcattgggagcctgtgaaagcacaaagctggaggctgggcgcctgcgttctcctacacggaaaggaatctaattccaagagtctaggaaatggtgctattgtgagttcgttctgactctttctcattctgagttttcagtgttaaactaggaagtgtgacagcaggggagctttcgtgaggcagtcagtcattgcttctctgtaaattaaaatgttacagcacacacatacacacacagagagcatttcaaggccacagctccacacctgccatgggatgttaatgtggcagggggtggggctcattctgttgggaggtcaaattaccaatgccaaggactgttgattttgtttttatttttattttttcttctagcttttcagaagatggaaatgagacagttgagtccaaaccccaatgctgacagccatatgcatttgaaaatctatctagattacagatgggcatttattactggcagtggaaacaccagatagaagatcttaggagaggcccagaaatgcatcaccttgtcatgacaaaagagaaggcagtagagtagggatagttacaaatgcatccatcttaattattttcaataggcttgtaaatcttatcgatggaaggagaaaggagacaagatgtggaagaattgacatgtatcccaccataaaatggtagaagatgagttttcaatgagtagtcatagttgaaattttacaaccaaagctcccatttgattgtaatcttgccaaaatataatggatgtataaatgaacttggggtataagcaataatatccactagtgttgttatcagctactgtaaccaagtggctggttcatttggttgatgctgattatggcctttaaccatggtggtttgttgtgtgttttttatttcacaaaaagccaataaaattgtttagctataaaa

SEQ ID NO: 336487 - DNA, 2091 bp, Artificial Sequence
  derived and/or modified sequence
atggacgccgacatggactacgagagacccaacgtggagaccatcaagtgcgtggtggtgggcgacaacgccgtgggcaagaccagactgatctgcgccagagcctgcaacaccaccctgacccagtaccagctgctggccacccacgtgcccaccgtgtgggccatcgaccagtacagagtgtgccaggaggtgctggagagaagcagagacgtggtggacgaggtgagcgtgagcctgagactgtgggacaccttcggcgaccaccacaaggacagaagattcgcctacggcagaagcgacgtggtggtgctgtgcttcagcatcgccaaccccaacagcctgaaccacgtgaagagcatgtggtaccccgagatcaagcacttctgccccagaacccccgtgatcctggtgggctgccagctggacctgagatacgccgacctggaggccgtgaacagagccagaagacccctggccagacccatcaagagaggcgacatcctgccccccgagaagggcagagaggtggccaaggagctgggcctgccctactacgagaccagcgtgttcgaccagttcggcatcaaggacgtgttcgacaacgccatcagagccgccctgatcagcagaagacacctgcagttctggaagagccacctgaagaaggtgcagaagcccctgctgcaggcccccttcctgccccccaaggcccccccccccgtgatcaagatccccgagtgccccagcatgggcaccaacgaggccgcctgcctgctggacaaccccctgtgcgccgacgtgctgttcatcctgcaggaccaggagcacatcttcgcccacagaatctacctggccaccagcagcagcaagttctacgacctgttcctgatggagtgcgaggagagccccaacggcagcgagggcgcctgcgagaaggagaagcagagcagagacttccagggcagaatcctgagcgtggaccccgaggaggagagagaggagggcccccccagaatcccccaggccgaccagtggaagagcagcaacaagagcctggtggaggccctgggcctggaggccgagggcgccgtgcccgagacccagaccctgaccggctggagcaagggcttcatcggcatgcacagagagatgcaggtgaaccccatcagcaagagaatgggccccatgaccgtggtgagaatggacgccagcgtgcagcccggccccttcagaaccctgctgcagttcctgtacaccggccagctggacgagaaggagaaggacctggtgggcctggcccagatcgccgaggtgctggagatgttcgacctgagaatgatggtggagaacatcatgaacaaggaggccttcatgaaccaggagatcaccaaggccttccacgtgagaaaggccaacagaatcaaggagtgcctgagcaagggcaccttcagcgacgtgaccttcaagctggacgacggcgccatcagcgcccacaagcccctgctgatctgcagctgcgagtggatggccgccatgttcggcggcagcttcgtggagagcgccaacagcgaggtgtacctgcccaacatcaacaagatcagcatgcaggccgtgctggactacctgtacaccaagcagctgagccccaacctggacctggaccccctggagctgatcgccctggccaacagattctgcctgccccacctggtggccctggccgagcagcacgccgtgcaggagctgaccaaggccgccaccagcggcgtgggcatcgacggcgaggtgctgagctacctggagctggcccagttccacaacgcccaccagctggccgcctggtgcctgcaccacatctgcaccaactacaacagcgtgtgcagcaagttcagaaaggagatcaagagcaagagcgccgacaaccaggagtacttcgagagacacagatggccccccgtgtggtacctgaaggaggaggaccactaccagagagtgaagagagagagagagaaggaggacatcgccctgaacaagcacagaagcagaagaaagtggtgcttctggaacagcagccccgccgtggcctag

SEQ ID NO: 336488 - protein, 99 aa, Artificial Sequence
  derived and/or modified sequence
MDADMDYERPNVETIKCVVVGDNAVGKTRLICARACNTTLTQYQLLATHVPTVWAIDQYRVCQEVLERSRDVVDEVSVSLRLWDTFGDHHKDRRFAYGR

SEQ ID NO: 336489 - DNA, 300 bp, Artificial Sequence
  derived and/or modified sequence
atggatgctgacatggattacgagcggcctaacgttgagacgatcaagtgcgtggttgttggcgacaatgcagtgggcaagacgaggctgatctgcgcgcgggcctgcaatacgaccctaacccagtaccagctgctggccacccatgtgccaaccgtctgggcaatagatcagtaccgcgtctgccaagaagttttagagcgcagccgggacgtcgtggacgaggtatctgtaagcctgagactctgggatacattcggagaccaccataaagatcgtcgctttgcttacggccgctag

SEQ ID NO: 336490 - DNA, 300 bp, Artificial Sequence
  derived and/or modified sequence
atggatgctgacatggactatgagcggcccaacgtggagaccatcaagtgtgtggtggtgggggacaatgctgtgggcaagaccaggctcatctgtgcccgggcctgcaacaccaccctgacccagtaccagctgctggccacccacgtgcccaccgtgtgggccatcgaccagtacagagtgtgccaggaggtgctggagaggagcagagatgtggtggatgaggtgtctgtgtccctgcggctgtgggacaccttcggggaccaccacaaggacagaagatttgcctatggaagatag

SEQ ID NO: 336491 - DNA, 300 bp, Artificial Sequence
  derived and/or modified sequence
atggacgccgacatggactacgagcggcccaacgtggagaccatcaagtgcgttgtggtcggcgataacgcagtaggaaagactcgccttatatgtgcgcgggcttgcaatacaacgctgactcagtaccagctgctggctacccatgtgcctacagtgtgggccatagaccaataccgggtttgtcaggaagtccttgagcgctctcgggacgtggtagacgaggtcagtgtcagcctgcggctttgggacacctttggggaccatcacaaggaccgcagatttgcttatgggcgatag

SEQ ID NO: 336492 - DNA, 300 bp, Artificial Sequence
  derived and/or modified sequence
atggacgccgatatggattacgagcggccaaacgtcgaaacaatcaagtgcgttgtcgtgggcgacaatgccgttggaaaaacgcgcctgatctgtgcccgtgcatgtaatactactttgactcagtaccaattgctggcgacccatgtgcccaccgtgtgggcaattgatcagtatagggtgtgccaggaggttctggagaggtcacgagatgtggtagatgaggtgtctgtgtccctgagactctgggacacctttggcgatcaccacaaagaccgccgattcgcctacgggaggtag

SEQ ID NO: 336493 - DNA, 2110 bp, Artificial Sequence
  derived and/or modified sequence
ggcgggacccagagccgccgcgggagcttccagcgtccccaggttttataataatcaagaagcacatgaaagaggcctcttcatcaagcattcttgactaagttatgaaaatggaattgaagtttattttcccccttcatatggtaagtccagctgtgagcagagtgttctgttcttcacttccagcaagccagacgtctttgattgctctggaaagccttggtgtccttactgtggtgttcactctcttcttacagagtttcataaatggacgctgacatggactacgaaagacccaacgttgaaactatcaaatgtgtggtcgtgggtgacaatgccgtggggaagacgcgcttgatctgtgccagggcgtgcaacaccacactcacgcagtatcagctgctggccacccacgtgccaacagtgtgggcgattgaccagtaccgcgtgtgccaggaggtcttggagcgttctcgggatgttgttgatgaagtgagtgtttctctcaggctttgggatacttttggtgatcatcacaaagacagacgctttgcatatggcaggtaaaccaagactagtacagcgtggttgagcttgaatgcaatttccttttcaaaaccagcagcgggtttacaaatcaacaaaaaccacatcatatggccttgaaatgtgctgggttctgcactgtgtctaagaaaaggaaaagaaaaaaaaatggtattgtttcctgatgtcaagaaaagaagcgtgccctgccaatgaggaagtactgtgttgaaaacaaccagtggtcaagctggaaggtttgctagattaggattctgtaacaccctccaactgcgggctgctttgattgctggttctctgagtaacacttcacttgccttctgttagaatgttttaagttattttggcacttggtcaccctacttcagaaagactgtttggtcttttcatgaccatattggcagagtctaatgttatttgctttggattttgtgttatctgaaaagtctattatttttattagaaggtcatttttaaaaagaaagaaaaatatctccaaagtccttcgcaagacatatttccaaaatgaacagaaacactaacgtttatttttttaaaaaggagaaaaaaatctagtaatgggaaaactcctctagaaggacattaatatgggtaggaacatggtcaaagtgccttaaaatatttagcaacctctccttgccaccataacttaacgtctctctcaatgaatgggttatagctgttaaattctgtattaatggagactttttttttaccacttaattataaatgaacacatttcattttcagtgtagaacgtagatatcatggccttgttgtctcttcttaacatcaaacatcatatcaccttacaggattttattagttaggtactccaagcacgtgaattactccttggtattgagataagcatttctgaagattcttctatttctacaagccagtagctctttgaacggacttttattgtcatttatctaagtggcctaaaataatgaataaactgctgaaagagtttgccctattcccaggaattatttcacacactgaaagaatctgtgacttagaccactttctttcaaggggactcagagagttatggaagcaaaacacgattttaatgtccccttggtaacaaggacttttgaacttagtatcctacatcatagatagttttcttttccttgaatttcctggattttttttctttctataatgttgttgattgttatcttaggtgccattttgcttttttcttttgtccaattgttctacatgtaaaaataacaattataaatgaacctgcttgtaactgctgggcagtcaggtttgtaacacctatggttttgaggaagcttgatttgatgactttaggcagtgtaaggataaatacagtagatttcaaaggacttttttatatccccacttctaaaacagtgtcatgaaaatgatgagcctgatgatgagttaatggaaatatttgggtttagaatctagagactatttcaacagctcagtggtttgttgccactagaaatttatgcatttgtcaatacctgtg

SEQ ID NO: 336494 - DNA, 300 bp, Artificial Sequence
  derived and/or modified sequence
atggacgccgacatggactacgagagacccaacgtggagaccatcaagtgcgtggtggtgggcgacaacgccgtgggcaagaccagactgatctgcgccagagcctgcaacaccaccctgacccagtaccagctgctggccacccacgtgcccaccgtgtgggccatcgaccagtacagagtgtgccaggaggtgctggagagaagcagagacgtggtggacgaggtgagcgtgagcctgagactgtgggacaccttcggcgaccaccacaaggacagaagattcgcctacggcagatag

SEQ ID NO: 336495 - protein, 1581 aa, Artificial Sequence
  derived and/or modified sequence
MPENPATDKLQVLQVLDRLKMKLQEKGDTSQNEKLSMFYETLKSPLFNQILTLQQSIKQLKGQLNHIPSDCSANFDFSRKGLLVFTDGSITNGNVHRPSNNSTVSGLFPWTPKLGNEDFNSVIQQMAQGRQIEYIDIERPSTGGLGFSVVALRSQNLGKVDIFVKDVQPGSVADRDQRLKENDQILAINHTPLDQNISHQQAIALLQQTTGSLRLIVAREPVHTKSSTSSSLNDTTLPETVCWGHVEEVELINDGSGLGFGIVGGKTSGVVVRTIVPGGLADRDGRLQTGDHILKIGGTNVQGMTSEQVAQVLRNCGNSVRMLVARDPAGDISVTPPAPAALPVALPTVASKGPGSDSSLFETYNVELVRKDGQSLGIRIVGYVGTSHTGEASGIYVKSIIPGSAAYHNGHIQVNDKIVAVDGVNIQGFANHDVVEVLRNAGQVVHLTLVRRKTSSSTSPLEPPSDRGTVVEPLKPPALFLTGAVETETNVDGEDEEIKERIDTLKNDNIQALEKLEKVPDSPENELKSRWENLLGPDYEVMVATLDTQIADDAELQKYSKLLPIHTLRLGVEVDSFDGHHYISSIVSGGPVDTLGLLQPEDELLEVNGMQLYGKSRREAVSFLKEVPPPFTLVCCRRLFDDEASVDEPRRTETSLPETEVDHNMDVNTEEDDDGELALWSPEVKIVELVKDCKGLGFSILDYQDPLDPTRSVIVIRSLVADGVAERSGGLLPGDRLVSVNEYCLDNTSLAEAVEILKAVPPGLVHLGICKPLVEDNEEESCYILHSSSNEDKTEFSGTIHDINSSLILEAPKGFRDEPYFKEELVDEPFLDLGKSFHSQQKEIEQSKEAWEMHEFLTPRLQEMDEEREILVDEEYELYQDPSPSMELYPLSHIQEATPVPSVNELHFGTQWLHDNEPSESQEARTGRTVYSQEAQPYGYCPENVMKENFVMESLPSVPSTEGNSQQGRFDDLENLNSLAKTSLDLGMIPNDVQGPSLLIDLPVVAQRREQEDLPLYQHQATRVISKASAYTGMLSSRYATDTCELPEREEGEGEETPNFSHWGPPRIVEIFREPNVSLGISIVGGQTVIKRLKNGEELKGIFIKQVLEDSPAGKTNALKTGDKILEVSGVDLQNASHSEAVEAIKNAGNPVVFIVQSLSSTPRVIPNVHNKANKITGNQNQDTQEKKEKRQGTAPPPMKLPPPYKALTDDSDENEEEDAFTDQKIRQRYADLPGELHIIELEKDKNGLGLSLAGNKDRSRMSIFVVGINPEGPAAADGRMRIGDELLEINNQILYGRSHQNASAIIKTAPSKVKLVFIRNEDAVNQMAVTPFPVPSSSPSSIEDQSGTEPISSEEDGSVEVGIKQLPESESFKLAVSQMKQQKYPTKVSFSSQEIPLAPASSYHSTDADFTGYGGFQAPLSVDPATCPIVPGQEMIIEISKGRSGLGLSIVGGKDTPLFWRLGSPRAWSQHLVRAFMLHHPVTEVEGQNAIVIHEVYEEGAAARDGRLWAGDQILEVNGVDLRNSSHEEAITALRQTPQKVRLVVYRDEAHYRDEENLEIFPVDLQKKAGRGLGLSIVGK

SEQ ID NO: 336496 - protein, 452 aa, Artificial Sequence
  derived and/or modified sequence
MVQGGFPEKIRQRYADLPGELHIIELEKDKNGLGLSLAGNKDRSRMSIFVVGINPEGPAAADGRMRIGDELLEINNQILYGRSHQNASAIIKTAPSKVKLVFIRNEDAVNQMAVTPFPVPSSSPSSIEDQSGTEPISSEEDGSVEVGIKQLPESESFKLAVSQMKQQKYPTKVSFSSQEIPLAPASSYHSTDADFTGYGGFQAPLSVDPATCPIVPGQEMIIEISKGRSGLGLSIVGGKDTPLFWRLGSPRAWSQHLVRAFMLHHPVTEVEGQNAIVIHEVYEEGAAARDGRLWAGDQILEVNGVDLRNSSHEEAITALRQTPQKVRLVVYRDEAHYRDEENLEIFPVDLQKKAGRGLGLSIVGKRNGSGVFISDIVKGGAADLDGRLIQGDQILSVNGEDMRNASQETVATILKCAQGLVQLEIGRLRAGSWTSARTTSQNSQVVDGFSSD

SEQ ID NO: 336497 - DNA, 4746 bp, Artificial Sequence
  derived and/or modified sequence
atgcccgaaaacccagccaccgacaaactgcaggtgctccaggtgctggaccgtttaaagatgaagctgcaagaaaaaggtgacacgtcccagaatgagaaactaagcatgttctatgaaaccttgaagtcccccttgttcaaccagattctgactctacagcagagcataaagcaactgaagggacagctaaaccatatcccttctgattgcagcgcgaatttcgacttctcaaggaaggggctgcttgtgttcactgatgggtccattacgaatggaaatgtgcaccgcccttcaaacaactctacagtgtctggtttgtttccgtggacaccaaaattggggaacgaggactttaacagtgtgatccaacaaatggcgcaagggcgccagatcgagtacattgatattgaaagaccttccactggaggactgggcttttccgtcgtggccctccgtagccagaatctggggaaggtggacatcttcgtcaaagatgtgcagcccggaagcgtggcagaccgggatcaacggctcaaagaaaatgatcagatcctggccatcaatcacacacctttagatcagaatatctctcatcaacaggctatagcactcttgcagcagaccaccggcagtctgcgactcattgttgctagggaacctgttcacacaaaatcatcaaccagcagttcccttaatgacactactttgcctgagacggtgtgttggggacacgtggaggaagtcgagctgattaacgatggcagtgggctaggcttcggcatcgtggggggtaaaacctctggcgtggtcgtacgaacaatcgtgccaggtgggctcgccgacagggacgggcggctccaaaccggcgatcacattctgaaaatcggcgggaccaatgtccagggcatgactagtgagcaggttgcccaggtgctgcgcaattgtggtaattctgtgagaatgctggtagcgcgcgacccagccggcgacatttctgtgactccccctgcccctgctgctctcccggtagccctgccaaccgtggcaagcaagggacccggtagtgacagcagtctatttgaaacctacaatgttgaactcgtccgaaaagatggccagagtctaggaataaggatcgtgggatacgtagggacaagtcatactggggaagctagcggcatctatgtaaaaagcatcattccgggaagcgccgcataccataatggacacatccaggttaacgataaaatcgtggcagtggatggagtcaatatccagggttttgcgaaccacgatgtcgtcgaggtactgcggaacgccggccaggtcgtgcatctcacactggtcaggcggaaaacttcaagctccacttcccccctggaacccccttcagaccgtggaaccgtggttgagcccctcaagcccccagcactctttttgactggagcagtcgagacggaaactaatgtggacggagaagacgaagagattaaagagcggatcgataccctcaagaacgataatatacaggcactggagaagcttgagaaggtaccggacagtccggagaatgagctgaaaagccgctgggagaacctgttaggacccgactacgaggtgatggttgccacacttgacactcaaattgctgacgacgcggaattacaaaaatattccaagcttctccccattcacacgcttcggctcggggtggaggttgattcctttgacggccatcactatatatcatccattgtgtcaggcgggcctgtagacactctaggcctgcttcagccggaggacgaactattggaagtgaacgggatgcagctctatggaaaaagcagaagggaagctgtctcatttctcaaagaagtaccccctcctttcacactagtatgctgtcgcaggctgtttgatgacgaggccagcgtcgacgaaccccgtcgcactgagacttcgttgccagagacagaggtagatcataacatggatgtgaacaccgaagaggacgatgacggagagctcgctttgtggtcaccagaagtgaaaatcgtggagctggttaaggattgcaaaggcttgggcttttcaatcctggattaccaggacccgctcgacccgacccgcagcgtcatcgtcatcaggagtcttgtcgccgacggcgtggcagagcgatccggcggcctcctgccaggagacaggttggtcagtgtcaatgaatactgtttagacaacacgtctctggccgaagctgtggaaatcctcaaggccgtgccacccggattggtacacctaggaatatgcaaacctctcgtggaagacaacgaagaagaaagctgctatatcctgcatagttctagcaatgaagacaagacagagttttctggtactatccatgacattaattcttcactgatcttagaagccccgaaaggtttccgcgacgagccctactttaaagaagaactggtggacgaaccattcctcgatttgggcaagtcatttcactcgcagcaaaaggagattgaacagagcaaagaggcatgggagatgcacgaatttctaacgcctagattacaggaaatggacgaagaaagagagatcttagttgatgaggagtatgagttgtatcaggacccctccccgagtatggagctatatcccctgtcccatatacaggaagccactccagtgccgagtgttaatgagcttcattttggaacccagtggctgcatgacaacgaacctagcgaaagtcaagaggccaggacagggcgcacagtgtatagccaggaagcgcagccttacgggtactgcccagagaacgttatgaaggagaattttgtcatggagtccctgccctccgtgcctagtacggaggggaactcccagcagggccgctttgacgatctggaaaacctcaattctctggcaaagacaagcctggatttgggaatgataccaaacgatgtacaaggcccttctctcctgattgacttgcccgtcgtcgcgcagaggagggaacaggaggacctacccttataccagcaccaggctacaagagtgatttctaaagcttccgcctatactggtatgctaagcagccggtacgcaacagacacgtgcgagctcccggaaagggaggagggggaaggggaggagaccccaaatttctcacactgggggccaccgcgaatagtggagattttccgcgaacctaacgtgtctctgggtatctccatcgtcggtgggcagacagtaataaaaaggctgaaaaacggggaagaactgaagggcattttcatcaagcaagtattagaggactcccccgccgggaaaaccaacgcattgaagactggcgacaaaatcttggaagtctccggcgtggacctgcaaaacgcgagccacagcgaggctgtcgaggcaattaagaatgctgggaatcccgttgtgtttatcgttcagtcactctcctcgaccccaagggtcatacccaatgtgcataataaggcaaacaagattaccggtaaccagaatcaagatacacaggaaaagaaggagaagcgccagggcacagcacctccccccatgaaactcccccctccttataaggccctcactgacgattctgacgagaacgaggaagaagacgctttcacagatcaaaagatacgacagaggtacgccgatctgcccggagagctccacatcatcgagctcgaaaaggacaagaatggacttggactgagccttgccgggaacaaggacaggagtcgcatgagcatctttgtggttggcattaaccccgagggccccgcagcagccgatggccggatgcggattggggacgaactgctggagatcaataatcagatcctctatggtcggtcacatcagaacgcctccgcaatcattaagactgcccctagtaaagtaaagctagttttcattagaaatgaagacgctgttaaccagatggccgtgacccccttcccagtgccttcttccagcccaagctcgatcgaagaccagtcaggcaccgaaccaatttcatcggaagaggatgggagcgtggaggttggcattaagcagctgccggagagtgagtcatttaagctagccgtaagtcaaatgaagcagcagaaataccccactaaggtttccttcagttcacaggagattccacttgcccctgcctctagttaccacagcacagacgcagactttaccggctacggtggctttcaggctcccctgagcgttgacccggcaacctgtcccattgtaccaggccaagagatgatcatcgaaatttctaaaggccgctcaggcctcgggctgtcgatcgtgggcgggaaagacactccccttttctggcgccttggaagtcccagagcctggtctcagcatctggtgagagcctttatgctccatcatccagtgacagaggtcgaaggtcagaatgccatcgtgatccatgaggtttacgaggagggagcagcagctcgggacggccgactatgggccggggatcaaatcctcgaagtgaacggggtggatctgagaaactcaagccacgaagaggccatcacagccttgcgtcagacacctcagaaggtcaggctggtggtgtatcgtgatgaggcccactatcgggatgaggaaaatctggaaatttttccagtggatctccagaagaaggccggacgaggtttaggcttgagtattgtgggcaagtag

SEQ ID NO: 336498 - DNA, 1359 bp, Artificial Sequence
  derived and/or modified sequence
atggtgcagggtgggttcccggagaagatccggcaacggtacgctgatctgccgggcgagctgcatatcatcgaactggagaaggataagaatggattgggattgagtctcgccggtaataaagaccgttcacgaatgagtattttcgtggtggggattaaccctgaggggcctgctgccgctgatggacgcatgaggattggtgacgagttgcttgagattaataatcagatcctgtacgggcggagtcatcagaatgcatcagccattattaaaacggcgccttctaaagttaagttggtatttatccgtaacgaagacgctgtcaaccaaatggctgtgaccccttttccagtccccagcagctccccttctagcattgaagaccagtccgggactgagcctatctcctccgaggaggacggcagtgtggaggtgggtattaaacagctcccggagagcgaatccttcaagttagcggtaagccagatgaaacagcagaagtaccccactaaggtgtccttctcaagccaggaaatccccctcgctcctgccagctcttatcacagcactgacgccgactttactggctacggtggatttcaagccccactaagtgttgacccagctacttgtcccatcgtgcccggtcaggaaatgattatcgagatttccaaaggacgtagcggtctaggcttatctattgtaggaggcaaagacacgcctttattctggcggctcggcagccccagagcttggtctcagcatctcgttcgggcctttatgctgcaccaccctgtgaccgaggttgaagggcagaatgccatcgtgattcacgaggtttacgaagagggagcggctgccagggatggacgactctgggcaggggatcagatcctcgaggtgaacggcgtggatctgcggaactcgagccatgaggaggccatcacggccctccgtcagaccccgcagaaagtgagactggtggtgtaccgggacgaggcgcactatagggacgaggaaaacctcgaaatatttcctgtggatttacaaaaaaaggcagggcgtgggcttggactctcaatcgtgggcaagagaaatggaagcggtgtgtttatctctgacattgtgaaaggcggcgcagccgatctggacgggcgactgatccaaggcgaccaaatcttatccgtgaacggagaggatatgcggaatgccagccaagaaaccgtggctaccatcttgaagtgcgcccaaggtctcgtgcagcttgaaattgggcgcctccgcgcaggttcttggacctctgcgcggactaccagtcagaattcacaggtggtcgatggatttagtagcgattag

SEQ ID NO: 336499 - DNA, 1526 bp, Artificial Sequence
  derived and/or modified sequence
agtctgtggtgaggatttgagctgcgtccagcattggatatttgtcaggaatgcagataccctgaagggaacacaacaatggtccaagggggtttcccagaaaaaatcagacaaagatatgcagatctgcctggagaactgcacattattgaacttgaaaaagataagaatggacttggactcagccttgctggtaataaagaccgatcacgcatgagcatatttgtggtgggaattaacccggaaggacctgctgccgcagatggacgaatgcgtattggagatgaactcttagagataaacaatcagattctgtatggaagaagtcaccaaaatgcatctgccattattaagactgccccatcaaaggtcaagctggttttcatcagaaacgaggatgcagtcaatcagatggccgttactccctttccagtgccatcaagttctccatcttctattgaggatcagagcggcaccgaacctattagtagtgaggaagatggcagcgtcgaagttggtattaaacaattgcctgaaagtgaaagcttcaaactggctgtcagccagatgaaacagcaaaaatatccaacaaaagtctccttcagttcacaagagataccattagcaccagcttcatcataccattcaacagatgcagacttcacaggctatggtggtttccaggctcctctgtcagtggaccccgcaacgtgtcccattgtccctggacaggaaatgattatagaaatatccaagggacgttcagggcttggtctcagcattgtgggaggaaaagacacacccttgttctggaggctgggaagtccaagagcatggagccagcatctggtgagggccttcatgctgcatcatcctgtgacagaagttgaagggcaaaatgctatagttatccatgaagtctatgaagaaggggcagcagccagagatggaagactttgggctggtgaccagatattagaggttaatggggttgacctgaggaactccagccacgaagaagccatcacagccctgaggcagaccccccagaaggtgcggctggtggtgtatagagatgaggcacactaccgggatgaggagaacttggagattttccctgtggatctgcagaagaaagctggccggggcctgggcctgagcatcgttgggaaacgaaatggaagcggagtgtttatttctgacatcgtgaaaggcggagccgcagacctggatgggagattgattcagggagatcagatcttatctgtgaatggggaggacatgagaaatgcctcacaggagacagtggccaccatcctcaagtgtgcacagggacttgtgcagctagagattggaagactccgagctggttcctggacctccgcaaggacgacatcacagaacagtcaggttgtcgatggcttctcatcagactgactcactcttctgcccccactgggagaaagttccccatttaataaatggttgtttggaaataatatctaatgtacagcatattcacagca

SEQ ID NO: 336500 - DNA, 4746 bp, Artificial Sequence
  derived and/or modified sequence
atgccagaaaatcctgccacagacaagctgcaggtgctgcaggtgctggaccggctgaagatgaagctgcaggagaagggggacaccagccagaatgagaagctgtccatgttttatgagaccctgaagagccccctcttcaaccagatcctgaccctgcagcagagcatcaagcagctgaagggccagctgaaccacatccccagcgactgcagcgccaactttgacttcagcaggaagggcctgctggtgttcacagatggcagcatcaccaatggaaatgtgcaccggcccagcaacaacagcacagtgtctggcctcttcccctggacccccaagctgggcaatgaagacttcaacagcgtcatccagcagatggcccagggccggcagatcgagtacattgatattgagcggcccagcactggaggcctgggcttctctgtggtggccctgcggagccagaacctgggcaaggtggacatctttgtgaaggatgtgcagcccggctctgtggccgaccgggaccagaggctgaaggaaaatgaccagatcctggccatcaaccacacccccctggaccagaacatcagccaccagcaggccatcgccctgctgcagcagaccaccggcagcctgcggctcatcgtggcccgggagcctgtgcacaccaagagcagcaccagcagcagcctgaatgacaccaccctgcctgagaccgtgtgctggggccacgtggaggaggtggagctgatcaatgatggcagcggcctgggcttcggcatcgtgggcggcaagaccagcggcgtggtggtgaggaccatcgtgcctgggggcctggccgacagagatggccgcctgcagacaggagaccacatcctgaagattggaggcaccaacgtgcagggcatgaccagcgagcaggtggcccaggtgctgaggaactgtggcaacagcgtgaggatgctggtggcccgggaccctgctggggacatctctgtgaccccaccagccccagctgccctgcctgtggccctgcccaccgtggccagcaagggccctggcagtgacagcagcctgtttgagacctacaacgtggagctggtgaggaaggatggccagagcctgggcatccgcatcgtgggctacgtgggcaccagccacactggagaggccagcggcatctacgtgaagagcatcatccctggcagcgctgcctaccacaacggccacatccaggtgaatgacaagatcgtggccgtggatggagtgaacatccagggctttgccaaccatgatgtggtggaggtgctgagaaatgccggccaggtggtgcacctgaccctggtgcggaggaagaccagcagcagcaccagccccctggagcccccaagtgaccggggcaccgtggtggagcccctgaagcccccagccctcttcctgaccggggctgtggagacagagaccaacgtggatggagaagatgaggagatcaaggagagaattgacaccctgaagaatgacaacatccaggccctggagaagctggagaaggtgcctgacagcccagaaaatgagctgaagagccgctgggagaacctgctgggccctgactatgaggtgatggtggccaccctggacacccagattgctgatgatgctgagctgcagaagtacagcaagctgctgcccatccacaccctgcggctgggcgtggaggtggacagctttgatggccaccactacatcagcagcatcgtgtctgggggccctgtggacaccctgggcctgctgcagccagaagatgagctgctggaggtgaatggcatgcagctgtatggcaagagcagaagagaggccgtgtccttcctgaaggaggtgcccccacccttcaccctggtgtgctgcagaagactctttgatgatgaggcctctgtggatgagcccaggagaacagagaccagcctgcctgagacagaggtggaccacaacatggatgtgaacacagaagaagatgatgatggagagctggccctgtggagccctgaggtgaagatcgtggagctggtgaaggactgcaagggcctgggcttcagcatcctggactaccaggaccccctggaccccaccaggagcgtcatcgtcatccgcagcctggtggctgatggagtggccgagaggtctgggggcctgctgcccggggaccggctggtgtctgtgaatgagtactgcctggacaacaccagcctggccgaggccgtggagatcctgaaggctgtgcccccaggcctggtgcacctgggcatctgcaagcccctggtggaggacaatgaggaggagagctgctacatcctgcacagcagcagcaatgaagacaagacagagttcagcggcaccatccatgacatcaacagcagcctcatcctggaggcccccaagggcttcagagatgagccctacttcaaggaggagctggtggatgagcccttcctggacctgggcaagagcttccacagccagcagaaggagattgagcagagcaaggaggcctgggagatgcatgagttcctgaccccccggctgcaggagatggatgaggagcgggagatcctggtggatgaggagtatgagctgtaccaggaccccagccccagcatggagctgtaccccctgagccacatccaggaggccacccctgtgcccagcgtgaatgagctgcacttcggcacccagtggctgcatgacaatgagcccagcgagagccaggaggccaggacaggccgcacagtgtacagccaggaggcccagccctacggctactgcccagaaaatgtgatgaaggagaactttgtgatggagagcctgcccagcgtgcccagcacagagggcaacagccagcagggccgctttgatgacctggagaacctgaacagcctggccaagaccagcctggacctgggcatgatccccaatgatgtgcagggccccagcctgctgattgacctgcctgtggtggcccagaggcgggagcaggaggacctgcccctgtaccagcaccaggccaccagggtcatcagcaaggccagcgcctacacaggcatgctgagcagccgctatgccacagacacctgtgagctgcctgagcgggaggagggggagggggaggagacccccaacttcagccactggggccccccacgcatcgtggagatcttccgggagcccaacgtgtccctgggcatcagcatcgtgggcggccagaccgtcatcaagaggctgaagaatggagaggagctgaagggcatcttcatcaagcaggtgctggaggacagccctgctgggaagaccaatgccctgaagacaggagacaagatcctggaggtgtctggagtggacctgcagaatgccagccacagcgaggccgtggaggccatcaagaatgccggcaaccctgtggtgttcatcgtgcagagcctgagcagcacccccagggtcatccccaacgtgcacaacaaggccaacaagatcactggaaaccagaaccaggacacccaggagaagaaggagaagaggcagggcacagcccccccacccatgaagctgcccccaccctacaaggccctgacagatgacagtgatgaaaatgaggaggaggatgccttcacagaccagaagatccggcagagatatgctgacctgcccggggagctgcacatcatcgagctggagaaggacaagaatggcctgggcctgagcctggccggcaacaaggacaggagcaggatgagcatctttgtggtgggcatcaaccctgagggccctgctgctgctgatggccgcatgagaattggagatgagctgctggagatcaacaaccagatcctgtatggccgcagccaccagaatgccagcgccatcatcaagacagcccccagcaaggtgaagctggtgttcatcagaaatgaagatgctgtgaaccagatggctgtgacccccttccctgtgcccagcagcagccccagcagcattgaggaccagagcggcacagagcccatcagcagcgaggaggatggctctgtggaggtgggcatcaagcagctgcctgagagcgagagcttcaagctggccgtgtcccagatgaagcagcagaagtaccccaccaaggtgtccttcagcagccaggagatccccctggccccagccagcagctaccacagcacagatgctgacttcaccggctacggcggcttccaggcccccctgtctgtggaccctgccacctgccccatcgtgcccggccaggagatgatcatcgagatcagcaagggccgcagcggcctgggcctgagcatcgtgggcggcaaggacacccccctcttctggaggctgggcagcccccgggcctggagccagcacctggtgcgggccttcatgctgcaccaccctgtgacagaggtggagggccagaatgccatcgtcatccacgaggtgtatgaggagggcgctgctgccagagatggccgcctgtgggccggggaccagatcctggaggtgaatggagtggacctgaggaacagcagccatgaggaggccatcacagccctgcggcagaccccccagaaggtgcggctggtggtgtacagagatgaggcccactacagagatgaggagaacctggagatcttccctgtggacctgcagaagaaggccggccggggcctgggcctgagcatcgtgggcaagtag

SEQ ID NO: 336501 - DNA, 1359 bp, Artificial Sequence
  derived and/or modified sequence
atggtgcagggcggcttccctgagaagatccggcagagatatgctgacctgcccggggagctgcacatcatcgagctggagaaggacaagaatggcctgggcctgagcctggccggcaacaaggacaggagcaggatgagcatctttgtggtgggcatcaaccctgagggccctgctgctgctgatggccgcatgagaattggagatgagctgctggagatcaacaaccagatcctgtatggccgcagccaccagaatgccagcgccatcatcaagacagcccccagcaaggtgaagctggtgttcatcagaaatgaagatgctgtgaaccagatggctgtgacccccttccctgtgcccagcagcagccccagcagcattgaggaccagagcggcacagagcccatcagcagcgaggaggatggctctgtggaggtgggcatcaagcagctgcctgagagcgagagcttcaagctggccgtgtcccagatgaagcagcagaagtaccccaccaaggtgtccttcagcagccaggagatccccctggccccagccagcagctaccacagcacagatgctgacttcaccggctacggcggcttccaggcccccctgtctgtggaccctgccacctgccccatcgtgcccggccaggagatgatcatcgagatcagcaagggccgcagcggcctgggcctgagcatcgtgggcggcaaggacacccccctcttctggaggctgggcagcccccgggcctggagccagcacctggtgcgggccttcatgctgcaccaccctgtgacagaggtggagggccagaatgccatcgtcatccacgaggtgtatgaggagggcgctgctgccagagatggccgcctgtgggccggggaccagatcctggaggtgaatggagtggacctgaggaacagcagccatgaggaggccatcacagccctgcggcagaccccccagaaggtgcggctggtggtgtacagagatgaggcccactacagagatgaggagaacctggagatcttccctgtggacctgcagaagaaggccggccggggcctgggcctgagcatcgtgggcaagagaaatggaagtggagtcttcatcagtgacatcgtgaagggcggcgctgctgacctggatggccgcctcatccagggcgaccagatcctgtctgtgaatggagaggacatgagaaatgccagccaggagaccgtggccaccatcctgaagtgtgcccagggcctggtgcagctggagatcggccgcctgcgggccggctcctggaccagcgcccggaccaccagccagaacagccaggtggtggatggcttcagcagtgactag

SEQ ID NO: 336502 - DNA, 4746 bp, Artificial Sequence
  derived and/or modified sequence
atgcccgagaaccccgccaccgacaagctgcaggtgctgcaggtgctggatcggctgaaaatgaaactgcaggaaaaaggggataccagtcaaaatgagaagctgtctatgttttatgagactttaaaatcaccactattcaatcagatcctcacgttgcagcagtcaattaagcaactgaagggccagcttaatcacattccctctgactgttcagcaaacttcgacttctctcgcaagggtcttctggtgtttaccgacgggagcatcacaaatggaaatgtgcaccgcccaagcaacaactcaaccgtctccggattgtttccgtggaccccgaaactcggcaacgaagactttaatagcgtcattcagcagatggcacagggaagacagatcgagtatatcgatatcgaaaggccctccacaggcgggctcggtttttcggtggtcgcccttaggtctcagaatcttgggaaggtggatatttttgtcaaagacgtacagccaggcagcgtggcggatcgggatcagcgtctgaaggagaacgaccagattcttgccatcaaccatacccctctggatcagaacataagccatcagcaggcgatcgccttactccagcagacaaccggaagtctcagacttattgtggcccgcgagcctgtccataccaagagcagtacatcgtcttcactgaacgacacgactctgcccgagactgtatgttgggggcatgtggaggaggtggagttaattaacgacggctctggtcttggattcggcatcgtggggggcaagacttcaggcgttgtggtacgaaccatcgtaccaggaggacttgctgacagagatggacggctccaaacaggtgatcacatccttaaaataggaggcactaacgtacagggaatgacttccgagcaggtggcacaagtcttaagaaactgcggcaactcggtccgcatgcttgtcgcccgggatcccgccggtgacatttccgtgacaccccctgctcctgccgctctaccggtagccctgccaacagtggccagcaagggtcctggctctgacagttccttattcgaaacctataatgtagagctcgtgcgcaaggatgggcagagcctgggcattcgaatcgtcggatatgtgggaacctcccataccggcgaggccagtgggatctacgttaagagtattatcccaggctcagcagcgtaccacaacgggcacatacaggtaaacgacaaaattgttgcagtggacggggtaaatatccagggatttgccaatcacgatgtggtggaagtgctcagaaatgctggccaggtcgttcatctcactctggttagacgtaagacgtctagttctacctcccccctggaacccccatccgaccgtggtaccgtggttgaacccctcaagcctcccgcattgttcctaaccggagctgtcgaaacagaaacaaacgtcgacggcgaagatgaagagattaaggaaaggatcgacactctcaaaaacgacaacatacaggctctcgagaagcttgagaaggtgccagattctcccgagaacgaactgaagtctaggtgggagaacctattaggccccgactatgaggtcatggtggccaccctggacacccaaatcgcagatgacgctgagctgcaaaagtatagcaaactgctgccgatccacacactgagactgggcgtcgaagttgacagcttcgatggacaccattatatctcaagtattgtgtccggcggaccggttgatacattgggcctccttcagccagaggacgaactgctggaggtcaatggcatgcagctgtacggtaagagcaggagagaggctgtcagctttctcaaggaagtaccccccccgtttacgctggtgtgttgtcgcaggctgtttgacgacgaagcaagcgtagatgagcctcgcagaaccgagacaagcctgcctgaaaccgaggtggaccacaacatggatgttaacacagaggaggatgatgatggggagctggccttgtggtcccctgaagtaaagatagtggaattggtcaaggactgtaaggggctgggcttctccatccttgattaccaggacccactcgatcctacaaggtccgtcatcgtgattagaagtcttgtggcagacggcgttgctgagcgatccggggggctgttaccgggtgaccgcttggtgagcgtgaatgagtactgtctggacaacacatcactggctgaggcagtggaaattctgaaggccgtacctcccggattggtccacctcggaatctgtaaaccccttgtagaagataacgaggaagaatcatgctacattctccacagttcctcaaatgaagacaaaaccgaattcagtgggacgatccatgacattaactcctccctgattcttgaggcacccaaggggtttcgggacgagccctactttaaggaggaactggtggatgaaccattccttgacctgggtaagagctttcactctcagcagaaagagatcgagcaatctaaggaagcatgggagatgcacgagttcctcacgccccggctgcaggagatggacgaagagagagagatcctcgttgatgaagagtatgaactgtatcaggaccccagccccagcatggagctataccctctgtctcacatccaggaggctacccccgtcccttccgtgaatgagctccatttcggaacccagtggcttcacgacaatgagccgtctgagtcccaggaagcgaggacgggtcgtactgtgtattcccaagaggcccagccctacggatattgccccgaaaatgtgatgaaggagaattttgtgatggaaagtcttccatcggtgccttccacagaagggaactcgcaacaaggacggttcgacgatttggaaaatcttaatagtctggcaaaaacaagtctcgatttgggaatgattcctaatgatgtccagggcccctccctgctcatcgatctccccgtggtcgcacaaaggagagaacaggaggaccttcccctctatcagcatcaggccaccagggtgatctccaaggcctctgcttacacagggatgctgagttcacgatatgccaccgacacatgcgaactcccggagcgcgaagagggagagggggaggaaactcccaacttctcgcattggggtccgcctcgcatcgtggagatcttccgagagccaaatgtgagcttggggattagcattgtgggcggccaaacagttatcaaaaggttaaaaaacggggaagagctaaaaggtattttcatcaaacaagttttagaggacagcccggccggtaaaacaaatgctttgaaaaccggagataagatcctggaggtgagcggagtcgacttgcagaacgctagtcattctgaggccgttgaagcaatcaagaacgccggcaaccccgtagtttttattgtgcagtccctgtcgtccacacctagggtcatcccgaacgtacataacaaagcaaacaaaatcactgggaaccagaaccaggatactcaggagaagaaagaaaagcggcagggaactgccccgcccccaatgaagctcccaccaccttacaaggctcttactgacgactctgatgagaatgaggaggaggacgcattcaccgatcagaaaatcaggcagagatacgcagatttaccaggtgagcttcacattatagaacttgagaaggacaagaacggactgggcctgagtctcgcaggcaataaggatcgtagccggatgtctatctttgtagtcggcatcaaccctgaaggccccgccgctgcagacggacgcatgcgaataggagacgagctcttggagattaataaccagatactctacggtagaagccaccagaatgcctcagccataataaagactgccccatcaaaagtcaaactcgtctttattaggaacgaagatgccgtgaatcagatggcagtgacgccttttcccgtgccctcatcaagcccctccagcattgaagaccagagcggaactgaacccatatcgagcgaggaggacggctccgtcgaggtcggaatcaagcagctgcccgaaagcgagtcatttaagctcgcagtctcccagatgaaacaacagaagtatcccaccaaggtgagcttttcttctcaagaaatccccctggcccccgcgtccagttatcactctaccgacgcagacttcacaggctatgggggttttcaggccccgctgagtgtcgatccagccacttgcccaattgttccaggccaagagatgataattgagatttctaagggtagaagcggccttggactgagcattgttggcggcaaggacacacccctgttttggaggctgggatctcctcgagcctggtctcagcacctggtccgcgctttcatgctccaccatccagttaccgaagtcgagggccagaatgctatcgtcatccacgaggtttacgaggagggtgcagccgctagagatggaagactgtgggctggagatcagatccttgaggtcaacggggtcgacctccgcaactcctcacatgaagaagccatcacagccctgcgacagacaccccaaaaagtgcggctggtagtttatagggatgaggctcactacagagatgaagagaaccttgagatctttccagtggacctgcagaagaaagctggccgcggtcttggactgagcattgtgggaaagtag

SEQ ID NO: 336503 - DNA, 1359 bp, Artificial Sequence
  derived and/or modified sequence
atggtgcagggcggcttccccgagaagatccggcagcggtacgccgatttgcctggagaactgcacattatcgagcttgaaaaggataaaaacggcctgggcttatctcttgccggcaacaaagaccgatcccgtatgagcatctttgttgtaggaatcaacccagaaggtcccgccgccgctgatggccgcatgagaatcggggacgagctgctggaaatcaataatcagatcctgtatggcaggtctcaccaaaatgcctctgctataatcaagacagcacccagcaaggtgaagctcgtctttattcggaacgaggacgccgtaaatcagatggcagttactccctttcctgtgccaagctcaagcccatcaagtattgaagatcagtctggcacagagcctattagctccgaagaggatgggagcgtagaggttgggattaaacaactgccagagagcgagtcattcaaattagcggtctcccagatgaagcagcagaagtaccccactaaagtgtccttttcatcccaagagatccctttggccccggcctcctcttatcactccacggacgctgactttacaggctacggcggattccaggccccactttccgtggatcccgctacctgtccaatcgtacctgggcaggaaatgataatcgaaatcagcaagggacggtcgggcctcgggttatctatcgtggggggtaaggacacacccttattttggaggctggggtctccacgggcctggagccaacacttggtcagggcctttatgcttcaccaccctgtgaccgaggtagaggggcaaaatgcaatcgtcatccatgaagtatacgaggaaggagctgccgctagggacggaagactctgggcaggcgatcagatactcgaagttaacggtgtcgatctccggaattcaagtcacgaagaagccattacggccctgcgtcaaaccccgcagaaggtaagactggttgtttatcgagatgaggcgcattacagagacgaggagaacctggaaatcttcccagtggacctccaaaagaaggcgggcagggggcttggtctctctatcgttggaaaacggaatgggtctggcgtgttcatctccgatattgtcaaagggggagcagccgaccttgacggcagactgatccagggagaccagattctgagcgtcaacggagaggatatgaggaacgcctcgcaggagaccgtggcaacgatcttgaagtgtgcccagggtctggtgcaattagagatcggaagactccgcgcaggatcatggacatcggcccggaccacctcccagaacagccaggtcgtggatggtttttccagcgattag

SEQ ID NO: 336504 - DNA, 4745 bp, Artificial Sequence
  derived and/or modified sequence
atgccagaaaaccctgcaacggacaagctacaggttcttcaggttctggataggctgaagatgaagcttcaggaaaagggagatacaagccagaatgagaagctgtcaatgttctacgagactttaaaaagccccctcttcaaccagatccttacccttcagcagtctattaaacaacttaaagggcagctgaatcacattccctccgattgttccgctaatttcgacttttcccgaaaaggtctgttagtgtttactgacggcagcatcacaaatggaaatgtgcatcgcccaagcaacaactcaacagtgtccgggctatttccctggacccctaagctcggcaatgaagatttcaattccgtgatccagcagatggcccagggacgccaaattgagtacattgatattgaaagacccagtaccggtggactaggtttcagtgtcgtcgctctcagatcgcaaaacctgggtaaggtggacatcttcgtcaaggatgtacagccaggctctgttgctgatcgggatcaaaggcttaaagagaatgatcagattttggccattaaccacacccctctggatcagaatatcagccaccagcaggccatcgccttgctccaacagactaccggatccctgaggctgatagtggctagggagccagtacataccaagagcagcacatcttcctctctgaatgacacaactctccccgaaacagtctgctggggtcacgtggaagaggtcgaattgatcaatgatggctccggcctaggatttgggatcgtcggtggcaaaaccagtggtgtggtggtccggaccatcgtgcccggtggcttggcggacagagatggtcgattgcagaccggggatcatatcttaaaaataggaggcaccaacgtgcaggggatgaccagtgaacaagtggcccaagtgttaagaaactgcggcaatagcgtgagaatgctggtcgcaagggaccctgctggggatatctctgtgacaccaccagcacctgcagccctgcccgtagcactgccaacagtggcttctaaaggacccggtagcgattctagcttgttcgagacttacaacgttgagcttgtgcggaaggatggccagtctctcgggatcaggattgttggatacgtgggaactagtcatacaggtgaagcatccggtatatatgtaaagagcatcattccgggatccgccgcttaccacaacggacacatccaagtgaatgataagatcgtggccgtggacggggtgaatattcagggttttgccaatcacgatgttgtcgaggttctgagaaatgccggacaggtggtccacctaacactagtgcggcgaaagacctcatctagtacatcacctctggagcctccatccgatcggggaacagtcgtagaacccctgaaaccccctgcgctttttcttacaggtgccgtggaaactgagaccaatgtcgacggtgaggacgaagaaattaaggagcgtattgacacactgaaaaacgataatatacaggccctcgagaagctggagaaggtgccggattcccccgaaaatgaacttaagtcaagatgggagaacctgctcggccctgactacgaggtcatggtggcaacactggacacccaaattgcagatgatgctgaactgcaaaaatactcaaagcttctacccattcacactctgagactgggggttgaggtagattcttttgatggacaccactacatctcatctatcgttagcgggggacctgttgatacactcggcctgttacaacccgaagatgaactgctcgaagtgaacggtatgcagctatacgggaaatctcgtcgggaggccgtgtctttccttaaggaagtaccgcctccatttaccctggtctgctgtcggagactgttcgatgacgaagcctctgtcgatgagcctcgacggacggagacgtccctccccgagactgaagtggatcacaacatggatgtcaacacagaggaagacgatgatggtgaattagcactctggtcacccgaggtcaaaatcgtggagctcgtcaaagattgtaaggggctgggtttctcgattctggactaccaggacccgctagatcccacgcggagtgttatcgtgattcgatctctggttgcagacggagtagctgaacggtccggagggctgctgccaggcgacaggcttgtctcggtgaacgagtattgtctggataacacaagtctggccgaagccgtggagatccttaaggctgtccctccaggccttgtgcacctcggtatctgtaaaccacttgtggaagataacgaggaggaatcatgctacatcctccacagctcttcaaatgaggataaaacagaattttcaggcacgatacacgatattaattcctcccttattttagaagctccgaaggggtttagagacgaaccatacttcaaggaagagttggtggatgagccctttctggatctgggtaagagcttccactcccagcaaaaagaaatagagcagagcaaggaagcttgggagatgcacgaattcctgaccccaagactccaggaaatggacgaggagcgcgaaattttagtagacgaagagtacgagctctaccaggatccatccccttctatggaactgtatccgctgtcacatattcaagaagccacccctgttccaagtgtgaacgagctccacttcggaactcagtggctgcatgataatgagccatctgagtcccaggaggcaaggacaggcagaacagtgtattcccaagaagctcagccttacggttattgcccggagaacgtgatgaaggagaacttcgtcatggaaagcctcccgagcgtcccatccacggagggcaacagccaacagggtagattcgacgacttggagaacctgaactctttagccaaaacaagcctggatttaggcatgattcctaacgacgtgcaagggcctagcctcctgatcgatttacccgtagttgcacaaaggcgcgaacaggaggatcttcctttatatcagcaccaagcaacccgggtgataagcaaggcatctgcatacacaggaatgctaagcagccgatatgccacggacacctgcgagcttccagaacgggaggaaggagagggtgaggagacccctaatttctcacactggggcccaccgagaattgtcgagatctttagggagccaaatgtgtcactcggcatttcgatagttggtggacagaccgtgatcaagcgcctcaagaacggagaagaacttaaaggcatcttcatcaagcaggtccttgaagattctcccgcaggaaagaccaacgccctcaaaacaggcgataaaattctcgaggtcagcggggtcgacctacagaacgcaagtcacagtgaggcggtggaggcgatcaaaaacgcgggaaatcccgtggtttttattgtccagtctctgtcatccacaccacgcgttatcccaaacgtccacaacaaagctaataaaattacaggcaaccagaaccaggacacacaggaaaaaaaagagaagcggcaaggaacagctccgcctcctatgaagctacctcctccatataaagcccttacagacgatagcgacgagaacgaggaagaggacgcattcacagatcagaaaatcagacaaagatacgccgacttgccaggagagctacacatcatcgagctggagaaagacaagaacggcttgggcctctcactggcaggaaataaagaccgcagcagaatgagcatctttgtagtgggcattaatcccgagggaccagcagccgctgacgggagaatgaggataggcgacgagttgctcgagattaataaccaaatcctgtacggaagatcccaccagaatgcatccgccattataaagaccgcaccaagtaaggtaaagctggtgttcatccgtaatgaagatgcggtaaatcaaatggcagttacaccctttccggtccccagctcaagcccgagttccattgaggatcagtccggcaccgagcccatctcctccgaagaggacggcagtgtggaggtgggtattaagcaactgcctgagtccgagagttttaagctggccgtttcacagatgaagcagcagaagtaccctaccaaggtttcattttcttcccaggaaattcccctggctcccgcatctagttatcacagtaccgacgccgactttaccggctacggcggatttcaggccccactcagcgtcgaccctgctacttgtcccatagtgccgggacaggagatgatcatagaaatcagtaaggggcgttccggactgggtctcagcatcgtgggaggtaaggatactccactgttttggcggctcggctctccaagagcgtggtctcaacacctcgtgcgggcattcatgctgcatcatcccgtcactgaggtagaaggccaaaatgcaattgtgatccatgaggtctatgaggagggcgcagctgccagagatggacgtttatgggccggtgatcagatcctggaggtgaatggggtcgacctacgcaacagttcccatgaagaggctattactgccctgaggcagactccacagaaagtcaggcttgtggtgtacagagacgaggcccactaccgcgatgaggagaatctcgagattttcccagttgacctccagaaaaaggctggcagaggcctgggcctcagtattgtgggtaaata

SEQ ID NO: 336505 - DNA, 1359 bp, Artificial Sequence
  derived and/or modified sequence
atggttcagggcggtttccccgaaaagatccgacaacggtatgctgatctccccggagagttgcacataatagaactggaaaaagacaaaaacggtctcggtttgagcctcgctggcaacaaagacagatctcgcatgtccatctttgtggtggggattaatccagaggggcctgcggctgcggatggtaggatgcggattggagacgagctgctggagattaataaccagattttgtatggccgatcacaccaaaatgcgagcgccattattaagaccgcccctagcaaagtcaaattagtctttatccggaatgaagacgcagtgaatcaaatggccgtcacacctttcccggttccaagctctagtccgtccagcatcgaagatcaatcaggtacagaaccaatcagtagcgaggaggacggctccgtggaggtcgggatcaaacagttacctgagagcgaatctttcaagctggctgtgtctcagatgaagcagcaaaagtacccaacaaaagtgtcattctcctcacaggaaatacccctggcgccagccagctcctatcactcgacagatgccgactttacaggctacggaggctttcaggcacctctgagcgttgaccccgctacctgcccgatcgttcccggtcaagagatgatcatcgagatttccaagggacggtcgggcctgggacttagtatcgttggcggaaaagatactccgctgttctggcggttgggtagcccaagggcgtggagccagcacctggtccgggcattcatgcttcatcatcctgtcacggaggtcgaagggcagaatgcaatcgtaatccacgaagtctatgaagaaggcgcagccgcacgggacgggaggctctgggctggcgatcagattctcgaagttaatggagtggatttgcgcaacagctcgcacgaagaggccatcacagcactgcgacagacacctcaaaaagtcagactggtggtgtaccgagatgaggcccactacagggacgaagagaacctggaaattttccctgttgatttgcagaagaaggcaggccgaggtctgggtttgtctattgtcgggaagagaaacggttctggtgtgtttatatctgacatcgtcaagggcggtgctgctgacctggacggtcgccttattcaaggcgatcaaatcctgtctgtaaacggcgaagatatgcggaatgcatcccaggaaacagtggccacaatcctgaagtgtgcccaagggttggttcagcttgaaatcggtcgcctgcgagctggctcctggaccagtgcccgaacaacatcccagaattcccaggtagtggatggattctcgtccgactag

SEQ ID NO: 336506 - DNA, 4746 bp, Artificial Sequence
  derived and/or modified sequence
atgcccgagaaccccgccaccgacaagctgcaggtgctgcaggtgctggacagactgaagatgaagctgcaggagaagggcgacaccagccagaacgagaagctgagcatgttctacgagaccctgaagagccccctgttcaaccagatcctgaccctgcagcagagcatcaagcagctgaagggccagctgaaccacatccccagcgactgcagcgccaacttcgacttcagcagaaagggcctgctggtgttcaccgacggcagcatcaccaacggcaacgtgcacagacccagcaacaacagcaccgtgagcggcctgttcccctggacccccaagctgggcaacgaggacttcaacagcgtgatccagcagatggcccagggcagacagatcgagtacatcgacatcgagagacccagcaccggcggcctgggcttcagcgtggtggccctgagaagccagaacctgggcaaggtggacatcttcgtgaaggacgtgcagcccggcagcgtggccgacagagaccagagactgaaggagaacgaccagatcctggccatcaaccacacccccctggaccagaacatcagccaccagcaggccatcgccctgctgcagcagaccaccggcagcctgagactgatcgtggccagagagcccgtgcacaccaagagcagcaccagcagcagcctgaacgacaccaccctgcccgagaccgtgtgctggggccacgtggaggaggtggagctgatcaacgacggcagcggcctgggcttcggcatcgtgggcggcaagaccagcggcgtggtggtgagaaccatcgtgcccggcggcctggccgacagagacggcagactgcagaccggcgaccacatcctgaagatcggcggcaccaacgtgcagggcatgaccagcgagcaggtggcccaggtgctgagaaactgcggcaacagcgtgagaatgctggtggccagagaccccgccggcgacatcagcgtgaccccccccgcccccgccgccctgcccgtggccctgcccaccgtggccagcaagggccccggcagcgacagcagcctgttcgagacctacaacgtggagctggtgagaaaggacggccagagcctgggcatcagaatcgtgggctacgtgggcaccagccacaccggcgaggccagcggcatctacgtgaagagcatcatccccggcagcgccgcctaccacaacggccacatccaggtgaacgacaagatcgtggccgtggacggcgtgaacatccagggcttcgccaaccacgacgtggtggaggtgctgagaaacgccggccaggtggtgcacctgaccctggtgagaagaaagaccagcagcagcaccagccccctggagccccccagcgacagaggcaccgtggtggagcccctgaagccccccgccctgttcctgaccggcgccgtggagaccgagaccaacgtggacggcgaggacgaggagatcaaggagagaatcgacaccctgaagaacgacaacatccaggccctggagaagctggagaaggtgcccgacagccccgagaacgagctgaagagcagatgggagaacctgctgggccccgactacgaggtgatggtggccaccctggacacccagatcgccgacgacgccgagctgcagaagtacagcaagctgctgcccatccacaccctgagactgggcgtggaggtggacagcttcgacggccaccactacatcagcagcatcgtgagcggcggccccgtggacaccctgggcctgctgcagcccgaggacgagctgctggaggtgaacggcatgcagctgtacggcaagagcagaagagaggccgtgagcttcctgaaggaggtgcccccccccttcaccctggtgtgctgcagaagactgttcgacgacgaggccagcgtggacgagcccagaagaaccgagaccagcctgcccgagaccgaggtggaccacaacatggacgtgaacaccgaggaggacgacgacggcgagctggccctgtggagccccgaggtgaagatcgtggagctggtgaaggactgcaagggcctgggcttcagcatcctggactaccaggaccccctggaccccaccagaagcgtgatcgtgatcagaagcctggtggccgacggcgtggccgagagaagcggcggcctgctgcccggcgacagactggtgagcgtgaacgagtactgcctggacaacaccagcctggccgaggccgtggagatcctgaaggccgtgccccccggcctggtgcacctgggcatctgcaagcccctggtggaggacaacgaggaggagagctgctacatcctgcacagcagcagcaacgaggacaagaccgagttcagcggcaccatccacgacatcaacagcagcctgatcctggaggcccccaagggcttcagagacgagccctacttcaaggaggagctggtggacgagcccttcctggacctgggcaagagcttccacagccagcagaaggagatcgagcagagcaaggaggcctgggagatgcacgagttcctgacccccagactgcaggagatggacgaggagagagagatcctggtggacgaggagtacgagctgtaccaggaccccagccccagcatggagctgtaccccctgagccacatccaggaggccacccccgtgcccagcgtgaacgagctgcacttcggcacccagtggctgcacgacaacgagcccagcgagagccaggaggccagaaccggcagaaccgtgtacagccaggaggcccagccctacggctactgccccgagaacgtgatgaaggagaacttcgtgatggagagcctgcccagcgtgcccagcaccgagggcaacagccagcagggcagattcgacgacctggagaacctgaacagcctggccaagaccagcctggacctgggcatgatccccaacgacgtgcagggccccagcctgctgatcgacctgcccgtggtggcccagagaagagagcaggaggacctgcccctgtaccagcaccaggccaccagagtgatcagcaaggccagcgcctacaccggcatgctgagcagcagatacgccaccgacacctgcgagctgcccgagagagaggagggcgagggcgaggagacccccaacttcagccactggggcccccccagaatcgtggagatcttcagagagcccaacgtgagcctgggcatcagcatcgtgggcggccagaccgtgatcaagagactgaagaacggcgaggagctgaagggcatcttcatcaagcaggtgctggaggacagccccgccggcaagaccaacgccctgaagaccggcgacaagatcctggaggtgagcggcgtggacctgcagaacgccagccacagcgaggccgtggaggccatcaagaacgccggcaaccccgtggtgttcatcgtgcagagcctgagcagcacccccagagtgatccccaacgtgcacaacaaggccaacaagatcaccggcaaccagaaccaggacacccaggagaagaaggagaagagacagggcaccgcccccccccccatgaagctgccccccccctacaaggccctgaccgacgacagcgacgagaacgaggaggaggacgccttcaccgaccagaagatcagacagagatacgccgacctgcccggcgagctgcacatcatcgagctggagaaggacaagaacggcctgggcctgagcctggccggcaacaaggacagaagcagaatgagcatcttcgtggtgggcatcaaccccgagggccccgccgccgccgacggcagaatgagaatcggcgacgagctgctggagatcaacaaccagatcctgtacggcagaagccaccagaacgccagcgccatcatcaagaccgcccccagcaaggtgaagctggtgttcatcagaaacgaggacgccgtgaaccagatggccgtgacccccttccccgtgcccagcagcagccccagcagcatcgaggaccagagcggcaccgagcccatcagcagcgaggaggacggcagcgtggaggtgggcatcaagcagctgcccgagagcgagagcttcaagctggccgtgagccagatgaagcagcagaagtaccccaccaaggtgagcttcagcagccaggagatccccctggcccccgccagcagctaccacagcaccgacgccgacttcaccggctacggcggcttccaggcccccctgagcgtggaccccgccacctgccccatcgtgcccggccaggagatgatcatcgagatcagcaagggcagaagcggcctgggcctgagcatcgtgggcggcaaggacacccccctgttctggagactgggcagccccagagcctggagccagcacctggtgagagccttcatgctgcaccaccccgtgaccgaggtggagggccagaacgccatcgtgatccacgaggtgtacgaggagggcgccgccgccagagacggcagactgtgggccggcgaccagatcctggaggtgaacggcgtggacctgagaaacagcagccacgaggaggccatcaccgccctgagacagaccccccagaaggtgagactggtggtgtacagagacgaggcccactacagagacgaggagaacctggagatcttccccgtggacctgcagaagaaggccggcagaggcctgggcctgagcatcgtgggcaagtag

SEQ ID NO: 336507 - DNA, 1359 bp, Artificial Sequence
  derived and/or modified sequence
atggtgcagggcggcttccccgagaagatcagacagagatacgccgacctgcccggcgagctgcacatcatcgagctggagaaggacaagaacggcctgggcctgagcctggccggcaacaaggacagaagcagaatgagcatcttcgtggtgggcatcaaccccgagggccccgccgccgccgacggcagaatgagaatcggcgacgagctgctggagatcaacaaccagatcctgtacggcagaagccaccagaacgccagcgccatcatcaagaccgcccccagcaaggtgaagctggtgttcatcagaaacgaggacgccgtgaaccagatggccgtgacccccttccccgtgcccagcagcagccccagcagcatcgaggaccagagcggcaccgagcccatcagcagcgaggaggacggcagcgtggaggtgggcatcaagcagctgcccgagagcgagagcttcaagctggccgtgagccagatgaagcagcagaagtaccccaccaaggtgagcttcagcagccaggagatccccctggcccccgccagcagctaccacagcaccgacgccgacttcaccggctacggcggcttccaggcccccctgagcgtggaccccgccacctgccccatcgtgcccggccaggagatgatcatcgagatcagcaagggcagaagcggcctgggcctgagcatcgtgggcggcaaggacacccccctgttctggagactgggcagccccagagcctggagccagcacctggtgagagccttcatgctgcaccaccccgtgaccgaggtggagggccagaacgccatcgtgatccacgaggtgtacgaggagggcgccgccgccagagacggcagactgtgggccggcgaccagatcctggaggtgaacggcgtggacctgagaaacagcagccacgaggaggccatcaccgccctgagacagaccccccagaaggtgagactggtggtgtacagagacgaggcccactacagagacgaggagaacctggagatcttccccgtggacctgcagaagaaggccggcagaggcctgggcctgagcatcgtgggcaagagaaacggcagcggcgtgttcatcagcgacatcgtgaagggcggcgccgccgacctggacggcagactgatccagggcgaccagatcctgagcgtgaacggcgaggacatgagaaacgccagccaggagaccgtggccaccatcctgaagtgcgcccagggcctggtgcagctggagatcggcagactgagagccggcagctggaccagcgccagaaccaccagccagaacagccaggtggtggacggcttcagcagcgactag

SEQ ID NO: 336508 - DNA, 8595 bp, Artificial Sequence
  derived and/or modified sequence
ctcacttccgcccaggtgaggcagggccgacaccgagcccgcccgacccgggctcccacctgctcctccagcgcaccaggtgtctttaagagtgattgaagagaataattcaaaatgcctgaaaatcctgctacagataaactgcaggtgctgcaggtacttgatcgcctgaaaatgaaattgcaggagaagggtgacacgtcgcagaatgagaagttatctatgttttatgagacactaaagagtcctctcttcaaccagatactcacacttcagcagtccatcaagcaactgaagggtcaactcaaccatataccctcagattgttcagccaactttgatttttctaggaaaggtttgttagtgttcacagatggttccatcactaatggaaatgtccacaggccctctaataactcgactgtatctgggttatttccgtggaccccgaagttgggaaatgaagactttaactcagtcattcaacagatggctcagggccggcaaattgaatatatagatatagaacggccttcaactggaggccttggattcagtgtggtggccctcagaagtcaaaatctcggaaaagttgatatcttcgtgaaggatgtccagccagggagtgtagcagacagggatcaaagattaaaggaaaatgatcaaatattggccattaatcacacgccattggatcagaacatttcccatcagcaagcaattgcattattacaacaaaccactggatctttgagactgattgtggccagggaaccagtccacacaaaaagcagtacttctagcagcctaaatgatacaactctgcctgaaacagtttgttggggccatgttgaagaggttgagctcattaatgatggctctggactaggttttggaatagttggaggaaaaacaagtggcgtggttgtgaggactatagttcctggaggattagcagatcgagatggaagactccagacaggggaccacatcttgaagattggtggcacaaacgtgcagggaatgaccagtgagcaagttgcacaagttctaaggaactgtgggaattcagtcaggatgctcgttgctagagatccagctggtgacatttcagtcaccccccctgcccctgcagccttacctgttgccctgcctactgtagccagcaagggccctggttctgacagttctctttttgaaacttataatgttgagcttgtgagaaaagatgggcagagtcttggaattagaattgttggctatgttggaacatctcatacaggggaagcttcagggatttatgtgaaaagtataatacctggcagtgctgcgtaccacaatggccacattcaagtgaatgacaaaatagttgctgtcgatggcgtgaacattcagggttttgccaaccatgatgttgttgaagtattacgaaatgcagggcaggtggtacacctaaccctagttcgaaggaagacatcctcatctacttctccacttgaaccaccttcagacagaggaactgttgtagaaccactgaaaccaccagctctctttctaactggagcagtggaaactgaaactaatgtggatggtgaagatgaggaaattaaagaaagaattgatactttaaaaaatgacaacatacaagccttagaaaaattggaaaaagtcccagactctccagaaaatgagctgaaatccagatgggaaaacctgttgggtcctgattatgaagtaatggttgctactttggacacacagattgcagatgatgctgagttacagaaatattcaaagctgctgcctattcacactctgaggcttggtgtggaagtggattcctttgatgggcaccattatatttcttcaattgtttctggtggtcctgttgatacattgggtctcctacagccagaagatgagctgcttgaggtcaatggcatgcagctttatggaaaatctcgccgagaagcagtctcctttcttaaagaagtgccacccccttttactttggtttgctgtcggaggttgtttgatgatgaagcttctgtagatgaaccaaggcgcactgaaacctctcttcctgagacagaggttgaccacaatatggatgtcaatactgaagaagatgatgatggggaattagcactgtggtcccctgaagtcaagattgttgaactagtaaaagattgtaaaggtttgggattcagcattttggattaccaggaccctttagatcctacaagatcagtgattgtgatccgctccctggtagcagatggtgtagcagaaagaagtgggggactattacctggagaccgcctggtctcagtcaatgaatactgtttggacaacacctcacttgctgaagctgtggaaatattgaaagctgtgccaccaggcctagtacaccttggcatctgtaagcctttggtggaagataatgaagaagaaagttgttatattttacattcaagcagtaatgaagacaagactgaattttcaggaacaattcatgatataaattcatctttaatactcgaagcacccaagggatttagagatgaaccatattttaaagaagaacttgtggatgaaccatttctagatctgggaaagtctttccattcccaacaaaaagagatagagcaaagcaaggaggcctgggagatgcatgaatttctgactcctagattgcaggaaatggatgaagaaagagaaattcttgttgatgaagaatatgagttatatcaagatccctcaccatccatggagttgtatcccttgtcgcacattcaagaggccactcctgtgccctctgtgaatgaacttcactttggtacacagtggttgcatgataatgaaccatccgagtctcaagaggcaagaaccgggaggactgtctattcccaggaggcacagccgtatggctattgccctgaaaatgtgatgaaagaaaattttgtcatggagtccctaccatctgtaccatcaactgaaggaaacagtcaacaaggcagatttgacgacctggaaaatcttaattcattagcaaaaactagtctggatttaggcatgatcccgaatgatgtccaaggtcctagcttgctcattgaccttcctgttgtggctcaaaggagggagcaagaagatttgcctttatatcaacaccaagcgacacgagttatttccaaggcctcagcatacacaggaatgttgtcttctagatatgccactgatacatgtgagttacctgagagagaagaaggcgaaggagaagaaactccaaattttagccactggggtccaccgagaattgttgagatttttagagaacccaatgtgtctcttgggatcagtattgttggtggacaaactgttataaaacgtctaaagaatggagaggagcttaaaggtatattcatcaaacaagttttagaagacagtccagcagggaagacgaacgcacttaaaactggagataaaatacttgaggtgtctggagtagatttgcagaatgcctcacacagcgaagcagttgaggccattaagaatgcaggaaaccctgtggtgttcattgttcagagtttgtcatccactccacgagtcattcctaacgtacataacaaggccaacaaaatcaccggtaaccagaaccaggacacccaagaaaagaaagaaaagaggcaaggaactgctccaccgccaatgaaacttcctcctccttataaagctctgactgatgacagtgatgaaaatgaagaagaagatgcctttaccgaccaaaaaatcagacaaagatatgcagatctgcctggagaactgcacattattgaacttgaaaaagataagaatggacttggactcagccttgctggtaataaagaccgatcacgcatgagcatatttgtggtgggaattaacccggaaggacctgctgccgcagatggacgaatgcgtattggagatgaactcttagagataaacaatcagattctgtatggaagaagtcaccaaaatgcatctgccattattaagactgccccatcaaaggtcaagctggttttcatcagaaacgaggatgcagtcaatcagatggccgttactccctttccagtgccatcaagttctccatcttctattgaggatcagagcggcaccgaacctattagtagtgaggaagatggcagcgtcgaagttggtattaaacaattgcctgaaagtgaaagcttcaaactggctgtcagccagatgaaacagcaaaaatatccaacaaaagtctccttcagttcacaagagataccattagcaccagcttcatcataccattcaacagatgcagacttcacaggctatggtggtttccaggctcctctgtcagtggaccccgcaacgtgtcccattgtccctggacaggaaatgattatagaaatatccaagggacgttcagggcttggtctcagcattgtgggaggaaaagacacacccttgttctggaggctgggaagtccaagagcatggagccagcatctggtgagggccttcatgctgcatcatcctgtgacagaagttgaagggcaaaatgctatagttatccatgaagtctatgaagaaggggcagcagccagagatggaagactttgggctggtgaccagatattagaggttaatggggttgacctgaggaactccagccacgaagaagccatcacagccctgaggcagaccccccagaaggtgcggctggtggtgtatagagatgaggcacactaccgggatgaggagaacttggagattttccctgtggatctgcagaagaaagctggccggggcctgggcctgagcatcgttgggaaacgaaatggaagcggagtgtttatttctgacatcgtgaaaggcggagccgcagacctggatgggagattgattcagggagatcagatcttatctgtgaatggggaggacatgagaaatgcctcacaggagacagtggccaccatcctcaagtgtgcacagggacttgtgcagctagagattggaagactccgagctggttcctggacctccgcaaggacgacatcacagaacagtcagggtagtcagcagagtgcacacagcagctgtcatccctccttcgctcctgtcatcactggcctgcaaaacctggttggcacaaaaagagtttcagatccttcccagaaaaattcaggcacagatatggaaccaaggactgttgagataaacagggagctcagtgatgcccttggaatcagtattgctggaggaagaggaagtcccttaggagatatccccgtatttattgccatgattcaggctagcggagtggccgcacggacacagaagcttaaagttggagatcggattgtcagcattaacgggcaacctttggatgggctgtctcacgcggatgtggttaatctgctgaagaacgcctacgggcgcattatcctgcaggttgtagcagataccaatataagcgccatagcagctcagcttgaaaacatgtctacaggctaccaccttggttcgcccactgctgaacaccatccagaagacacagaggagcagctgcagatgacggccgattaaaacgaggggatcagattttagctgttaatggcgagaccctggaaggtgttactcatgagcaagcagtcgccattctaaaacaccagagagggactgtaaccttaactgtgctgtcatgagcctcgggcctgatcacaagatagatgttgttgtttagaatatccacaggcagatgaagttctgagtgggtatgaaaagcaccctcaactaaaatgcaccttcattcttatttcttgccctctctgctcaggagaaatggctgaggtttcatgtgaatttcccaaatcaacaatcatctcctaatgtttcccagttcctgtcacctgttggcgaggttgatttctaaaacttaaatgagtctacctgttttgcatttaatttcagtgttccgatttctttttttttttttttttttttttttgagacggagtctcactctgtcacccaggctggagtgcaatggcgcaatcttggctcactgcaacctcggcctcccaggttggagcgattctcctgcctcagcctcccgagtagctgggattacaggcatgcatcaccacactgggtttatttttgtttttttagtagagatggagcttccccatgtgggccaggctggtcttgaacttctgacctcaggtgatctgcctgccttggcctcccaaagtgctgggattccaggcgtgagccactgcgcccagcccagtattctgattttaaccaactggttctgattatatttaccaaaactggagttaacttctctttccttatactcttctctccctatcccctactcacaccgaggcttaacagcaacctcagatctcatccaatggacagaaacaaatgttaagcaacttgtcatctcactcatgatttacttatgctaattgtctcttcaagtaagcaagaaaacattagcagtgtaattaatttaccagtgatccccaagatgaaataccagattctcctatgggaaattactgtgctgtcttctgtatgacttatggtcaaataagtctcaaattcatttctctggatagatctttatatgctagtcattggtgattttgatgagtcaatttacagactgtaatcttctaaaaattctgaaagactaattgttttctgtgccatataaatgcataccactgagcaaatgaaccttattctcagcaggaacaactagcatacatgttctgaattctaacagtgctaaattacattcaagtccaggaagatcacctggaattaatggcatttcagttggcaggcatcattcccacccctcggtcttaggaaaaggaggtagaagccccagaaccacacggcagagatcagcaagttttgtctcaagtcagacaaggtctaggtggccttggccttatgcaaagtgggtgacatatttgattatatttccctttacctccatagtagtcaggccagcagcatggactgcaagaacctaagggagcaacatacttagctgcaaagtgagcaaatgaattgagcctaggaatatgtgatgaaaatgcatggctgatgtttcctgatctccaaggagactcccatttgctgaagttttgcatgctaagaaatcaactacagcagaaaatacaagaatacctttaagttgattattggcaatcttattcatatattagcaagaaaaagggagagatgcttactggtggatgctatagagtcctctgtttttaaaagtaccatggccgggtgcagtggctcacgcctgtaatcccagcactttgggaggccagggcaggcgaatcatgaggtcaggagttcgagaccagcctggccaatatggtgaaaccctgtctctactaaaaatacaaaaattagctgggtgcagtggcaggcgcctgtaatcccagctactccggaggttgaagcaggaaaattgcttgaacctgggaggtggaggttgcagtgagccaagttcgtgccactccactccagcctgggtgacagagcaagactctgtctcgaaaaagaaaaaaaaccatgaaggatgagtactagagtcagtaatagaagtagttcagcattatttaactacaacacaatgctgcaaatatttcacagtaattatcaaaatttaatgggctctaatttaaaatgttatttaataagtatagattttaattgagaattatctttgagtagatgtaatcacaaagtgcattaactcttgttggaatattttatggctattccaaagtatagagtgcctaaattttgtgttgaaaatgtctttcatgacggtattaagttttctgaaattacacatggcttttaaaatttctaatgtatccaagatgtgcaatgttgttaggatctcattcttcagtgcatgaaaagctactaccctcagaacattttgtgttaattgtacctgcaagaacacctcaggcaagccaagaagaaatgaaacccaaataaaacttgaaaatgcaccttaaaaatatatatacatataatagttttgaaatgggattctgctttattttgatggaatggccattaaatacacattttgagataatacattgttgtggtgtttctttatacattatccttttaggtcgtgctagtaaaagtatattgatgaaggaattatgatgctttatacttcttactgcactaaattgatagaactagtacttgtcataatcggttctgtctccgctcacatgactaatacgtaattgcctttccaaaaagatatttttgcctcagaacttactgacaagctgagaggctatgaagatggaaatttgtgaaagaagtagtgctcttatatttggcctcatcatttgggccatttcagtatagtaatgatatcactaatcggaattagcatgagagggaagtaagccaggaagaataaaactgctgaatgtttgtatgtgtaagatatttccaaagattctaaataaatgtagttgcctacagagcaaa

SEQ ID NO: 336509 - protein, 636 aa, Artificial Sequence
  derived and/or modified sequence
MANQVNGNAVQLKEEEEPMDTSSVTHTEHYKTLIEAGLPQKVAERLDEIFQTGLVAYVDLDERAIDALREFNEEGALSVLQQFKESDLSHVQNKSAFLCGVMKTYRQREKQGSKVQESTKGPDEAKIKALLERTGYTLDVTTGQRKYGGPPPDSVYSGVQPGIGTEVFVGKIPRDLYEDELVPLFEKAGPIWDLRLMMDPLSGQNRGYAFITFCGKEAAQEAVKLCDSYEIRPGKHLGVCISVANNRLFVGSIPKNKTKENILEEFSKVTGLTEGLVDVILYHQPDDKKKNRGFCFLEYEDHKSAAQARRRLMSGKVKVWGNVVTVEWADPVEEPDPEVMAKVKVLFVRNLATTVTEEILEKSFSEFGKLERVKKLKDYAFVHFEDRGAAVKAMDEMNGKEIEGEEIEIVLAKPPDKKRKERQAARQASRSTAYEDYYYHPPPRMPPPIRGRGRGGGRGGYGYPPDYYGYEDYYDDYYGYDYHDYRGGYEDPYYGYDDGYAVRGRGGGRGGRGAPPPPRGRGAPPPRGRAGYSQRGAPLGPPRGSRGGRGGPAQQQRGRGSRGSRGNRGGNVGGKRKADGYNQPDSKRRQTNNQQNWGSQPIAQQPLQQGGDYSGNYGYNNDNQEFYQDTYGQQWK

SEQ ID NO: 336510 - DNA, 1911 bp, Artificial Sequence
  derived and/or modified sequence
atggctaatcaggtgaacgggaacgccgttcagttgaaggaggaggaggaacctatggatacttcctcagtgactcacacagaacactataagacgcttatcgaagcgggccttccccagaaagtggcagagagactggatgagattttccagacaggactggttgcatacgtggatcttgacgagagagccatcgacgctctgcgggagtttaacgaggaaggcgccttgtctgtgctgcagcagtttaaggagtctgatctttcacacgttcaaaacaagagtgccttcttgtgcggagttatgaaaacatatcgccagcgggagaagcagggctctaaggtgcaggaaagtacaaagggccctgatgaagccaaaataaaggctctcctcgagcggactggatacacacttgatgtgacaacagggcagcggaagtacggcgggccgccgcctgactctgtctacagcggagtgcagcctggtattggtaccgaggtgttcgtcggaaaaattcccagggatctctacgaagacgagctggttccgctgtttgaaaaggccgggcccatctgggaccttagattgatgatggaccctctttcgggccagaatcgcggatacgccttcattactttttgtgggaaggaagccgctcaggaagccgtgaaattgtgcgattcatacgaaatcagacccggtaaacatctgggagtgtgcatttcggtggccaacaaccgtctttttgttggatccataccaaaaaacaagaccaaagagaacattttggaggagttttctaaggttaccgggcttaccgaaggcctcgtggatgtgattttgtatcatcaaccagatgataaaaagaaaaatcggggcttttgcttcctggagtacgaagaccacaagtcagccgctcaggcaaggcggagactgatgtcaggcaaggtgaaagtgtggggtaacgtggtgaccgtggagtgggctgacccagtggaagaaccagatcctgaggtcatggcgaaggtgaaggttctgttcgtgagaaacctggcaaccaccgtgacagaggagattttggagaagtccttttcagagttcgggaaattagagagggtgaagaagttgaaagactacgccttcgttcactttgaagataggggagcagcagtgaaggctatggatgagatgaatggtaaggagatcgagggggaagagattgaaatagtgctcgcaaagccccccgataaaaagaggaaggaacgacaggctgccaggcaagcgtcccgctcaacagcatacgaagactactactaccacccacctcctaggatgcctcctccaatcagagggcggggcaggggggggggtcgtggtggatacgggtatccacccgattactatggttacgaggattactatgacgattattacgggtacgattatcatgattatagaggcggctacgaggatccctactacggttacgacgacggctacgcagtcaggggccggggcggtgggcgaggagggcgcggcgctcccccgccccctcgggggcggggagcacctcctccacgagggagagctggctactctcagcggggtgcacctttgggcccccccaggggttcccgcggaggtcgaggtggtcccgcacaacagcagaggggacggggctcccggggcagtcggggaaacagggggggtaacgtgggtggtaaacgcaaggctgacgggtacaaccagcctgactccaagaggagacagaccaacaatcaacagaactgggggtcacaaccaatcgcacaacagccattacaacaaggtggtgattattcggggaactatggttacaacaacgacaatcaggaattttatcaggacacctacgggcagcaatggaaatag

SEQ ID NO: 336511 - DNA, 2691 bp, Artificial Sequence
  derived and/or modified sequence
caggggggggagggggtggcgcgcgcgccatttctagtcgttttcaaagcgcctcgcgctgattctcacgggcccggctgccggcccccgctctgccctgcataataaaatggctaatcaggtgaatggtaatgcggtacagttaaaagaagaggaagaaccaatggatacttccagtgtaactcacacagaacactacaagacactgatagaggcaggcctcccacagaaggtggcagaaagacttgatgaaatatttcagacaggattggtagcttatgtcgatcttgatgaaagagcaattgatgctctcagggaatttaatgaagaaggagctctgtctgtactacagcagttcaaggaaagtgacttatcacatgttcagaacaaaagtgcatttttatgtggagttatgaagacctacaggcagagagagaaacaggggagcaaggtgcaagagtccacaaagggacctgatgaagcgaagatcaaggccttgcttgagagaactggttatactctggatgtaaccacaggacagaggaagtatggtggtcctccaccagacagtgtgtactctggcgtgcaacctggaattggaacggaggtatttgtaggcaaaataccaagggatttatatgaggatgagttggtgcccctttttgagaaggccggacccatttgggatctacgtcttatgatggatccactgtccggtcagaatagagggtatgcatttatcaccttctgtggaaaggaagctgcacaggaagccgtgaaactgtgtgacagctatgaaattcgccctggtaaacaccttggagtgtgcatttctgtggcaaacaacagactttttgttggatccattccgaagaataagactaaagaaaacattttggaagaattcagtaaagtcacaggtttaacagagggtttggtggacgttattctctatcatcaacccgatgacaaaaagaagaatcgggggttctgcttccttgaatatgaggatcacaagtcagcagcacaagccagacgccggctgatgagtggaaaagtaaaagtgtggggaaatgtagttacagttgaatgggctgaccctgtggaagaaccagatccagaagtcatggctaaggtaaaagttttgtttgtgagaaacttggctactacggtgacagaagaaatattggaaaagtcattttctgaatttggaaaactcgaaagagtaaagaagttgaaagattatgcatttgttcattttgaagacagaggagcagctgttaaggctatggatgaaatgaatggcaaagaaatagaaggggaagaaattgaaatagtcttagccaagccaccagacaagaaaaggaaagagcgccaagctgctagacaggcctccagaagcactgcgtatgaagattattactaccaccctcctcctcgcatgccacctccaattagaggtcggggtcgtggtggggggagaggtggatatggctaccctccagattactacggctatgaagattactatgatgattactatggttatgattatcacgactatcgtggaggctatgaagatccctactacggctatgatgatggctatgcagtaagaggaagaggaggaggaaggggagggcgaggtgctccaccaccaccaagggggaggggagcaccacctccaagaggtagagctggctattcacagaggggggcacctttgggaccaccaagaggctctaggggtggcagagggggtcctgctcaacagcagagaggccgtggttcccgtggatctcggggcaatcgtgggggcaatgtaggaggcaagagaaaggcagatgggtacaaccagcctgattccaagcgtcgtcagaccaacaaccaacagaactggggttcccaacccatcgctcagcagccgcttcagcaaggtggtgactattctggtaactatggttacaataatgacaaccaggaattttatcaggatacttatgggcaacagtggaagtagacaagtaagggcttgaaaatgatactggcaagatacgattggctctagatctacattcttcaaaaaaaaaaattggcttaactgtttcatctttaagtagcattttgctgccatttgtattgggctgaagaaatcactattgtgtatatactcaagtctttttatttttcctcttttcataaatgctcttggacattattgggcttgcagagttcccttattctggggattacaatgcttttatcgtttcaggcttcattttagcttcaaaacaagctgggcacactgttaaatcatgattttgcagaacctttggttttggacagtttcatttttttggatttgggatagattacataggagtatggagtatgctgtaaataaaaatacaagctagtgctttgtcttagtagttttaagaaattaaagcaaacaaatttaagttttcttgtattgaaaataacctatgattgtatgttttgcattcctagaagtaggttaactgtgtttttaaattgttataacttcacacctttttgaaatctgccctacaaaatttgtttggcttaaacgtcaaaagccgtgacaatttgttctttgatgtgattgtatttccaatttcttgttcatgtaagatttcaataaaactaaaaaatctattcaaaacatta

SEQ ID NO: 336512 - DNA, 1911 bp, Artificial Sequence
  derived and/or modified sequence
atggccaaccaggtgaatggaaatgctgtgcagctgaaggaggaggaggagcccatggacaccagctctgtgacccacacagagcactacaagaccctcatcgaggccggcctgccccagaaggtggccgagcggctggatgagatcttccagacaggcctggtggcctacgtggacctggatgagcgggccattgatgccctgcgggagttcaatgaggagggcgccctgtctgtgctgcagcagttcaaggagagtgacctgagccacgtgcagaacaagagcgccttcctgtgtggggtgatgaagacctaccggcagcgggagaagcagggcagcaaggtgcaggagagcaccaagggcccagatgaggccaagatcaaggccctgctggagaggacaggctacaccctggatgtgaccaccggccagaggaaatatggaggccccccaccagacagcgtgtacagcggcgtgcagcccggcattggaacagaggtgtttgtgggcaagatcccccgggacctgtatgaagatgagctggtgcccctgtttgagaaggccggccccatctgggacctgcggctgatgatggaccccctgagcggccagaacagaggctacgccttcatcaccttctgtgggaaggaggccgcccaggaggccgtgaagctgtgtgacagctatgagatccggcctgggaagcacctgggcgtgtgcatctctgtggccaacaaccggctgtttgtgggcagcatccccaagaacaagaccaaggagaacatcctggaggagttcagcaaggtgacaggcctgacagagggcctggtggatgtgatcctgtaccaccagccagatgacaagaagaagaacagaggcttctgcttcctggagtatgaggaccacaagtctgctgcccaggcccggcggcggctgatgtctgggaaggtgaaggtgtggggcaatgtggtgacagtggagtgggccgaccctgtggaggagccagaccctgaggtgatggccaaggtgaaggtgctgtttgtgaggaacctggccaccaccgtgacagaggagatcctggagaagagcttcagcgagtttgggaagctggagcgggtgaagaagctgaaggactatgcctttgtgcactttgaagatagaggagctgctgtgaaggccatggatgagatgaatggcaaggagattgaaggagaggagattgaaattgtgctggccaagcccccagacaagaagaggaaggagcggcaggccgcccggcaggccagccgcagcacagcctatgaggactactactaccaccccccacccaggatgcccccacccatccggggccggggccggggcggcggccggggcggctacggctaccccccagactactacggctatgaggactactatgatgactactacggctatgactaccatgactacagaggaggctatgaggacccctactacggctatgatgatggctatgctgtgcggggccggggcggcggccggggcggccgcggggcccctcctccaccccggggccgcggggcccccccaccccggggccgggccggctacagccagagaggagcccccctgggccccccccggggcagcagaggaggccggggcggccctgcccagcagcagaggggccggggcagccggggcagccggggcaacagaggaggaaatgtgggcggcaagaggaaggcagatggctacaaccagcctgacagcaagaggcggcagaccaacaaccagcagaactggggcagccagcccatcgcccagcagcccctgcagcagggcggggactacagcggcaactacggctacaacaatgacaaccaggagttctaccaggacacctacggccagcagtggaagtag

SEQ ID NO: 336513 - DNA, 1911 bp, Artificial Sequence
  derived and/or modified sequence
atggccaaccaggtgaacggcaacgccgtgcagctgaaggaggaggaggagccaatggacacatcctccgtgacccacacagagcactataaaactttaattgaagcaggcctgccacagaaagtggctgagcgcctcgatgagatttttcaaaccggccttgtggcatatgtggacctggatgaaagagccattgatgctttgagggaatttaatgaggagggggccctgtccgtcttacagcagttcaaggaaagcgatctttcacatgtgcaaaacaagtcggcgtttttatgtggcgtcatgaagacataccggcagcgagaaaagcagggtagcaaggttcaggaatccactaaaggcccggatgaagccaagataaaagcgctgctcgagagaacgggttacactctggatgtcaccaccggacagcggaaatacggcggaccgccaccagattctgtgtattcaggggtgcagcccgggattggcaccgaggtttttgtgggaaagataccgcgcgacttgtatgaagacgagttggtccccttgtttgaaaaggctggacctatttgggatcttcgactaatgatggaccccttgtcagggcagaacaggggctacgctttcatcactttttgcggcaaggaggcggcccaagaggccgtgaaactatgcgactcctacgaaattcgcccaggaaaacaccttggagtttgcattagcgtcgctaataatcgcctgtttgtcgggtctattcctaagaataaaacaaaagagaatattctggaagaattttcaaaagtgacaggcctgactgaaggacttgtcgatgtcattctctatcaccagccagacgacaaaaaaaagaatcgcgggttctgctttctggaatacgaagatcacaagtccgctgcgcaggcgcggcgacggctgatgtccggaaaggtgaaggtgtggggcaacgtcgtgacagtggagtgggccgatccagtcgaggagccagaccctgaggtgatggcaaaggtaaaggtgctctttgtgcggaatctggcgactactgttacagaagagatcctagagaaatcattctccgagttcggcaagctggagcgggttaaaaagctgaaggactatgcttttgtgcatttcgaggaccggggcgccgcagtgaaagccatggatgagatgaacgggaaagagatagagggggaggaaatcgagatcgtcctggccaagcctccagacaagaagcgcaaagaacgccaggctgctagacaggcttcgcggagcaccgcctacgaagattactattaccatccccctcctcgcatgccaccacctattcggggccgcggaaggggtggtggtcgaggggggtatggctacccccccgactactacggctacgaggactactacgatgactactatggctatgactaccacgactatagagggggctacgaagacccttactacggatacgatgatggctatgccgtgagaggccgtggtggcgggcgcggaggtcgtggggcacctccacccccgcgcgggcggggcgcccctcctcctcgggggagggccggatactcgcagcgcggcgcaccactgggccctccccggggaagccgaggtgggcggggcggaccagcacagcagcagcgagggcgcggatcacgaggatcccgaggcaacagaggcggcaatgtgggcggtaagagaaaggcagatggctataatcagccagatagcaagcgaagacagactaataatcagcaaaactggggtagtcaaccaatcgcccagcagcccctgcaacagggaggcgattattcgggtaactacggctataataacgacaaccaagagttctaccaagatacctatggccagcagtggaaatag

SEQ ID NO: 336514 - DNA, 1911 bp, Artificial Sequence
  derived and/or modified sequence
atggctaaccaggttaacggaaatgccgtgcagctcaaggaggaggaggaacctatggacacatcttccgtcacacacacggagcactataagacactaattgaagcagggctgcctcagaaagtcgctgagcgactggatgaaatttttcagacaggcttggtcgcatatgtcgacctggatgagcgtgctattgacgccctgagagagtttaacgaggagggagccctctctgttctgcagcaattcaaggagtccgacttgagccatgtacagaacaaatctgccttcctatgtggagtgatgaaaacctatcgacagcgcgagaagcagggttctaaggtacaggaaagcactaaaggaccagacgaagctaagatcaaggcactgctagagcggaccgggtacacccttgacgttacaaccggccagcgtaagtatggcggaccgcctcctgatagtgtttactcaggtgtgcaacctggaatcggcactgaggtcttcgtcgggaaaattcccagggacctatacgaagatgagctggtaccattgttcgagaaggctggaccgatttgggatctgcgtctgatgatggaccccctgtcaggacagaatcgcggttatgcttttataacattttgtggaaaggaggcagcccaggaggccgtgaaattgtgcgactcgtacgaaatcaggccgggaaagcacctaggcgtgtgtataagcgtggcaaataatagactgtttgtgggttctatcccaaaaaacaaaactaaagaaaatattctggaggagttctccaaagtgaccggactcaccgagggtttagtcgacgtgatcttgtaccaccagccggacgacaagaagaagaatagggggttttgtttcctggagtacgaagaccacaagagtgccgcacaggccagaagaagacttatgtctggaaaagtgaaagtgtggggcaacgtggtgacagtggagtgggcagaccccgtggaggagccagatcccgaggtgatggccaaagtcaaagtgttatttgtgcgtaatttggccaccactgtcacggaagagattctcgaaaagtcattctctgagttcgggaaactggaaagagtgaagaaattaaaagactacgcatttgtgcactttgaggaccgcggtgccgcagtgaaggccatggatgaaatgaacggtaaggagatcgagggcgaggagatagagatcgtgttggcaaagccaccggataagaaacgcaaagaacgtcaagccgctcgacaagcctcccgctcgactgcctacgaggactattattatcaccctcccccaagaatgcctccacctatccgcggtagaggcaggggcggaggcaggggaggatatggttatccccctgattactacggctatgaggactactatgatgactactatggttacgactaccacgattacaggggcggttacgaagatccatactacggctacgatgatgggtatgccgtgcgaggtcgtggtgggggtcggggagggagaggagcaccaccacccccaagagggaggggtgccccacctccgagaggacgagctgggtactcacagcgtggagctccattagggccaccgagaggttctaggggtggacgagggggtcccgctcagcagcaaagaggcagagggtcacgcggatcccggggtaatcggggaggaaacgtcgggggtaaaagaaaggctgacggctacaaccagccggactcgaagaggaggcaaacaaacaaccagcaaaattggggctctcaacctatagcccagcaacccctgcagcagggaggggactattccggaaactatggttacaataatgataaccaggagttctatcaggatacctatggacaacaatggaagtag

SEQ ID NO: 336515 - DNA, 1911 bp, Artificial Sequence
  derived and/or modified sequence
atggccaaccaggtgaacggcaacgccgtgcagctgaaggaggaggaggagcccatggacaccagcagcgtgacccacaccgagcactacaagaccctgatcgaggccggcctgccccagaaggtggccgagagactggacgagatcttccagaccggcctggtggcctacgtggacctggacgagagagccatcgacgccctgagagagttcaacgaggagggcgccctgagcgtgctgcagcagttcaaggagagcgacctgagccacgtgcagaacaagagcgccttcctgtgcggcgtgatgaagacctacagacagagagagaagcagggcagcaaggtgcaggagagcaccaagggccccgacgaggccaagatcaaggccctgctggagagaaccggctacaccctggacgtgaccaccggccagagaaagtacggcggccccccccccgacagcgtgtacagcggcgtgcagcccggcatcggcaccgaggtgttcgtgggcaagatccccagagacctgtacgaggacgagctggtgcccctgttcgagaaggccggccccatctgggacctgagactgatgatggaccccctgagcggccagaacagaggctacgccttcatcaccttctgcggcaaggaggccgcccaggaggccgtgaagctgtgcgacagctacgagatcagacccggcaagcacctgggcgtgtgcatcagcgtggccaacaacagactgttcgtgggcagcatccccaagaacaagaccaaggagaacatcctggaggagttcagcaaggtgaccggcctgaccgagggcctggtggacgtgatcctgtaccaccagcccgacgacaagaagaagaacagaggcttctgcttcctggagtacgaggaccacaagagcgccgcccaggccagaagaagactgatgagcggcaaggtgaaggtgtggggcaacgtggtgaccgtggagtgggccgaccccgtggaggagcccgaccccgaggtgatggccaaggtgaaggtgctgttcgtgagaaacctggccaccaccgtgaccgaggagatcctggagaagagcttcagcgagttcggcaagctggagagagtgaagaagctgaaggactacgccttcgtgcacttcgaggacagaggcgccgccgtgaaggccatggacgagatgaacggcaaggagatcgagggcgaggagatcgagatcgtgctggccaagccccccgacaagaagagaaaggagagacaggccgccagacaggccagcagaagcaccgcctacgaggactactactaccaccccccccccagaatgcccccccccatcagaggcagaggcagaggcggcggcagaggcggctacggctacccccccgactactacggctacgaggactactacgacgactactacggctacgactaccacgactacagaggcggctacgaggacccctactacggctacgacgacggctacgccgtgagaggcagaggcggcggcagaggcggcagaggcgccccccccccccccagaggcagaggcgcccccccccccagaggcagagccggctacagccagagaggcgcccccctgggcccccccagaggcagcagaggcggcagaggcggccccgcccagcagcagagaggcagaggcagcagaggcagcagaggcaacagaggcggcaacgtgggcggcaagagaaaggccgacggctacaaccagcccgacagcaagagaagacagaccaacaaccagcagaactggggcagccagcccatcgcccagcagcccctgcagcagggcggcgactacagcggcaactacggctacaacaacgacaaccaggagttctaccaggacacctacggccagcagtggaagtag

SEQ ID NO: 336516 - protein, 473 aa, Artificial Sequence
  derived and/or modified sequence
MKTYRQREKQGSKVQESTKGPDEAKIKALLERTGYTLDVTTGQRKYGGPPPDSVYSGVQPGIGTECDSYEIRPGKHLGVCISVANNRLFVGSIPKNKTKENILEEFSKVTEGLVDVILYHQPDDKKKNRGFCFLEYEDHKSAAQARRRLMSGKVKVWGNVVTVEWADPVEEPDPEVMAKVKVLFVRNLATTVTEEILEKSFSEFGKLERVKKLKDYAFVHFEDRGAAVKAMDEMNGKEIEGEEIEIVLAKPPDKKRKERQAARQASRSTAYEDYYYHPPPRMPPPIRGRGRGGGRGGYGYPPDYYGYEDYYDDYYGYDYHDYRGGYEDPYYGYDDGYAVRGRGGGRGGRGAPPPPRGRGAPPPRGRAGYSQRGAPLGPPRGSRGGRGGPAQQQRGRGSRGSRGNRGGNVGGKRKADGYNQPDSKRRQTNNQQNWGSQPIAQQPLQQGGDYSGNYGYNNDNQEFYQDTYGQQWK

SEQ ID NO: 336517 - DNA, 1699 bp, Artificial Sequence
  derived and/or modified sequence
tttctagtcgttttcaaagcgcctcgcgctgattctcacgggcccggctgccggcccccgctctgccctggattggtagcttatgtcgatcttgatgaaagagcaattgatgctctcagggaatttaatgaagaaggagctctgtctgtactacagcagttcaaggaaagtgacttatcacatgttcagaacaaaagtgcatttttatgtggagttatgaagacctacaggcagagagagaaacaggggagcaaggtgcaagagtccacaaagggacctgatgaagcgaagatcaaggccttgcttgagagaactggttatactctggatgtaaccacaggacagaggaagtatggtggtcctccaccagacagtgtgtactctggcgtgcaacctggaattggaacggagtgtgacagctatgaaattcgccctggtaaacaccttggagtgtgcatttctgtggcaaacaacagactttttgttggatccattccgaagaataagactaaagaaaacattttggaagaattcagtaaagtcacagagggtttggtggacgttattctctatcatcaacccgatgacaaaaagaagaatcgggggttctgcttccttgaatatgaggatcacaagtcagcagcacaagccagacgccggctgatgagtggaaaagtaaaagtgtggggaaatgtagttacagttgaatgggctgaccctgtggaagaaccagatccagaagtcatggctaaggtaaaagttttgtttgtgagaaacttggctactacggtgacagaagaaatattggaaaagtcattttctgaatttggaaaactcgaaagagtaaagaagttgaaagattatgcatttgttcattttgaagacagaggagcagctgttaaggctatggatgaaatgaatggcaaagaaatagaaggggaagaaattgaaatagtcttagccaagccaccagacaagaaaaggaaagagcgccaagctgctagacaggcctccagaagcactgcgtatgaagattattactaccaccctcctcctcgcatgccacctccaattagaggtcggggtcgtggtggggggagaggtggatatggctaccctccagattactacggctatgaagattactatgatgattactatggttatgattatcacgactatcgtggaggctatgaagatccctactacggctatgatgatggctatgcagtaagaggaagaggaggaggaaggggagggcgaggtgctccaccaccaccaagggggaggggagcaccacctccaagaggtagagctggctattcacagaggggggcacctttgggaccaccaagaggctctaggggtggcagagggggtcctgctcaacagcagagaggccgtggttcccgtggatctcggggcaatcgtgggggcaatgtaggaggcaagagaaaggcagatgggtacaaccagcctgattccaagcgtcgtcagaccaacaaccaacagaactggggttcccaacccatcgctcagcagccgcttcagcaaggtggtgactattctggtaactatggttacaataatgacaaccaggaattttatcaggatacttatgggcaacagtggaagtagacaagtaagggcttgaaaatgatactggcaagatacgattggctctagatctacattcttc

SEQ ID NO: 336518 - DNA, 390 bp, Artificial Sequence
  derived and/or modified sequence
atgtggctgtggcaggacattcagtgctgccctgcacctccttcagctccacctagggctctggaacctggaagagctccaccccccccaggtgaagggctgggtgccggaatcccctcactctcaccaccacaaaaaaagcctcagagcgttggcatatgcgtgcgccagaagggaagacagaaagccggtctggaaaaggggaaccgcaaaaaagaactgagacaagcaaattgcccatcacttcggcctcagagaaaaggcgctgatactcgaagactgccccgagagacaagacctactaaaaaacggactgccgcagcgcagccttttctgcagttgtggaaccctgcaccacataccagcaatggaagaaccggcgatttgtag

SEQ ID NO: 336519 - DNA, 1394 bp, Artificial Sequence
  derived and/or modified sequence
ttatgggagaactgtggcccctgctgctaagtgcacaagaaaacatcgcgggaatcccttctgctttcctagaactgaagaaagaagaaataaaacaaagacagattgaacaagaaaaactggcatctatgaaaaagcaagatgaagacaaagataaaagagataaggaagaaaaagaaagcagcagagaaaaaagggagcggtctcgtagcccaagaagaaccaagagccggagtccttcccctgctccagaaaagaaggaaaaaactccagagctcccagaaccttcagtgaaagtaaaagaaccttcagtacaagaggctacttctactagtgacattctgaaagttcccaaacctgaacctataccagagcctaaagaaccttctccggaaaaaaattccaaaaaagaaaaggagaaggagaagacccgaccacgatctcggtcacgctccaaatcaagatcccggacgcggtcccgctctccttctcacactcgacctagacggcgccatagatcccgatcaagatcgtattcacctagaaggcggccaagcccaagaaggcggccatctcctcgaagaagaactccgccaagaagaatgcctcctccaccaaggcatagaaggagtagatctccagtaagacggttctcaggaattcttccgccaaaggtgaattctgcagaagaagacgttcgtcagcatccttgtctgggagtagctcatcatcctcttcatctcgttcacggtcaccaccaaagaagcctcccaagaggacatccagcccccctcggaaaactcgtaggttatctccttcagcaagtcctccaaggcgaaggcacaggccatcacctcctgcaactccaccacccaaaactcggcattcccctacaccccagcagtcaaaccgtacaagaaaaagtcgtgtttctgtgtctccagggagaacttcagtgacaaaacataaaggtactgagaaaagagaatccccttcaccagcaccgaagcctagaaaagtagagttatctgaatcggaagaagataaaggtggcaaaatggctgcagcagattctgtgcagcagagacgccaatacagacgacaaaaccagcagtcttcatctgactctggctcctcctcctcctcagaagatgaacgacccaagagatcccatgtgaagaatggtgaggttggcaggcggcggagacattccccttcccggagtgcttctccatcaccacgaaagcgccaaaaagagacttcccctcggatgcagatgggaaagcgatggcaatcgccagtgactaaaagtggtagacggaggagaagtccatccccaccacccaccagaaggcgacggtctccttctcccgcccctcctcctcgacggcgca

SEQ ID NO: 336520 - protein, 318 aa, Artificial Sequence
  derived and/or modified sequence
MGELWPLLLSAQENIAGIPSAFLELKKEEIKQRQIEQEKLASMKKQDEDKDKRDKEEKESSREKRERSRSPRRTKSRSPSPAPEKKEKTPELPEPSVKVKEPSVQEATSTSDILKVPKPEPIPEPKEPSPEKNSKKEKEKEKTRPRSRSRSKSRSRTRSRSPSHTRPRRRHRSRSRSYSPRRRPSPRRRPSPRRRTPPRRMPPPPRHRRSRSPVRRFSGILPPKVNSAEEDVRQHPCLGVAHHPLHLVHGHHQRSLPRGHPAPLGKLVGYLLQQVLQGEGTGHHLLQLHHPKLGIPLHPSSQTVQEKVVFLCLQGELQ

SEQ ID NO: 336521 - DNA, 609 bp, Artificial Sequence
  derived and/or modified sequence
atggggtgttgcggctgttcaggcgggtgtgggagcggttgcggcggctgtggtagtgggtgtgggggatgcgggtcgggttgcggcggatatggcagcgggtgcggcggatgcggaagtagttgctgtgtgcccgtgtgttgttgcaagcctgtctgctgttgtgtacccgcatgttcctgtagcagttgtggcagctgcggcggcagcaagggcgattgcgggagctgcggcggcagtaaaggcgggtgcggctcctgcggagggtccaagggagggtgcggtagctgcggcggctcgaagggtggctgcggcagttgtggcggttcaaaggggggatgcggctcctgtggcggtagtaagggcgggtgtggttcatgcggcgggagtaagggaggatgcggctcttgcggctgtagccagtgcaactgttgcaagccgtgctgttgttcctccggatgcgggagctgttgccagtcttcgtgctgtaacccttgctgctgccagagctcgtgctgcgtgcctgtatgctgtcagagcagctgttgtaagccttgttgctgtcagtcatcatgctgcgtgcccgtgtgctgccagtgtaagatttag

SEQ ID NO: 336522 - DNA, 171 bp, Artificial Sequence
  derived and/or modified sequence
atgatctactacagcaactactacggcggctacggctacggcggccttggatgtggttatggctgcgggtaccggggctacggttgcggctatggtggatacggcgggtatggtaatggatattattgcccatcctgttatggtcgttattggtcttacggcttctactag

SEQ ID NO: 336523 - DNA, 714 bp, Artificial Sequence
  derived and/or modified sequence
atgggatgctgtgggtgttccgggggttgcggctctgggtgtggcggaagaggctctggttgcgggggatgcgggagtgggtgtggaggctgcggtagtgggtgcgggggttgtggtagcggctgcgggggttgtgggggatgtgggtctggctgcgccggttgtggcggttgcgggagcggctgctgcgtccccgtatgctgttgtaaacctatgtgttgttgtgtgcccgcttgttcatgttcatcgtgtggtaaagggggatgtggttcatgcgggggaagcaagaggggctgcgtgtcatgtggggtgagcaagggcgcttgcggctcctgtggcggatctaagggtgggtgtggctcgtgcgggggatcaaaaggcggatgtggctcctgtggaggctctaagggaggatgcgggagctgcggaggtagcaaaggtgggtgcggaagttacggatgctcgcaatcctcctgctgtaagccttgctgctgcagctccggatgcgggagtagctgttgccagtctagttgctgcaagccgtattgttgccagtcatcttgttgtaagccttactgttgtcaatcaagctgttgcaaaccatgttcctgcttttctggctgtggaagttcgtgttgccaatcttcgtgctataaaccctgttgttgtcagtcctcctgttgcgtacccgtgtgttgccagtgtaagatttag

SEQ ID NO: 336524 - DNA, 435 bp, Artificial Sequence
  derived and/or modified sequence
atgaccagaatgaccagacccctgaagagccacgtgcaggtggtgcccagcaccctgatgtggcagagccaggccagaacccagcccgcccccctgtgctgcaagctgctgacccccagatggctgcccctgctgctgcccacccacccccacagccactgcctggccggccacctgttcttccccgccagatacagctgcagcagcgagtggaagcagcagctgacctgccacctgtgcgtgaccgacagcgccccccccagacacaccggcgtggtggtgagcgagcacctgagaagaaccgagaagctgttcttcaccatcctgagccccaaccagagcaagcccttcaagacctggaagatgctgaaggccaccatccccatcttcgtgtgcttcctgctgaacctggcccagaaccccagacccctgtag

SEQ ID NO: 336525 - DNA, 543 bp, Artificial Sequence
  derived and/or modified sequence
atgcagagaggccccctgagccccagccccagcgacggcctgggcgccctgggcaccacctaccccggcgtgcacagaggccagagcatggccggcctgagagtgcccgccttcaacgccggcctgagagccatcacccccagcagagccgagacccagcaccccgagaccaccagcagcggcatgcacagagagcccctgagcagcacccccatcgcccactgggagggcgcccagagccccggcgcccagagcgtgctggccatgctggtgcacagaaccgccgcctacaccctgcaggtgctggagcccaagaaggaccccggcagagagctgcccgccacccccagaagctgggcccccgccagacagcccagccccctgcacagcatcagacagaccatgcccgccaagcccagcctggtgaagagagagagaagaaaccaggccctggccagagaggccccctggttcccccagagaacccagtggaagaccagcgagggccccggcagcagcagcggcagaagaggcagaagatag

SEQ ID NO: 336526 - DNA, 591 bp, Artificial Sequence
  derived and/or modified sequence
atggccgccgccagcgtgccccccgagagcagcatcatccaccccgccagcagcgccatcaagagaaccgacggcggcagactggagctggagatcagaatcggcatcttcgcccagttctggagcgcctgcctgctgttccccagatgcagccagcccagacagcccagaagctggggccccagagtgaacgccttcgccctgtggcccgccaccagaagacccgcccacaccggcagaagagtgacccccgccagagcctgcagccacaccagcggcaccggcgccggcagaaagagaaagggcggcgagaccagcttccagagagagtggagcgagaacagaagagagaagggccagggcaagatcagaagccccgcccccgagcccgccggcggcgaggccagcagcagccccgcccccgaggagagaggccccagccactgcagccaggccaacgtgagccccgccagctgcaccctgcccggcaagaccagaatccacagcctgtgcagagagggcaacgccggcagaacccccagccagccccccctgagcggctacaagacccccaacaagagaaacctgtag

SEQ ID NO: 336527 - DNA, 591 bp, Artificial Sequence
  derived and/or modified sequence
atggctgcggcttccgttcctcctgaatcatccatcattcacccagcttctagtgccatcaaaagaacggacggcggccgtctggaactggaaatcagaattggcatattcgcccaattctggtcagcatgtctgttgttcccgcggtgttcacagccacgccagcctaggagctggggtcccagggtcaatgcttttgcgctgtggccggccacacgtcgtcctgctcacaccggccggagagtgacccccgccagagcttgttctcacacttccgggacaggtgccggccgcaaacggaagggtggagaaaccagctttcaacgagagtggtccgagaaccggcgggaaaaaggacagggtaaaataagatccccggccccagagcccgcagggggtgaggcctcaagttcacccgcccctgaagagagaggaccgtcccattgttcccaagcaaacgtttcccctgcatcatgtaccctacctggtaagaccaggattcactccctgtgccgtgagggaaacgccggcagaacccctagtcagccgccattatccggctataagacccccaacaagcgaaacctttag

SEQ ID NO: 336528 - DNA, 591 bp, Artificial Sequence
  derived and/or modified sequence
atggctgctgcctctgtgcccccagagagcagcatcatccacccagccagcagcgccatcaagaggacagatggcggccgcctggagctggagatccgcatcggcatctttgcccagttctggagcgcctgcctgctcttcccccgctgcagccagccccggcagcccaggtcctggggcccccgggtgaatgcctttgccctgtggccagccaccaggaggcctgcccacacaggccggcgggtgaccccagcccgggcctgcagccacaccagcggcaccggggccggcaggaagaggaaaggaggagagaccagcttccagcgggagtggagcgaaaatagaagagagaagggccagggcaagatccgcagccctgcccctgagcctgctggaggagaggccagcagcagccctgcccctgaggagcggggccccagccactgcagccaggccaacgtgtccccagccagctgcaccctgcccgggaagacccgcatccacagcctgtgccgggagggcaatgccggccgcacccccagccagccccccctgagcggctacaagacccccaacaagaggaacctgtag

SEQ ID NO: 336529 - DNA, 591 bp, Artificial Sequence
  derived and/or modified sequence
atggccgccgccagcgtgccccccgagagcagcatcatccaccccgccagcagcgctatcaagcgcacagacggcgggagactcgaattagagatacgcatcggtatattcgcacagttttggtctgcctgcctcctgtttccacggtgctcacaaccccgtcagcctaggtcatggggaccgagggtaaatgcgtttgccctgtggcctgcaacccgacgccccgcccacactggcagaagggtgacccctgcccgcgcttgttcgcatacatcaggaacgggggcgggtcggaaacgtaagggcggcgaaacatcatttcagagggagtggtcagagaatagaagagaaaaaggacagggaaagattcggagtcctgcgccagagcctgctggcggagaggcaagttcatcccccgctcccgaggaacgaggacccagccactgtagccaggcaaacgtgagccctgcttcctgtaccctgcccggaaaaacccgcatccactccctctgccgggagggtaacgctggacgtacaccctcccaacctcctctgagtggatacaagactccaaacaagagaaatctgtag

SEQ ID NO: 336530 - DNA, 156 bp, Artificial Sequence
  derived and/or modified sequence
ttgaagccgggtttttttctgagcttttttatctccatgacttacctgtttagtttcttctttttcggtaagtcttttagatctcttcttggggaggggtttagtttatgtctcagcttgtctctgacacatacccacacccacacgcacagttag

SEQ ID NO: 336531 - DNA, 591 bp, Artificial Sequence
  derived and/or modified sequence
atggccgctgcttcggttccacccgaaagctcaattatccaccctgcatcaagcgcgataaagaggaccgatggtggtaggctagagcttgaaattcggatagggatttttgcccagttctggtccgcatgcctactgttccctcgctgtagtcagccgaggcagcccaggagctggggcccaagggtcaatgcatttgccctgtggccggctacaagaagacctgcacacactggtcggagagtgaccccagccagagcctgcagccacaccagcggaactggggctggtagaaaacggaagggtggagagacgtcatttcagagagagtggagcgaaaatcggagggaaaaaggacaaggaaagattcggtcacctgctcctgagcctgctggtggcgaggcaagttccagccccgcaccggaggaacgcggtcccagccactgctcccaggcaaatgttagtcccgctagctgcactctcccagggaagaccagaatccactctctgtgccgggaaggtaatgcgggtcggactcccagccaaccaccactgtcgggctacaagacccccaataaaagaaatctgtag

SEQ ID NO: 336532 - DNA, 1357 bp, Artificial Sequence
  derived and/or modified sequence
acctggcgctggggctccggtccgcagtggctccggcaggagggagagaacgaggagggaggcttggaaacgccgggagtagcggtgaggccgacgccggggaagcgaatcgatactgcgttactggacgcccgtgggcctcatgaggatggtcgattccctcattcgttattcacgatttattagggatggcggccgcgtctgtccctccagagagctcgattatccatccggccagcagcgccattaagcgcactgacggtgggaggctcgagttagaaattaggataggaatcttcgcccagttttggagcgcctgcctcctcttccctcgttgctcgcagccaaggcagccgcgaagctgggggcctcgggtgaatgctttcgccctctggccggcgaccaggagacctgcgcacactggccgccgagtgaccccagctcgagcctgcagccacaccagcgggacgggggcggggaggaagaggaagggcggagagacttccttccagagggagtggtccgagaaccggcgggagaagggccaagggaagatccggtcacctgctccggagcctgcaggcggagaggcgagtagttcaccggccccggaggaaaggggaccctcccactgttcccaggcaaatgtgtcgccggcatcctgcactctgccggggaagacgcgcatccactcgctctgcagggaggggaacgcgggaaggactcccagtcagccgcccctctctggctacaagaccccgaacaagagaaacctgtaacaggggctctgcggagatctggatcccacccaccaaccacatgggcacctggggggctgcccctcggggcattatcagccagtgggaagggggttgacgttcctctgcggcccatgaatcctggagggctgcccgaggggccaccggggtccatccacttattcttcggttgttaagcgccagacaggagagaaccgctagagaggagtgtgctaagaccctattacccactaaaactccattttcatcttttgcgtcctggatgactagtctccacattcctggcctttctggtttctcaggagaaccttctgacccaactcttcccacatcgaaagagtttcctagtcttttgttctactactagccgacatagaaagcacctgtcatgtgccagtgtcaaatactgcgctaggaactgggaactcaaggcacaggagcctggcttttgcgcagggcgctcacaggccggtgggtgcaaaccctgaaggacacacagcctgtccctttagcgcccatcgcttctggtgtgagctcccgctaagggtgggtgagtactggggtgggcttccagaaga

SEQ ID NO: 336533 - DNA, 957 bp, Artificial Sequence
  derived and/or modified sequence
atgggagagctttggcccctcctgctttcggcgcaggagaacatcgccggtatcccatcagcctttctggagcttaagaaggaagaaatcaaacaacggcaaatcgagcaggagaaattggctagcatgaagaagcaggacgaggataaagacaagcgggacaaggaagaaaaagaaagttcccgggagaaacgagaacgatccaggtctcccaggaggacaaagagcagaagccctagccctgcacctgaaaagaaggagaagaccccagagctgccagagccgtcggtcaaagtcaaagaaccaagcgtccaggaggccacctctacttccgacatcctgaaagtgccgaaacctgaacctattccagaaccaaaggagcctagtcctgagaaaaactccaaaaaagagaaggagaaagagaaaacaagacctcgcagtagatctaggagcaaatccaggagcagaacaagatctcggtctccgtctcatactcgccctcggaggcgccaccggtctagaagtcgttcctacagccccagacgccggccttctcccaggaggagacccagtccacgccggcgtacccccccacgccggatgcctccgccaccgcgccatcgcagatccagaagccccgttcggagattttcgggaattctgcctcccaaggtcaatagcgcggaggaggacgtccgtcagcatccatgtctgggggtggcccaccaccccttgcatctggtccacgggcatcaccaacgttctctccccagaggccacccagctccactggggaaattagttggctatttgctgcagcaagtacttcagggagagggcactggccaccatctgttgcaacttcaccatccaaaactgggcatccccttacacccttcctcacaaacagtgcaggagaaggtggtctttctgtgcctgcagggggagctccaatag

SEQ ID NO: 336534 - DNA, 957 bp, Artificial Sequence
  derived and/or modified sequence
atgggagagctgtggcccctgctgctgagcgcccaggagaacattgctggcatccccagcgccttcctggagctgaagaaggaggagatcaagcagaggcagatcgagcaggagaagctggcctccatgaagaagcaggatgaggacaaggacaagagggacaaggaggagaaggagagcagccgggagaagcgggagaggagccgcagccccaggaggaccaagagccgcagccccagccctgcccctgagaagaaggagaagaccccagagctgcctgagcccagcgtgaaggtgaaggagcccagcgtgcaggaggccaccagcaccagtgacatcctgaaggtgcccaagccagagcccatccctgagcccaaggagcccagccctgagaagaacagcaagaaggagaaggagaaggagaagacccggcccaggagccgcagccgcagcaagagccgcagcaggaccaggagccgcagccccagccacacccggcccaggagaagacacaggagccgcagccgcagctacagcccccggcggcggcccagcccccggcggcggcccagccccaggaggaggaccccacccaggaggatgcctcctccacccaggcaccggcgcagccgcagccctgtgcggcgcttcagcggcatcctgccccccaaggtgaacagcgctgaggaggatgtgcggcagcacccctgcctgggcgtggcccaccaccccctgcacctggtgcacggccaccaccagaggagcctgccccggggccacccagcccccctgggcaagctggtgggctacctgctgcagcaggtgctgcagggcgagggcaccggccaccacctgctgcagctgcaccaccccaagctgggcatccccctgcaccccagcagccagacagtgcaggagaaggtggtgttcctgtgcctgcagggcgagctgcagtag

SEQ ID NO: 336535 - DNA, 957 bp, Artificial Sequence
  derived and/or modified sequence
atgggtgaattatggccactgctgctgagcgcacaggagaatattgcaggtatcccatcggcatttctcgagctcaaaaaggaggaaatcaagcagcgccaaatagagcaggagaagctcgccagcatgaagaagcaggacgaggacaaggacaagagggacaaggaggagaaggagtcctctcgcgaaaagcgggagaggagcagaagtcctcgcaggacgaagtcccgtagcccctcacctgctccagagaaaaaagagaaaacccctgagctgcccgagcctagcgttaaggttaaagaaccatccgttcaggaggccacatcaacttcagacatactgaaagttcctaagcctgagccaattccagaacctaaggagccgtcgccagaaaaaaattcaaagaaggaaaaggagaaggaaaaaactcggcctcgtagcagaagtcggagtaagtctcgtagtagaaccagaagccgcagtccgagtcacacaaggcccagacgacgacatagaagcaggtcacgcagttattctccccgaaggcgcccttcccctaggaggagacccagcccacgacggcgaacccctcctaggcgcatgcctccgccacccagacaccgacgatctcgaagccccgtgcggaggttctcggggattctgccgcctaaggttaactctgctgaagaggacgtgcgccagcacccctgccttggcgttgcccaccatcccctgcatctggtccatgggcatcatcagcgtagtcttccacgaggacaccctgcacctttgggcaaactcgttgggtatttattacaacaggtgctccagggggaaggaacaggacatcatctgctgcagttgcatcatcccaagttaggtattcccctccacccatcttcacagacagtacaggagaaggtcgtgtttttgtgtcttcagggagaacttcagtag

SEQ ID NO: 336536 - DNA, 957 bp, Artificial Sequence
  derived and/or modified sequence
atgggcgagctgtggcccctgctgctgagcgcccaggagaacatcgccggcatccccagcgccttcctggagctgaagaaggaggagatcaagcagagacagatcgagcaggagaagctggccagcatgaagaagcaggacgaggacaaggacaagagagacaaggaggagaaggagagcagcagagagaagagagagagaagcagaagccccagaagaaccaagagcagaagccccagccccgcccccgagaagaaggagaagacccccgagctgcccgagcccagcgtgaaggtgaaggagcccagcgtgcaggaggccaccagcaccagcgacatcctgaaggtgcccaagcccgagcccatccccgagcccaaggagcccagccccgagaagaacagcaagaaggagaaggagaaggagaagaccagacccagaagcagaagcagaagcaagagcagaagcagaaccagaagcagaagccccagccacaccagacccagaagaagacacagaagcagaagcagaagctacagccccagaagaagacccagccccagaagaagacccagccccagaagaagaaccccccccagaagaatgccccccccccccagacacagaagaagcagaagccccgtgagaagattcagcggcatcctgccccccaaggtgaacagcgccgaggaggacgtgagacagcacccctgcctgggcgtggcccaccaccccctgcacctggtgcacggccaccaccagagaagcctgcccagaggccaccccgcccccctgggcaagctggtgggctacctgctgcagcaggtgctgcagggcgagggcaccggccaccacctgctgcagctgcaccaccccaagctgggcatccccctgcaccccagcagccagaccgtgcaggagaaggtggtgttcctgtgcctgcagggcgagctgcagtag

SEQ ID NO: 336537 - DNA, 303 bp, Artificial Sequence
  derived and/or modified sequence
atggaggagctgagcgccgacgagatcagaagaagaagactggccagactggccggcggccagaccagccagcccaccacccccctgaccagcccccagagagagaacccccccggcccccccatcgccgccagcgcccccggccccagccagagcctgggcctgaacgtgcacaacatgacccccgccaccagccccatcggcgccagcggcctgggcatcatcagcgacgacaagatgatcaagaccgagttcggcagcgccgacttcatgaacctggtggacggcttcaagatcaagtag

SEQ ID NO: 336538 - DNA, 303 bp, Artificial Sequence
  derived and/or modified sequence
atggaagaactttccgccgacgagattagaaggcggagactcgcacgcctcgcaggtgggcagacgtctcagcccactacccccctcactagcccacaacgcgagaacccaccaggcccaccaatcgccgccagcgcgcccgggcctagccaaagcctaggactaaacgtacacaatatgacgcccgctacaagtccgataggcgcctcaggactgggtatcataagtgacgacaaaatgatcaaaaccgaattcggctctgcagatttcatgaacctcgtcgatggctttaaaataaaatag

SEQ ID NO: 336539 - DNA, 303 bp, Artificial Sequence
  derived and/or modified sequence
atggaggagctgtctgcagatgagatcagaagaagaaggctggcccggctggccggcggccagaccagccagcccaccacccccctgaccagcccccagagagaaaatcctcctggcccccccatcgccgccagcgcccctggccccagccagagcctgggcctgaatgtgcacaacatgaccccagccaccagccccatcggggccagcggcctgggcatcatcagtgatgacaagatgatcaagacagaatttggatctgctgacttcatgaacctggtggatggcttcaagatcaagtag

SEQ ID NO: 336540 - DNA, 303 bp, Artificial Sequence
  derived and/or modified sequence
atggaggagctgagcgccgacgagatccggcggcggcggctggcccgtcttgctggcggccagactagtcagcctaccactcccctgacctctccacaacgggaaaacccccctggtcctccgatcgctgcatccgcacccgggccctcgcagagtctcgggttaaacgtgcataacatgactccggcgacgtcccctatcggcgccagtggactggggataattagtgacgacaagatgataaaaacagagttcggttcagccgatttcatgaatctcgttgatggcttcaagatcaagtag

SEQ ID NO: 336541 - DNA, 303 bp, Artificial Sequence
  derived and/or modified sequence
atggaagaactgagtgctgacgagataaggcgaaggcgactagcacgtctggcgggaggacagacctcccagcctactacaccccttaccagtcctcaacgggagaatccaccaggcccacccattgccgctagtgcccctgggcctagccagagtctgggcctcaacgtgcataatatgactcctgctactagtcctatcggggcttccggcctcggcatcatttcagatgataagatgatcaaaactgaatttggaagcgccgactttatgaaccttgttgacggctttaagatcaaatag

SEQ ID NO: 336542 - DNA, 1273 bp, Artificial Sequence
  derived and/or modified sequence
taggaacgcagctaccgcgccactatcacgaagaaacagcaggctcggggcacgagacgaactggagaccgcgctgcctagctgggtaacctgggaagcagagggtaataagtggcgccttaagacaaccctgtagcagcagcagtggcggccaaaggaggctgctcagggaacaagcggctgtagtagtctgtggggcgactggagtgaccgaagccaaggcagtttagtgcctctcgtgttcttattttttaacctctgactatgcaattctgaaacctcccccattcgggggaccagacagcctgatagacaccttccactctccttcctcccgccgtggtctcgagaacagaaggatctctccttaacgcctttcaccattaagaggaaagcgatggaggagctgagcgctgatgagattcgacggaggcgccttgcacgacttgctggtggacagacctctcagccaaccaccccactcacctctccccagagggagaaccctccggggcctcccatagcggcatcagccccaggaccctctcagagtcttggtctcaatgtccacaacatgaccccagctacctccccaataggtgcatcaggtttaggtattatctctgatgacaagatgattaagactgaatttggttctgctgattttatgaatttggttgatggttttaagataaaataatctgaaaatgcaagattaaaataatggtcaaaatgaacacctctaattgcagatttcctcgtcttcattctgcattggcacagaactttttctttaacttttcagaggataaaactacctgataggatgtttagaactatctcattaaaaagtaaaagtttatttctttataataaatgagctgatgcttgatatccaggactgtctttgttgggaaatgatatttctcatactgtgtatttgaaaatatctctcttttgtctgtgaacttttctatcaaatatagtattattgtcatataataataattactattttataattaggattctagttgcgtaaagggggtgctaagagaactgcattgatcataatatcatctaataatttgatagccttctgaatcatctgtcttcttgatctagaatcgtgtcaattaaaagtatttgcagagtttttgttgctgtacttctcgttaggtatcagtgtagactatagatatatataaatgtttatacctaatgtggttcaaccaaaacatctgttagtaataaagaagatccttgcctataa

SEQ ID NO: 336543 - DNA, 1508 bp, Artificial Sequence
  derived and/or modified sequence
cttgccgccacctccagttctgggagcggagcgccgccgctgttgccgggcaacgcgaaagacagcaagaagcgagtattttccggcattcaacctacaggaatcctccacctgggcaattacctgggagccattgagagctgggtgaggttacaggatgaatatgactctgtattatacagcattgttgacctccactccattactgtcccccaagacccagctgtccttcggcagagcatcctggacatgactgctgttcttcttgcctgtggcataaacccggaaaaaagcatccttttccaacaatctcaggtgtctgaacacacacaattaagttggatcctttcctgcatggtcagactacctcgattacaacatttacatcagtggaaggcaaagactaccaagcagaagcacgatggcacggtgggcctgctcacatacccagtactccaggcagccgacattctgttgtacaagtccacacacgttcctgttggggaggatcaagtccagcacatggaactagttcaggatctagcacaaggtttcaacaagaagtatggggagttctttccagtgcccgagtccattctcacatccatgaagaaggtaaaatccctacgtgatccttctgccaaaatgtcgaaatcagaccctgacaaactggccaccgtccgaataacagacagcccagaggagatagtgcagaaattccgcaaggctgtgacagacttcacctcggaggtcacctatgacccggctggccgcgctggcgtgtccaacatagtggcggtgcatgccgcggtgacggggctctccgtggaggaagtggtgcgccgcagcgcgggcatgaacactgctcgctacaagctggccgtggcagatgctgtgattgagaagtttgccccaattaagcgtgaaattgaaaaactgaagctggacaaggaccatttagagaaggttttacaaattggatcagcaaaagccaaagaattagcatacactgtgtgccaggaggtgaagaaattggtgggttttctataggaagtttcaacgaatcacagcaaggcttttgtgccttgcactccatgcattctgataacggcagctttcctaaaaagaaaaagttatagttttgggacatttaatttggtatagctgattattggctttatttgatgaatattgctttgtagctttgaaatacgacagtgttccaaatcccatcaacaaaatgctgtgaacaacaacaacaaaaaataaatcaagaaggcatagctgtctgaatccccaattattgaggcacactccttggcctgcagaaatgtgattgaagtaaggagtaatttgggaaatggagtatcatttgtgcttctctctggagtacttactgtaacagatgcacacgttatctacttcaacccttttataaagcaatatatagaggtcttagatgtataatccttgagatgccatttgatcagatgccaatttgtattcag

SEQ ID NO: 336544 - protein, 251 aa, Artificial Sequence [sequence omitted]

SEQ ID NO: 336545 - protein, 211 aa, Artificial Sequence
  derived and/or modified sequence
MTTLTRQDLNFGQVVADVLCEFLEVAVHLILYVREVYPVGIFQKRKKYNVPVQMSCHPELNQYIQDTLHCVKPLLEKNDVEKVVVVILDKEHRPVEKFVFEITQPPLLSISSDSLLSHVEQLLRAFILKISVCDAVLDHNPPGCTFTVLVHTREAATRNMEKIQVIKDFPWILADEQDVHMHDPRLIPLKTMTSDILKMQLYVEERAHKGS

SEQ ID NO: 336546 - protein, 105 aa, Artificial Sequence
  derived and/or modified sequence
MTTLTRQDLNFGQVVADVLCEFLEVAVHLILYVREVYPVGIFQKRKKYNVPVQMSCHPELNQYIQDTLHCVKPLLEKVRVHWAPQPSHPMLTPVPVCSQSNSGMG

SEQ ID NO: 336547 - protein, 176 aa, Artificial Sequence
  derived and/or modified sequence
MTTLTRQDLNFGQVVADVLCEFLEVAVHLILYVREVYPVGIFQKRKKYNVPVQNDVEKVVVVILDKEHRPVEKFVFEITQPPLLSISSDSLLSHVEQLLRAFILKISVCDAVLDHNPPGVSTPHPLFPWHFHGYLGLVCVPRSMFGCSETHLFLTLRVHLLWEASLIDSTWLPSPY

SEQ ID NO: 336548 - protein, 224 aa, Artificial Sequence
  derived and/or modified sequence
MTTLTRQDLNFGQVVADVLCEFLEVAVHLILYVREVYPVGIFQKRKKYNVPVQMSCHPELNQYIQDTLHCVKPLLEKNDVEKVVVVILDKEHRPVEKFVFEITQPPLLSIRWAAPAPRPLAGISSDSLLSHVEQLLRAFILKISVCDAVLDHNPPGCTFTVLVHTREAATRNMEKIQVIKDFPWILADEQDVHMHDPRLIPLKTMTSDILKMQLYVEERAHKGS

SEQ ID NO: 336549 - protein, 198 aa, Artificial Sequence [sequence omitted]

SEQ ID NO: 336550 - protein, 167 aa, Artificial Sequence
  derived and/or modified sequence
MTTLTRQDLNFGQVVADVLCEFLEVAVHLILYVREVYPVGIFQKRKKYNVPVQMSCHPELNQYIQDTLHCVKPLLEKNDVEKVVVVILDKEHRPVEKFVFEITQPPLLSISSDSLLSHVEQLLRAFILKISVCDAVLDHNPPGCTFTVLVHTREAATRNMEKIQVIK

SEQ ID NO: 336551 - DNA, 636 bp, Artificial Sequence
  derived and/or modified sequence
atgaccaccctgaccagacaggacctgaacttcggccaggtggtggccgacgtgctgtgcgagttcctggaggtggccgtgcacctgatcctgtacgtgagagaggtgtaccccgtgggcatcttccagaagagaaagaagtacaacgtgcccgtgcagatgagctgccaccccgagctgaaccagtacatccaggacaccctgcactgcgtgaagcccctgctggagaagaacgacgtggagaaggtggtggtggtgatcctggacaaggagcacagacccgtggagaagttcgtgttcgagatcacccagccccccctgctgagcatcagcagcgacagcctgctgagccacgtggagcagctgctgagagccttcatcctgaagatcagcgtgtgcgacgccgtgctggaccacaacccccccggctgcaccttcaccgtgctggtgcacaccagagaggccgccaccagaaacatggagaagatccaggtgatcaaggacttcccctggatcctggccgacgagcaggacgtgcacatgcacgaccccagactgatccccctgaagaccatgaccagcgacatcctgaagatgcagctgtacgtggaggagagagcccacaagggcagctag

SEQ ID NO: 336552 - DNA, 318 bp, Artificial Sequence
  derived and/or modified sequence
atgaccaccctgaccagacaggacctgaacttcggccaggtggtggccgacgtgctgtgcgagttcctggaggtggccgtgcacctgatcctgtacgtgagagaggtgtaccccgtgggcatcttccagaagagaaagaagtacaacgtgcccgtgcagatgagctgccaccccgagctgaaccagtacatccaggacaccctgcactgcgtgaagcccctgctggagaaggtgagagtgcactgggccccccagcccagccaccccatgctgacccccgtgcccgtgtgcagccagagcaacagcggcatgggctag

SEQ ID NO: 336553 - DNA, 531 bp, Artificial Sequence
  derived and/or modified sequence
atgaccaccctgaccagacaggacctgaacttcggccaggtggtggccgacgtgctgtgcgagttcctggaggtggccgtgcacctgatcctgtacgtgagagaggtgtaccccgtgggcatcttccagaagagaaagaagtacaacgtgcccgtgcagaacgacgtggagaaggtggtggtggtgatcctggacaaggagcacagacccgtggagaagttcgtgttcgagatcacccagccccccctgctgagcatcagcagcgacagcctgctgagccacgtggagcagctgctgagagccttcatcctgaagatcagcgtgtgcgacgccgtgctggaccacaacccccccggcgtgagcaccccccaccccctgttcccctggcacttccacggctacctgggcctggtgtgcgtgcccagaagcatgttcggctgcagcgagacccacctgttcctgaccctgagagtgcacctgctgtgggaggccagcctgatcgacagcacctggctgcccagcccctactag

SEQ ID NO: 336554 - DNA, 675 bp, Artificial Sequence
  derived and/or modified sequence
atgaccaccctgaccagacaggacctgaacttcggccaggtggtggccgacgtgctgtgcgagttcctggaggtggccgtgcacctgatcctgtacgtgagagaggtgtaccccgtgggcatcttccagaagagaaagaagtacaacgtgcccgtgcagatgagctgccaccccgagctgaaccagtacatccaggacaccctgcactgcgtgaagcccctgctggagaagaacgacgtggagaaggtggtggtggtgatcctggacaaggagcacagacccgtggagaagttcgtgttcgagatcacccagccccccctgctgagcatcagatgggccgcccccgcccccagacccctggccggcatcagcagcgacagcctgctgagccacgtggagcagctgctgagagccttcatcctgaagatcagcgtgtgcgacgccgtgctggaccacaacccccccggctgcaccttcaccgtgctggtgcacaccagagaggccgccaccagaaacatggagaagatccaggtgatcaaggacttcccctggatcctggccgacgagcaggacgtgcacatgcacgaccccagactgatccccctgaagaccatgaccagcgacatcctgaagatgcagctgtacgtggaggagagagcccacaagggcagctag

SEQ ID NO: 336555 - DNA, 597 bp, Artificial Sequence
  derived and/or modified sequence
atgaccaccctgaccagacaggacctgaacttcggccagggcagagaggccggccccgccggccccggcgccggcgccagcggccccgccggcttcctggagagagccaccggcctgtgcccccccgccgtggtggccgacgtgctgtgcgagttcctggaggtggccgtgcacctgatcctgtacgtgagagaggtgtaccccgtgggcatcttccagaagagaaagaagtacaacgtgcccgtgcagatgagctgccaccccgagctgaaccagtacatccaggacaccctgcactgcgtgaagcccctgctggagaagaacgacgtggagaaggtggtggtggtgatcctggacaaggagcacagacccgtggagaagttcgtgttcgagatcacccagccccccctgctgagcatcagcagcgacagcctgctgagccacgtggagcagctgctgagagccttcatcctgaagatcagcgtgtgcgacgccgtgctggaccacaacccccccggctgcaccttcaccgtgctggtgcacaccagagaggccgccaccagaaacatggagaagatccaggtgatcaaggtgtag

SEQ ID NO: 336556 - DNA, 504 bp, Artificial Sequence
  derived and/or modified sequence
atgaccaccctgaccagacaggacctgaacttcggccaggtggtggccgacgtgctgtgcgagttcctggaggtggccgtgcacctgatcctgtacgtgagagaggtgtaccccgtgggcatcttccagaagagaaagaagtacaacgtgcccgtgcagatgagctgccaccccgagctgaaccagtacatccaggacaccctgcactgcgtgaagcccctgctggagaagaacgacgtggagaaggtggtggtggtgatcctggacaaggagcacagacccgtggagaagttcgtgttcgagatcacccagccccccctgctgagcatcagcagcgacagcctgctgagccacgtggagcagctgctgagagccttcatcctgaagatcagcgtgtgcgacgccgtgctggaccacaacccccccggctgcaccttcaccgtgctggtgcacaccagagaggccgccaccagaaacatggagaagatccaggtgatcaagtag

SEQ ID NO: 336557 - DNA, 636 bp, Artificial Sequence
  derived and/or modified sequence
atgaccacattaacacggcaggacctgaactttgggcaagtagtggccgacgtcctgtgtgaattcctggaagtggcagtgcacctgattctgtacgttcgcgaagtttacccggttggaatcttccaaaagcggaagaagtataatgttcctgtccagatgtcttgccatcccgaactcaatcagtatatacaagacactctccactgcgtcaagcctctcctggagaaaaacgacgtagagaaggtggttgtggtgattcttgacaaggagcatagacctgtagagaaattcgtgtttgagatcacccagcctcccctgttatctattagctccgacagcctgctgtcccatgtggagcaactcttgagggccttcatccttaaaatctctgtttgtgatgctgtgctagatcacaacccacccggttgtacattcacagttctggtccacaccagagaagccgccacccggaacatggagaaaatccaggttattaaagactttccttggatcttggccgatgagcaggatgtgcacatgcatgacccgcggctgatacccctcaagactatgaccagtgatatcttgaagatgcagctgtacgtcgaggaacgggctcataagggctcttag

SEQ ID NO: 336558 - DNA, 318 bp, Artificial Sequence
  derived and/or modified sequence
atgactacgctgaccaggcaggacctgaattttgggcaggtcgttgccgacgtactgtgtgaatttctggaggttgctgtgcatcttattctttacgtcagggaggtctatccagtgggaattttccagaagcgcaagaagtataacgtcccagtccagatgagctgtcatcctgagcttaaccagtacatccaggacacgctgcactgcgtgaagcctttgttagagaaggttcgcgtccattgggctccgcaacctagtcaccccatgctaaccccggtccctgtatgcagccagagcaactccgggatgggatag

SEQ ID NO: 336559 - DNA, 531 bp, Artificial Sequence
  derived and/or modified sequence
atgacaacccttacaaggcaggaccttaatttcggacaggttgtggctgatgtcctgtgcgagtttctagaagtagccgtgcaccttattctgtacgtccgcgaggtataccctgtggggatatttcagaagcggaaaaagtacaatgtgcctgttcagaacgatgtcgaaaaggtcgtagtcgtcatactagacaaggaacacagacctgtcgagaaattcgtattcgaaatcacacagcctccactgctttcaatcagctcagatagccttcttagccatgtagagcagctgcttagagctttcatactgaaaatttccgtgtgtgatgcagtcctggatcacaacccccctggtgtgagcaccccacaccccctcttcccctggcacttccatgggtatctgggcttagtgtgcgttccacgcagcatgttcggctgttcagaaactcacctgtttctgacactccgggtgcatctcctgtgggaagcatccctgatcgatagcacatggctcccttctccctactag

SEQ ID NO: 336560 - DNA, 636 bp, Artificial Sequence
  derived and/or modified sequence
atgactactctaactcggcaggatcttaatttcggccaggtggtcgccgacgtcttgtgtgaattccttgaagtagcagtacacctgatactgtatgtgcgtgaggtctaccctgtcgggattttccagaaacgcaagaagtataatgtgcccgtacaaatgtcatgccaccctgagctgaatcagtatatacaggacacactccattgtgtgaaaccccttctggagaaaaacgatgtggagaaagtggtggttgtgattctagataaggagcaccgccccgtggagaaatttgtgttcgaaattacccagccgcctctgctgtccataagcagcgactccctcctatcacacgtggaacagctacttagagctttcattctcaagattagtgtttgcgacgcagtactagatcacaatcctcccggctgcacctttacagtcttagtccatacccgggaggctgccacaagaaatatggagaagatccaggtcattaaggatttcccatggatactggccgacgagcaggatgtgcacatgcatgatcctaggttgattcccctcaagacgatgaccagcgacatcctgaagatgcagctgtacgtcgaagaacgggcgcacaagggctcttag

SEQ ID NO: 336561 - DNA, 675 bp, Artificial Sequence
  derived and/or modified sequence
atgacgacactcacacgccaggatctgaattttgggcaggtggtcgcggatgttttatgcgaatttctggaagtggccgtgcacctaatcctgtacgtcagagaagtgtaccccgtggggattttccagaagcgcaagaagtacaatgtgcccgtacaaatgagctgtcacccagaactgaatcaatatatccaagatactctgcactgcgtgaagcctctcctggagaaaaatgatgtagaaaaagtggtcgtggtaatcctggataaggagcacagaccggttgagaagttcgtcttcgagattacccagccgccgctgttgtccatacgatgggcagcccctgcacctcgtccgcttgcggggataagctcagacagcctcctaagccacgttgagcaactgctgagagcattcatcctgaaaatcagtgtctgtgatgccgtcctggaccataatccaccaggatgcaccttcacagtactggttcacacgcgcgaggccgccacacggaatatggagaaaattcaggtgattaaagatttcccgtggatcctcgccgatgagcaggacgttcatatgcacgatcctcggttgatacccctcaagacaatgacctctgacatcctaaaaatgcagttgtacgtggaggagagggcccataaagggtcctag

SEQ ID NO: 336562 - DNA, 675 bp, Artificial Sequence
  derived and/or modified sequence
atgaccaccctcaccaggcaggaccttaactttgggcaggtggttgcagacgtgctatgcgagttcctggaagtggctgtccacctgatcctctacgtgagggaggtgtaccccgttggcatctttcagaaacgcaagaagtacaacgtgccggtgcagatgtcatgtcaccctgagctgaatcagtatatccaggacaccttacactgtgtgaagcccctactggaaaagaatgacgtcgaaaaggtggtggtcgtgatactagacaaagaacatcgcccggttgagaaatttgtctttgagataactcagcctccactgctcagcatcaggtgggcagcccctgccccaaggcccctcgctggcatatcctcagattcgctgctctcacacgtcgagcagctgcttagggcctttattctgaaaatctccgtgtgcgatgcagtactggatcacaatccaccgggctgcacatttaccgtcctggtccacactcgggaggccgccactagaaacatggaaaagatccaggtcataaaggacttcccctggatactggcagacgagcaggacgtgcacatgcatgacccacggctaattccactgaaaacaatgacaagcgacattcttaagatgcagctgtacgtggaggagcgggcacacaagggaagttag

SEQ ID NO: 336563 - DNA, 636 bp, Artificial Sequence
  derived and/or modified sequence
atgacaacgctgacccgtcaggacctgaacttcgggcaggttgtcgctgacgtgttgtgtgagtttctggaggtggcagtccacttgattctgtatgtaagagaagtgtatccagtcgggattttccaaaagcgaaagaagtacaacgtcccagtacaaatgagctgccaccccgaactaaatcagtacattcaggacacactccattgcgtgaagcctctgctggagaagaacgatgtagaaaaagttgtcgtagtcattctcgacaaagagcaccggccagtggagaaatttgtgtttgaaatcactcagccccctcttttaagcatctcttccgattctctgctctcccacgtggaacaactactgcgggcctttatccttaagatttctgtgtgcgacgcggtactcgatcacaatccaccgggttgcacctttactgtactcgtgcataccagagaagctgctacccgcaacatggagaagatccaggtaatcaaagattttccttggatccttgctgacgaacaagatgtccacatgcatgaccctcgattaatcccgcttaaaaccatgacttccgacatcctgaagatgcaactgtatgtcgaggaacgcgcccacaagggtagttag

SEQ ID NO: 336564 - DNA, 597 bp, Artificial Sequence
  derived and/or modified sequence
atgaccaccctgacaagacaagatttaaatttcggtcaagggcgcgaagccggtcctgccggcccaggggccggggctagcggaccagccggcttcttagagcgcgcaaccgggctgtgtccccccgccgtggtggccgacgtactctgtgaatttctggaggtagccgtgcacttgatcctatacgttcgagaagtgtatcccgtgggtatttttcagaaacggaaaaagtataatgtgcccgtccaaatgtcttgtcatccagaactgaaccaatatatccaagatacactgcactgcgtcaagcccctccttgagaagaacgacgtcgagaaggtggtggttgtgattctggacaaagaacaccgtcctgttgagaagttcgtctttgaaatcacccagccacccctgttgtcaattagctctgactcactgctgtctcacgtggagcagcttctgcgagcctttattctcaagatctccgtttgtgatgccgtcctggaccacaatcctcccggctgcacgttcaccgtgcttgttcacacaagagaggccgctacgcgcaacatggagaaaatccaggtaatcaaagtttag

SEQ ID NO: 336565 - DNA, 504 bp, Artificial Sequence
  derived and/or modified sequence
atgacaacattaacccgtcaagatctgaacttcggccaggtggtggctgatgtgttatgcgaatttctggaggtcgctgtccacctgattttatatgtcagagaggtatatcccgtggggatattccagaagagaaagaagtacaacgtgccagtgcaaatgtcctgccatcctgaacttaaccagtatattcaggatactctgcactgcgtgaagccgctgttagagaagaacgatgtggagaaagtcgtggttgtgattttggataaggaacatcgacccgtcgaaaagttcgtgttcgagatcacacagccacccctactcagcatttcaagtgattccctgttatcacatgtggaacagctgcttcgtgcattcatcctgaaaatttcagtgtgcgatgctgttctggatcataacccacctggttgcacttttactgtgctggtacatactagggaggccgccacaaggaacatggagaagatacaggtaatcaaatag

SEQ ID NO: 336566 - DNA, 636 bp, Artificial Sequence
  derived and/or modified sequence
atgaccaccctgacccggcaggacctgaactttggccaggtggtggctgatgtgctgtgtgagttcctggaggtggccgtgcacctgatcctgtatgtgcgggaggtgtaccctgtgggcatcttccagaagaggaagaagtacaacgtgcctgtgcagatgagctgccaccctgagctgaaccagtacatccaggacaccctgcactgtgtgaagcccctgctggagaagaatgatgtggagaaggtggtggtggtgatcctggacaaggagcacaggcctgtggagaagtttgtgtttgagatcacccagccccccctgctgagcatcagcagtgacagcctgctgagccacgtggagcagctgctgcgggccttcatcctgaagatctctgtgtgtgatgctgtgctggaccacaaccccccaggctgcaccttcaccgtgctggtgcacacccgggaggccgccaccaggaacatggagaagatccaggtgatcaaggacttcccctggatcctggctgatgagcaggatgtgcacatgcatgaccccaggctcatccccctgaagaccatgaccagtgacatcctgaagatgcagctgtatgtggaggagcgggcccacaagggcagctag

SEQ ID NO: 336567 - DNA, 318 bp, Artificial Sequence
  derived and/or modified sequence
atgaccaccctgacccggcaggacctgaactttggccaggtggtggctgatgtgctgtgtgagttcctggaggtggccgtgcacctgatcctgtatgtgcgggaggtgtaccctgtgggcatcttccagaagaggaagaagtacaacgtgcctgtgcagatgagctgccaccctgagctgaaccagtacatccaggacaccctgcactgtgtgaagcccctgctggagaaggtgcgggtgcactgggccccccagcccagccaccccatgctgacccctgtgcctgtgtgcagccagagcaacagcggcatgggctag

SEQ ID NO: 336568 - DNA, 531 bp, Artificial Sequence
  derived and/or modified sequence
atgaccaccctgacccggcaggacctgaactttggccaggtggtggctgatgtgctgtgtgagttcctggaggtggccgtgcacctgatcctgtatgtgcgggaggtgtaccctgtgggcatcttccagaagaggaagaagtacaacgtgcctgtgcagaatgatgtggagaaggtggtggtggtgatcctggacaaggagcacaggcctgtggagaagtttgtgtttgagatcacccagccccccctgctgagcatcagcagtgacagcctgctgagccacgtggagcagctgctgcgggccttcatcctgaagatctctgtgtgtgatgctgtgctggaccacaaccccccaggagtgtccaccccccaccccctcttcccctggcacttccacggctacctgggcctggtgtgtgtgcccaggtccatgtttggctgcagcgagacccacctgttcctgaccctgcgggtgcacctgctgtgggaggccagcctgattgacagcacctggctgcccagcccctactag

SEQ ID NO: 336569 - DNA, 675 bp, Artificial Sequence
  derived and/or modified sequence
atgaccaccctgacccggcaggacctgaactttggccaggtggtggctgatgtgctgtgtgagttcctggaggtggccgtgcacctgatcctgtatgtgcgggaggtgtaccctgtgggcatcttccagaagaggaagaagtacaacgtgcctgtgcagatgagctgccaccctgagctgaaccagtacatccaggacaccctgcactgtgtgaagcccctgctggagaagaatgatgtggagaaggtggtggtggtgatcctggacaaggagcacaggcctgtggagaagtttgtgtttgagatcacccagccccccctgctgagcatccgctgggccgccccagccccccggcccctggccggcatcagcagtgacagcctgctgagccacgtggagcagctgctgcgggccttcatcctgaagatctctgtgtgtgatgctgtgctggaccacaaccccccaggctgcaccttcaccgtgctggtgcacacccgggaggccgccaccaggaacatggagaagatccaggtgatcaaggacttcccctggatcctggctgatgagcaggatgtgcacatgcatgaccccaggctcatccccctgaagaccatgaccagtgacatcctgaagatgcagctgtatgtggaggagcgggcccacaagggcagctag

SEQ ID NO: 336570 - DNA, 597 bp, Artificial Sequence
  derived and/or modified sequence
atgaccaccctgacccggcaggacctgaactttggccagggccgggaggccggccctgctggccctggggccggggccagcggccctgctggcttcctggagcgggccaccggcctgtgccccccagctgtggtggctgatgtgctgtgtgagttcctggaggtggccgtgcacctgatcctgtatgtgcgggaggtgtaccctgtgggcatcttccagaagaggaagaagtacaacgtgcctgtgcagatgagctgccaccctgagctgaaccagtacatccaggacaccctgcactgtgtgaagcccctgctggagaagaatgatgtggagaaggtggtggtggtgatcctggacaaggagcacaggcctgtggagaagtttgtgtttgagatcacccagccccccctgctgagcatcagcagtgacagcctgctgagccacgtggagcagctgctgcgggccttcatcctgaagatctctgtgtgtgatgctgtgctggaccacaaccccccaggctgcaccttcaccgtgctggtgcacacccgggaggccgccaccaggaacatggagaagatccaggtgatcaaggtgtag

SEQ ID NO: 336571 - DNA, 504 bp, Artificial Sequence
  derived and/or modified sequence
atgaccaccctgacccggcaggacctgaactttggccaggtggtggctgatgtgctgtgtgagttcctggaggtggccgtgcacctgatcctgtatgtgcgggaggtgtaccctgtgggcatcttccagaagaggaagaagtacaacgtgcctgtgcagatgagctgccaccctgagctgaaccagtacatccaggacaccctgcactgtgtgaagcccctgctggagaagaatgatgtggagaaggtggtggtggtgatcctggacaaggagcacaggcctgtggagaagtttgtgtttgagatcacccagccccccctgctgagcatcagcagtgacagcctgctgagccacgtggagcagctgctgcgggccttcatcctgaagatctctgtgtgtgatgctgtgctggaccacaaccccccaggctgcaccttcaccgtgctggtgcacacccgggaggccgccaccaggaacatggagaagatccaggtgatcaagtag

SEQ ID NO: 336572 - DNA, 1852 bp, Artificial Sequence
  derived and/or modified sequence
gaggaggggcggcgggtggcgggctcgactgcccccagccgaggggcagccccggggccgggcccggcgcgcacccggccagcgcgccctcgccagctgcgctctgagttctgggccagctccccagaggcctaggcgccgccgccgcgagggcgcggggcagacaaaggaggcagacaaaggcgggcgcagcccagcagccgtgcgggcaccgggcgaggcaggcccactcctcccgtaatatcatctctgagggcccttacaggacttccagaccgagtccacgcccctgggggacttgggagcagtaaaatgtagtggcaggaggcacctcggccatcgcccaccccaccagctgggagactcgggcaggttattcacccttctgcacctcgcttgacttatctgtataaagagaacagtcacagtaactgcctcatggagttactcccaggactgagataatccacggacacacttagcccagtgcccagcactcggctggagctccaaaaagccctcttccggcgcctgctaaagcgagagaaatgccctcgggggaagatatgtagcgatccaatggaacgtggagatcaacgttgtgttttcttcgcgcccacccgaagttgaagggaggtggcgcggcgggtctcagcccctcccggacgccgaggcccggcccccgcccctcggagacccgcccccgcatgcggaaccgccctctgcgaggcccggtttgggccgtgcgggaatgggcgtggcctgggcggggcgggcgctaggacccaccggagcgccgtgaacgtcaccgagcggcgccgaggccccgggttgagcgggaggcgcgatcggtccggtcggtggctccccgcggcggggccgggcccgatctcgggcgggaaccgagcgcagagccggtagcgggaaggatgaccacgctcacacgacaagacctcaactttggccaagtggtggccgatgtgctctgcgagttcctggaggtggctgtgcatctcatcctctacgtgcgcgaggtctaccccgtgggcatcttccagaaacgcaagaagtacaacgtgccggtccagatgtcctgccacccggagctgaatcagtatatccaggacacgctgcactgcgtcaagccactcctggagaagaatgatgtggagaaagtggtggtggtgattttggataaagagcaccgcccagtggagaaattcgtctttgagatcacccagcctccactgctgtccatcagctcagactcgctgttgtctcatgtggagcagctgctccgggccttcatcctgaagatcagcgtgtgcgatgccgtcctggaccacaaccccccaggctgtaccttcacagtcctggtgcacacgagagaagccgccactcgcaacatggagaagatccaggtcatcaaggatttcccctggatcctggcggatgagcaggatgtccacatgcatgacccccggctgataccactaaaaaccatgacgtcggacattttaaagatgcagctttacgtggaagagcgcgctcataaaggcagctgagggggcacctgccaccccactgatgcccaaactgtcagactttgggggatccccgcctagggcagtgctgcatggctgccctgattccaagtgctcttatcgcctctgtgtgtggatcgcccgccccagcccggggccgctcaggtctgcttggaggatgcctcccccaggagggcagtgagggatgccgcaacctcgacttctcagcctcctggggttccgccggccaacactgtctgtctcaaatactgtgctgtgagttgtttcaataaaggggccccaagggc

SEQ ID NO: 336573 - DNA, 1095 bp, Artificial Sequence
  derived and/or modified sequence
ccgggcccggcgcgcacccggccagcgcgccctcgccagctgcgctctgagttctgggccagctccccagaggcctaggcgccgccgccgcgagggcgcggggcagacaaaggaggcagacaaaggcgggcgcagcccagcagccgtgcgggcaccgggcgaggcaggcccactcctcccggtagcgggaaggatgaccacgctcacacgacaagacctcaactttggccaagtggtggccgatgtgctctgcgagttcctggaggtggctgtgcatctcatcctctacgtgcgcgaggtctaccccgtgggcatcttccagaaacgcaagaagtacaacgtgccggtccagatgtcctgccacccggagctgaatcagtatatccaggacacgctgcactgcgtcaagccactcctggagaaggtgagggtgcactgggctccccagccatctcaccccatgctcacccccgtccctgtgtgctcacagtccaactctgggatggggtgaagctaggactctgtggggtcttcatggctccaatacccagaagcctgttccctgcactctggagaccatcccaacccaggggcaggccccaaggcatgcgggccatgttcagggtgccttgggcctgggagcccgggttggagctggctctaagtaggggctgccccagagggttcggggttcttctcacatccgtcccctgttctccacgctaaacgttctgtctgagctgagcccctcagggtttcttccccatctagtcctgatctcagacttcctgggaccttccctatggggcccgggcattctctcagcctacaccactcatgctggagggtgccggcttctcaaactcgctatctggcctcttggggacccccagcctagcagctgagcagggctgtgagtgggccgtttctcctccttccttgggcaagggggtggaggcagggtggtgtagtcggggtggggtgcctggctctgcagtgggggttcctctctttgcagaatgatgtggagaaagtggtggtggtgattttggataaagagcaccgcccagtggagaaattcgtctttgagatcac

SEQ ID NO: 336574 - DNA, 910 bp, Artificial Sequence
  derived and/or modified sequence
gcgatcggtccggtcggtggctccccgcggcggggccgggcccgatctcgggcgggaaccgagcgcagagccggtagcgggaaggatgaccacgctcacacgacaagacctcaactttggccaagtggtggccgatgtgctctgcgagttcctggaggtggctgtgcatctcatcctctacgtgcgcgaggtctaccccgtgggcatcttccagaaacgcaagaagtacaacgtgccggtccagaatgatgtggagaaagtggtggtggtgattttggataaagagcaccgcccagtggagaaattcgtctttgagatcacccagcctccactgctgtccatcagctcagactcgctgttgtctcatgtggagcagctgctccgggccttcatcctgaagatcagcgtgtgcgatgccgtcctggaccacaaccccccaggtgtgtccactccccaccctctcttcccttggcatttccatggttatctcgggttggtctgtgttcccaggtccatgtttggctgttctgagactcatctcttcctaaccctgagagtccacctcctctgggaagcttccctgattgattctacctggcttccatctccctattgactggggcttttcttagcacttgctttgccatctgctctgggggtgctgctgagccagcaagggaagtgggaagaggctgggcccagtggctggcaccagggcggtgggggagcctccaccaacctcttgcctctccaggctgtaccttcacagtcctggtgcacacgagagaagccgccactcgcaacatggagaagatccaggtcatcaaggtgagatgagatgggtctgggtctgggcgcaggctctagaaacgtgatgtcgcagttccaggcgggcaggggcactgcctgt

SEQ ID NO: 336575 - DNA, 872 bp, Artificial Sequence
  derived and/or modified sequence
aggggcagccccggggccgggcccggcgcgcacccggccagcgcgccctcgccagctgcgctctgagttctgggccagctccccagaggcctaggcgccgccgccgcgagggcgcggggcagacaaaggaggcagacaaaggcgggcgcagcccagcagccgtgcgggcaccgggcgaggcaggcccactcctcccggtagcgggaaggatgaccacgctcacacgacaagacctcaactttggccaagtggtggccgatgtgctctgcgagttcctggaggtggctgtgcatctcatcctctacgtgcgcgaggtctaccccgtgggcatcttccagaaacgcaagaagtacaacgtgccggtccagatgtcctgccacccggagctgaatcagtatatccaggacacgctgcactgcgtcaagccactcctggagaagaatgatgtggagaaagtggtggtggtgattttggataaagagcaccgcccagtggagaaattcgtctttgagatcacccagcctccactgctgtccatcagctcagactcgctgttgtctcatgtggagcagctgctccgggccttcatcctgaagatcagcgtgtgcgatgccgtcctggaccacaaccccccaggctgtaccttcacagtcctggtgcacacgagagaagccgccactcgcaacatggagaagatccaggtcatcaaggatttcccctggatcctggcggatgagcaggatgtccacatgcatgacccccggctgataccactaaaaaccatgacgtcggacattttaaagatgcagctttacgtggaagagcgcgctcataaaggcagctgagggggcacctgccaccccactgatgcc

SEQ ID NO: 336576 - DNA, 864 bp, Artificial Sequence
  derived and/or modified sequence
gggaggcgcgatcggtccggtcggtggctccccgcggcggggccgggcccgatctcgggcgggaaccgagcgcagagccggtagcgggaaggatgaccacgctcacacgacaagacctcaactttggccaagtggtggccgatgtgctctgcgagttcctggaggtggctgtgcatctcatcctctacgtgcgcgaggtctaccccgtgggcatcttccagaaacgcaagaagtacaacgtgccggtccagatgtcctgccacccggagctgaatcagtatatccaggacacgctgcactgcgtcaagccactcctggagaagaatgatgtggagaaagtggtggtggtgattttggataaagagcaccgcccagtggagaaattcgtctttgagatcacccagcctccactgctgtccatcaggtgggctgcccctgcccctcgcccactagctggcatcagctcagactcgctgttgtctcatgtggagcagctgctccgggccttcatcctgaagatcagcgtgtgcgatgccgtcctggaccacaaccccccaggctgtaccttcacagtcctggtgcacacgagagaagccgccactcgcaacatggagaagatccaggtcatcaaggatttcccctggatcctggcggatgagcaggatgtccacatgcatgacccccggctgataccactaaaaaccatgacgtcggacattttaaagatgcagctttacgtggaagagcgcgctcataaaggcagctgagggggcacctgccaccccactgatgcccaaactgtcagactttgggggatccccgcctagggcagtgctgcatggctgccctgattccaagtgctct

SEQ ID NO: 336577 - DNA, 1002 bp, Artificial Sequence
  derived and/or modified sequence
cagacaaaggcgggcgcagcccagcagccgtgcgggcaccgggcgaggcaggcccactcctcccggtagcgggaaggatgaccacgctcacacgacaagacctcaactttggccaagtggtggccgatgtgctctgcgagttcctggaggtggctgtgcatctcatcctctacgtgcgcgaggtctaccccgtgggcatcttccagaaacgcaagaagtacaacgtgccggtccagatgtcctgccacccggagctgaatcagtatatccaggacacgctgcactgcgtcaagccactcctggagaagaatgatgtggagaaagtggtggtggtgattttggataaagagcaccgcccagtggagaaattcgtctttgagatcacccagcctccactgctgtccatcaggtgggctgcccctgcccctcgcccactagctggcatcagctcagactcgctgttgtctcatgtggagcagctgctccgggccttcatcctgaagatcagcgtgtgcgatgccgtcctggaccacaaccccccaggctgtaccttcacagtcctggtgcacacgagagaagccgccactcgcaacatggagaagatccaggtcatcaaggatttcccctggatcctggcggatgagcaggatgtccacatgcatgacccccggctgataccactaaaaaccatgacgtcggacattttaaagatgcagctttacgtggaagagcgcgctcataaaggcagctgagggggcacctgccaccccactgatgcccaaactgtcagactttgggggatccccgcctagggcagtgctgcatggctgccctgattccaagtgctcttatcgcctctgtgtgtggatcgcccgccccagcccggggccgctcaggtctgcttggaggatgcctcccccaggagggcagtgagggatgccgcaacctcgacttctcagcctcctggggttccgccggccaacactgtctgtctcaaatact

SEQ ID NO: 336578 - DNA, 1118 bp, Artificial Sequence
  derived and/or modified sequence
ccgtgcgggaatgggcgtggcctgggcggggcgggcgctaggacccaccggagcgccgtgaacgtcaccgagcggcgccgaggccccgggttgagcgggaggcgcgatcggtccggtcggtggctccccgcggcggggccgggcccgatctcgggcgggaaccgagcgcagagccggtagcgggaaggatgaccacgctcacacgacaagacctcaactttggccaagtggtggccgatgtgctctgcgagttcctggaggtggctgtgcatctcatcctctacgtgcgcgaggtctaccccgtgggcatcttccagaaacgcaagaagtacaacgtgccggtccagatgtcctgccacccggagctgaatcagtatatccaggacacgctgcactgcgtcaagccactcctggagaagaatgatgtggagaaagtggtggtggtgattttggataaagagcaccgcccagtggagaaattcgtctttgagatcacccagcctccactgctgtccatcagctcagactcgctgttgtctcatgtggagcagctgctccgggccttcatcctgaagatcagcgtgtgcgatgccgtcctggaccacaaccccccaggctgtaccttcacagtcctggtgcacacgagagaagccgccactcgcaacatggagaagatccaggtcatcaaggatttcccctggatcctggcggatgagcaggatgtccacatgcatgacccccggctgataccactaaaaaccatgacgtcggacattttaaagatgcagctttacgtggaagagcgcgctcataaaggcagctgagggggcacctgccaccccactgatgcccaaactgtcagactttgggggatccccgcctagggcagtgctgcatggctgccctgattccaagtgctcttatcgcctctgtgtgtggatcgcccgccccagcccggggccgctcaggtctgcttggaggatgcctcccccaggagggcagtgagggatgccgcaacctcgacttctcagcctcctggggttccgccggccaacactgtctgtctcaaatactgtgctgtgagttgtttcaataaaggggccccaagggctgggctg

SEQ ID NO: 336579 - DNA, 678 bp, Artificial Sequence
  derived and/or modified sequence
gcgatcggtccggtcggtggctccccgcggcggggccgggcccgatctcgggcgggaaccgagcgcagagccggtagcgggaaggatgaccacgctcacacgacaagacctcaactttggccaaggtagggaggctggacctgcgggcccgggggcgggggcgtctgggccggcgggcttcctcgagcgcgccaccggcttgtgcccccctgcagtggtggccgatgtgctctgcgagttcctggaggtggctgtgcatctcatcctctacgtgcgcgaggtctaccccgtgggcatcttccagaaacgcaagaagtacaacgtgccggtccagatgtcctgccacccggagctgaatcagtatatccaggacacgctgcactgcgtcaagccactcctggagaagaatgatgtggagaaagtggtggtggtgattttggataaagagcaccgcccagtggagaaattcgtctttgagatcacccagcctccactgctgtccatcagctcagactcgctgttgtctcatgtggagcagctgctccgggccttcatcctgaagatcagcgtgtgcgatgccgtcctggaccacaaccccccaggctgtaccttcacagtcctggtgcacacgagagaagccgccactcgcaacatggagaagatccaggtcatcaaggt

SEQ ID NO: 336580 - DNA, 1032 bp, Artificial Sequence
  derived and/or modified sequence
ccccgggttgagcgggaggcgcgatcggtccggtcggtggctccccgcggcggggccgggcccgatctcgggcgggaaccgagcgcagagccggtactgggggaggggagagggggcgggattcccgccgggagggatccggcgtagcagggggcggagtcttattccaaccccgcttcgctttccgcatgtcccgctttgcgctcccggccctgggcatcccgctgtttccctctgcgtccgcggccctgcccttttcgggggcacagctgtggtctttccaccccgcgagacagcggggcgagggggcgcgggcggccagtggatagaggctgatgcccccaagcacggacgccagcgtgggggtggaggttcttccagctgccctgagcctgtgcgaagcgggaggtccttccccagttcccacagactgtggggagggaagagacggtggaagcgagcgggttctgggctcctgggtctctggaactaccctctgcccttgccccaacactcaggtagcgggaaggatgaccacgctcacacgacaagacctcaactttggccaagtggtggccgatgtgctctgcgagttcctggaggtggctgtgcatctcatcctctacgtgcgcgaggtctaccccgtgggcatcttccagaaacgcaagaagtacaacgtgccggtccagatgtcctgccacccggagctgaatcagtatatccaggacacgctgcactgcgtcaagccactcctggagaagaatgatgtggagaaagtggtggtggtgattttggataaagagcaccgcccagtggagaaattcgtctttgagatcacccagcctccactgctgtccatcagctcagactcgctgttgtctcatgtggagcagctgctccgggccttcatcctgaagatcagcgtgtgcgatgccgtcctggaccacaaccccccaggctgtaccttcacagtcctggtgcacacgagagaagccgccactcgcaacatggagaagatccaggtcatcaagg

SEQ ID NO: 336581 - DNA, 636 bp, Artificial Sequence
  derived and/or modified sequence
atgaccaccctgacccggcaggacctgaacttcggccaggtggtggcagatgtgctctgtgagtttttagaggtggcagtgcacttgattctatacgtgcgagaggtgtatcccgtaggaatatttcagaaacgaaagaagtataacgttccagttcaaatgtcctgccaccctgagctcaaccagtacatccaggataccctgcactgtgtgaaacccctcttggagaagaatgatgtggaaaaggtcgtggtagtgattctcgacaaggagcacaggccggtcgaaaaatttgtctttgaaattacccagcctccattacttagcatttccagcgattcacttctcagccatgtcgagcagctgctgcgcgcatttattctgaagatctcggtctgtgacgcagtgttagaccacaatccacctggctgcacatttaccgtcctagtgcacactagggaggctgccacccggaacatggagaagatccaggttatcaaggacttcccctggatcttggctgatgaacaggatgtgcacatgcacgatcccagactgatccctctgaagacgatgacatcagatatcctgaaaatgcagctctacgtcgaagagcgtgcacacaaggggtcatag

SEQ ID NO: 336582 - DNA, 318 bp, Artificial Sequence
  derived and/or modified sequence
atgaccaccctgacccggcaggacctgaacttcggccaggtggtggctgatgtgctgtgcgaatttctggaagtagccgtgcatctgattctttacgtgagagaggtgtaccccgtggggatctttcagaaacggaagaaatataacgtgcctgtacagatgagctgccaccccgagctaaaccagtacattcaggacacattgcactgtgtgaagcccctgctggagaaagtgagagtccactgggctccgcagccatcccatcctatgctgactccagttcccgtttgctcacagagtaactctgggatgggatag

SEQ ID NO: 336583 - DNA, 531 bp, Artificial Sequence
  derived and/or modified sequence
atgaccaccctgacccggcaggacctgaacttcggccaggtggtggccgacgtgctgtgcgaatttctcgaagtggccgtgcacctcatcctgtacgtgagagaggtctacccggtggggatatttcagaagcggaaaaaatacaacgttccagtccagaatgatgttgagaaagtcgttgtggtcatcctggataaggagcatagacccgtagagaagttcgtttttgagatcacccagcccccgcttctttctatttcaagcgactccctgttgtcgcatgtggaacaactcctcagagcctttattttgaagatcagtgtgtgcgacgcagtcctcgatcacaacccgcctggggtgagcacaccacatccactgtttccatggcatttccatggttacctgggcctggtgtgcgtgccccgctccatgtttggttgcagtgaaacccaccttttcctcaccttgcgggttcatttgctgtgggaggccagcctgatcgactctacatggctcccttctccttattag

SEQ ID NO: 336584 - DNA, 636 bp, Artificial Sequence
  derived and/or modified sequence
atgaccaccctgacccggcaggacctgaacttcggccaggtggtggcagacgtgctgtgtgagttcctagaggtcgccgtgcacttgatactatacgtgagagaagtctatcccgtggggatatttcaaaagagaaagaaatacaatgttcctgtccagatgagctgtcatccggagctgaatcagtatatacaggatacccttcattgcgttaagcctctactcgaaaaaaatgacgtggaaaaagtggtggtggtgattctggataaagaacacagacctgttgagaaatttgtctttgagatcactcagccacctctgctctcaatttcgtccgactcattactcagccatgtggagcagctgctgagagcattcattcttaaaatcagcgtatgtgatgctgtgctggaccacaatccgccagggtgtaccttcacagtgctggtccacacccgcgaggcagcgacccgcaacatggaaaagatacaggtgatcaaagatttcccctggatcctcgccgacgaacaagacgtgcatatgcatgatcctagattaatccctttgaaaactatgacttcagacatccttaaaatgcaattgtatgtggaagaacgcgcgcataagggatcttag

SEQ ID NO: 336585 - DNA, 675 bp, Artificial Sequence
  derived and/or modified sequence
atgaccaccctgacccggcaggacctgaacttcggccaggtggtggcagatgtcctctgcgagttccttgaagtggcagtacacctaatcctctatgtgcgggaagtgtacccagtgggtattttccagaagcgtaagaaatacaacgtgccagttcagatgtcctgccatcctgagctgaaccagtatatccaagacactctccattgcgtcaagccattattagagaagaacgacgtggagaaagtcgtggtcgtcattctggacaaagaacaccggccagtggagaaatttgtgttcgagataacgcagccccctttgctgtctatcaggtgggcagctcccgctcctcgcccactggccggcatcagcagcgacagtttgctatcccacgttgaacaactgctccgagcgtttatcctaaaaatctcagtctgtgatgcagttttggaccacaaccctcctggatgtacctttaccgttctggtccacactcgggaggccgcgaccagaaacatggagaagatccaggttatcaaggattttccttggatcttggctgatgagcaggacgtgcacatgcatgaccctagactaatccctctgaagaccatgacctcggacatcctgaaaatgcagctatatgtcgaggagagagcccacaagggcagctag

SEQ ID NO: 336586 - DNA, 675 bp, Artificial Sequence
  derived and/or modified sequence
atgaccaccctgacccggcaggacctgaacttcggccaggtggtggccgatgtcctgtgcgagttccttgaagtcgcagtgcacctcatcctctacgtgagggaagtttaccctgtcgggatttttcagaaaaggaagaagtataacgttcctgtgcaaatgtcatgccaccctgagctgaaccaatacattcaggataccctgcactgcgtgaagcctctgcttgagaagaacgacgtggaaaaggtggttgtcgtaattctggacaaagaacaccgcccagtggagaaattcgttttcgaaatcacacagcctcccttgctgtccatccgctgggcagccccagctccaagaccactggctggaatcagctcagactccttactgtctcacgtggagcaattgctcagggccttcatcttgaagatcagcgtctgcgacgccgttctcgaccacaacccgcccgggtgtaccttcactgtcctcgttcacacgcgcgaggcagctacacgtaatatggaaaaaattcaggtgattaaggactttccttggattttggccgacgagcaggacgtgcacatgcatgaccctagattaataccgcttaagaccatgacctctgatattctgaagatgcagttgtatgtggaggagcgggcccacaagggctcctag

SEQ ID NO: 336587 - DNA, 636 bp, Artificial Sequence
  derived and/or modified sequence
atgaccaccctgacccggcaggacctgaacttcggccaggtggtggccgatgtcctgtgcgagtttcttgaggtggctgtgcatctgattctttacgttagggaggtatatccagtaggcatattccaaaagagaaagaaatataacgtccctgtgcagatgagttgtcatccagagttaaatcagtacatacaggatacactccattgcgtcaagccattactggagaagaacgatgtggagaaggttgtagttgtgatcctggataaggaacataggccagtggagaagttcgtatttgagataacgcaacctcccctcttgtctatctcctctgacagcctgctgtctcatgtggagcagctcctgcgagcattcatactgaaaattagtgtatgtgatgcggtactcgaccacaatccgccgggctgtacttttaccgtgctggtccatacaagagaagccgccacccggaacatggaaaagatccaggtgattaaggatttcccctggatactggcggatgagcaggacgtgcacatgcatgacccccgtctgattcccctcaagactatgacttcagacattttgaagatgcagctgtacgttgaggagcgggcacataaaggatcatag

SEQ ID NO: 336588 - DNA, 597 bp, Artificial Sequence
  derived and/or modified sequence
atgaccaccctgacccggcaggacctgaacttcggccagggccgggaggccggtcccgcaggacccggagcgggagccagcggcccggcaggtttccttgagagagccactggtctctgcccacccgctgttgtggccgacgtgctttgcgaatttctggaggtggcagttcatctgattctgtacgtgagagaggtctatcccgtcgggatattccagaaacgaaaaaagtacaacgtgccagtgcagatgtcctgccatccagagctgaatcagtacatccaggacacccttcactgcgtgaaaccacttctggaaaagaatgatgtagagaaggttgtggtggttattcttgataaggagcatcgccctgttgaaaagtttgtgttcgagatcacccagcctccccttttatcgatttctagtgacagcctcctatcccacgttgaacagctgctgcgggctttcattctgaaaatcagcgtctgcgacgctgtgttggaccataacccccctgggtgtacgttcaccgtcttagttcacactagggaagctgcaactcgaaacatggagaagatccaggtgatcaaggtgtag

SEQ ID NO: 336589 - DNA, 504 bp, Artificial Sequence
  derived and/or modified sequence
atgaccaccctgacccggcaggacctgaacttcggccaggtggtggccgacgtgttatgcgaatttctggaagtggccgtccacctcattctctatgttagagaggtctaccccgtcgggatcttccaaaaacgcaaaaagtataacgtgcccgtgcaaatgagctgtcatccagaactgaaccagtatatccaggatactctccactgcgtgaagccactgttagagaaaaatgatgtggagaaagtagttgtggttatactggacaaagagcacagacctgtcgagaagtttgtcttcgagataactcaaccaccactgctctcaatctccagcgacagcctgctgtctcatgttgaacagctgttgcgtgcgttcatcctgaaaatttccgtgtgcgacgccgtgctcgatcacaatcctcccggttgcaccttcacagtgttggtccacacgagggaagctgcaactaggaacatggaaaagattcaggtcattaagtag

SEQ ID NO: 336590 - DNA, 636 bp, Artificial Sequence
  derived and/or modified sequence
atgaccaccctgacgagacaggacctgaacttcggtcaggtggttgctgacgtgctctgcgaattccttgaagtggcggtacacttaatcctgtacgtgagagaggtgtatccagtgggtatcttccagaaacggaagaaatacaatgtgccggtacaaatgagctgtcatcccgagctgaaccaatatatccaggataccctgcactgtgtcaaacctcttcttgagaagaatgatgtggaaaaggtggtcgtggtgattctcgacaaggaacacagacccgttgaaaagtttgtatttgagataacccagccgccattgctgagtatctctagcgattctctgcttagccacgtggagcaactcctgagagcattcatcctcaagatttctgtgtgcgacgctgtcctggaccacaatcctcccggatgcacttttactgtgctggttcacactcgggaggcagccacacgcaacatggagaagatccaggtcattaaggacttcccctggatactggccgatgaacaggatgtgcatatgcatgatccaagactgatcccgttgaagaccatgactagtgatattttgaagatgcaactttacgtagaggagagggctcataagggctcctag

SEQ ID NO: 336591 - DNA, 318 bp, Artificial Sequence
  derived and/or modified sequence
atgaccacgctcacaagacaggatctcaacttcggacaagtcgtggcggacgtcctgtgcgagtttctggaagtggcggttcacctaatactctatgtccgagaagtctaccccgtgggcatcttccagaagagaaagaaatacaacgttcccgtgcagatgtcatgccacccagagttgaatcaatatatccaagacactcttcactgcgtgaagcctcttctggaaaaggtgcgagtgcactgggcgccacagccttcccatccgatgctgacccctgtaccagtctgctcccagagcaacagcggcatgggatag

SEQ ID NO: 336592 - DNA, 531 bp, Artificial Sequence
  derived and/or modified sequence
atgaccactctaacccgccaggacctgaattttggccaggtggtggcggacgtcttatgtgaattcctcgaggtggccgtacatttgatcctgtacgtcagggaggtgtatcccgtcggaatcttccagaaaagaaaaaaatacaacgtacccgttcagaatgatgtggagaaggttgttgtggtgatcttggataaagaacacaggcccgtagagaagtttgtctttgaaatcacccagcctcccctcctctcaatcagttctgatagtctgctcagccatgtggaacaactcctccgcgcatttattttgaaaatttcggtgtgcgatgcagtgctggaccacaatccgcctggggtgagcacaccacaccccctcttcccttggcactttcatgggtacctgggccttgtgtgtgtgcctaggtctatgttcggctgcagcgagacccacctgttcctgactttgagggtacacctgctttgggaagccagcctgatagattccacttggctgcccagtccatactag

SEQ ID NO: 336593 - DNA, 636 bp, Artificial Sequence
  derived and/or modified sequence
atgactacgttgacaaggcaggatttgaactttgggcaggttgttgcagacgttctatgcgaatttctggaggtcgcagtgcacttgatactgtatgttagagaagtctaccccgttggcatctttcaaaagcgcaaaaagtacaatgttcctgtccagatgtcttgtcatccagagctcaaccagtacatccaggacacgctgcactgcgtgaagcccctgctggaaaaaaatgatgtggaaaaggtggtggtagtcatcctcgacaaggagcaccgacccgtcgagaagttcgtgtttgagatcacccagccaccactgctgtctatctcatcagacagcttgctttctcacgttgagcagcttttgcgggctttcattctcaagatcagcgtgtgcgacgctgtgctcgatcataatccaccgggttgtaccttcacagtccttgtgcataccagggaggctgctacgcggaacatggaaaaaattcaagtgataaaggattttccatggatcctagcagacgaacaggacgtccatatgcacgatccaagacttattcccttgaagacgatgacaagcgatattctcaagatgcagctttacgtagaggaacgcgctcacaagggctcatag

SEQ ID NO: 336594 - DNA, 675 bp, Artificial Sequence
  derived and/or modified sequence
atgaccactttaacacgccaagacctaaatttcggccaggtcgtcgcggacgtgctgtgcgaattcctggaggtggcggtccacctcattctgtatgtcagggaggtatatccagtcgggatcttccagaaacggaagaagtataatgtgcctgtgcagatgagctgccatccagaattgaaccagtacattcaggacacactgcactgcgttaagcccctcctggagaagaacgacgtggaaaaagtggtggtggtcatcctcgataaggaacacagacccgtggaaaaattcgtgtttgaaatcactcaaccgcctctgctgtccatacgatgggccgcacctgccccaagaccactcgcaggcatttctagcgattccttactgagccacgtcgagcagctgctacgggcatttatactgaagatttctgtgtgcgatgctgtgcttgatcacaaccctcccggatgcacattcaccgttttagtgcatacacgggaagccgctacacgcaatatggagaaaatccaagtgataaaggattttccttggatcctggctgatgagcaggatgtccatatgcatgatccacgcttaattcccctgaaaactatgacatctgacattcttaagatgcagttatatgtcgaagaacgggcacataagggctcatag

SEQ ID NO: 336595 - DNA, 675 bp, Artificial Sequence
  derived and/or modified sequence
atgacaaccctgactcgtcaggacctcaatttcgggcaggtggtagccgacgtactgtgcgagttcctggaggtcgccgtccacctgatcctctacgtccgcgaagtataccccgtgggcatattccaaaaaaggaagaagtataatgtgcccgtccaaatgagttgccacccagagcttaaccagtatattcaggacacactccattgcgtaaaacctctgctggagaagaacgacgttgaaaaggtggtcgtggtgatcttggacaaagagcatcgacccgtggagaagtttgtgtttgaaatcactcagccgcctctactgtctatccgctgggccgcacctgcgcctcggcctcttgccggtatttcatcagacagtctactgagccatgtggaacaattgctgcgagccttcattctgaagatctcggtgtgcgacgcagtgcttgatcataatccccctggatgcacatttaccgttctggtgcacacacgcgaggcggcaactagaaatatggaaaagatccaggtcattaaagacttcccatggattcttgccgacgaacaggacgtgcatatgcatgatccacgcttgatcccgctgaagaccatgacatctgatatattaaagatgcaactctacgttgaagagcgcgcacacaagggtagttag

SEQ ID NO: 336596 - DNA, 636 bp, Artificial Sequence
  derived and/or modified sequence
atgaccacactaacccggcaggatctgaacttcggccaagtggtggctgatgttctgtgcgagtttctggaagtggcggtccacttaatcctgtacgtccgggaagtctacccagttgggatttttcagaagagaaagaagtacaacgtgcccgtccagatgtcttgccacccggaattgaaccaatacatacaagacacacttcattgtgtcaagccactccttgagaagaacgatgtcgagaaggtggttgtggtgattctggataaggagcatagaccggtggaaaagttcgtctttgagataacacagccccctctcttgtccatttcctccgattctctcctgtcccatgttgaacaacttctgagggccttcatactgaaaatcagtgtttgtgacgccgttcttgaccataatccaccaggctgtacatttactgtgttggtgcatacacgtgaggccgctacccgcaatatggagaagatacaagttattaaggatttcccgtggattctggcagacgaacaggatgtgcacatgcacgacccaagactgatccctctgaagaccatgacatctgacatactcaagatgcagttgtatgttgaggagcgcgcacataaggggagctag

SEQ ID NO: 336597 - DNA, 597 bp, Artificial Sequence
  derived and/or modified sequence
atgaccaccctcacccgccaggacctcaacttcggacagggaagagaagccggaccagcagggcctggggctggggcatccgggcctgccggatttttagagagagctactgggctgtgtccacccgcagtagttgccgacgtgctgtgtgagttcttagaggttgccgtccacttgattctatatgtgagagaagtctacccagttggaattttccagaagcggaaaaagtacaatgtgcccgtgcagatgtcgtgccacccggagcttaaccagtacatccaggataccctccattgcgtgaaaccgctcctggagaaaaatgatgtggagaaagtcgtggtggttatcttggacaaagagcatagacccgtcgaaaagttcgtcttcgagatcactcagccacccttactgagcatctcatctgatagcttattgagccacgtggaacagctgttgcgggcttttatcttaaaaatttcagtctgcgacgccgtcctagaccataatccacctgggtgcaccttcacggtgctagtgcacacaagagaagctgctacccggaacatggagaagattcaggtgatcaaggtatag

SEQ ID NO: 336598 - DNA, 504 bp, Artificial Sequence
  derived and/or modified sequence
atgaccactttgacgcggcaggatctgaactttggacaggtagtagccgacgtcttgtgcgagttcctagaggttgctgtgcacctcatcctgtatgtccgggaggtgtaccctgttggtatctttcagaaacgaaagaaatataacgtaccggtccagatgagttgtcatcccgaactgaatcagtacattcaagacaccctacattgcgtcaagccgttactggagaagaacgatgtggaaaaggtcgttgtggtgatattggacaaggaacacagacccgtggaaaaattcgtctttgagattactcagcctcccctccttagcatctcctccgactctctgctgtcacacgtcgagcagttactgagggcgttcatactcaaaatatccgtatgcgacgcggtactggaccacaatccccctgggtgtaccttcacagtgctcgtacacacaagagaggctgcaactaggaatatggagaaaatccaagtgattaagtag

SEQ ID NO: 336599 - protein, 475 aa, Artificial Sequence
  derived and/or modified sequence
MADMQNLVERLERAVGRLEAVSHTSDMHRGYADSPSKAGAAPYVQAFDSLLAGPVAEYLKISKEIGGDVQKHAEMVHTGLKLERALLVTASQCQQPAENKLSDLLAPISEQIKEVITFREKNRGSKLFNHLSAVSESIQALGWVAMAPKPGPYVKEMNDAAMFYTNRVLKEYKDVDKKHVDWVKAYLSIWTELQAYIKEFHTTGLAWSKTGPVAKELSGLPSGPSAGSCPPPPPPCPPPPPVSTISCSYESASRSSLFAQINQGESITHALKHVSDDMKTHKNPALKAQSGPVRSGPKPFSAPKPQTSPSPKRATKKEPAVLELEGKKWRVENQENVSNLVIEDTELKQVAYIYKCVNTTLQIKGKINSITVDNCKKLGLVFDDVVGIVEIINSKDVKVQVMGKVPTISINKTDGCHAYLSKNSLDCEIVSAKSSEMNVLIPTEGGDFNEFPVPEQFKTLWNGQKLVTTVTEIAG

SEQ ID NO: 336600 - protein, 208 aa, Artificial Sequence
  derived and/or modified sequence
MADMQNLVERLERAVGRLEAVSHTSDMHRGYADSPSKAGAAPYVQAFDSLLAGPVAEYLKISKEIGGDVQKHAEMVHTGLKLERALLVTASQCQQPAENKLSDLLAPISEQIKEVITFREKNRGSKLFNHLSAVSESIQALGWVAMAPKPGPYVKEMNDAAMFYTNRVLKEYKDVDKKHVDWVKAYLSIWTELQAYIKEFHTTGLAWS

SEQ ID NO: 336601 - protein, 176 aa, Artificial Sequence
  derived and/or modified sequence
MADMQNLVERLERAVGRLEAVSHTSDMHRGYADSPSKAGAAPYVQAFDSLLAGPVAEYLKISKEIGGDVQKHAEMVHTGLKLERALLVTASQCQQPAENKLSDLLAPISEQIKEVITFREKNRGSKLFNHLSAVSESIQALGWVAMAPKPGPYVKEMNDAAMFYTNRVLKEYKDVD

SEQ ID NO: 336602 - protein, 202 aa, Artificial Sequence
  derived and/or modified sequence
MADMQNLVERLERAVGRLEAVSHTSDMHRGYADSPSKAGAAPYVQAFDSLLAGPVAEYLKISKEIGGDVQKHAEMVHTGLKLERALLVTASQCQQPAENKLSDLLAPISEQIKEVITFREKNRGSKLFNHLSAVSESIQALGWVAMAPKPGPYVKEMNDAAMFYTNRVLKEYKDVDKKHVDWVKAYLSIWTELQAYIKEFHT

SEQ ID NO: 336603 - protein, 58 aa, Artificial Sequence
  derived and/or modified sequence
MADMQNLVERLERAVGRLEAVSHTSDMHRGYADSPSKAGAAPYVQAFDSLLAGPVAEY

SEQ ID NO: 336604 - protein, 174 aa, Artificial Sequence
  derived and/or modified sequence
MADMQNLVERLERAVGRLEAVSHTSDMHRGYADSPSKAGAAPYVQAFDSLLAGPVAEYLKISKEIGGDVQKHAEMVHTGLKLERALLVTASQCQQPAENKLSDLLAPISEQIKEVITFREKNRGSKLFNHLSAVSESIQALGWVAMAPKPGPYVKEMNDAAMFYTNRVLKEYKD

SEQ ID NO: 336605 - protein, 452 aa, Artificial Sequence
  derived and/or modified sequence
MADMHRGYADSPSKAGAAPYVQAFDSLLAGPVAEYLKISKEIGGDVQKHAEMVHTGLKLERALLVTASQCQQPAENKLSDLLAPISEQIKEVITFREKNRGSKLFNHLSAVSESIQALGWVAMAPKPGPYVKEMNDAAMFYTNRVLKEYKDVDKKHVDWVKAYLSIWTELQAYIKEFHTTGLAWSKTGPVAKELSGLPSGPSAGSCPPPPPPCPPPPPVSTISCSYESASRSSLFAQINQGESITHALKHVSDDMKTHKNPALKAQSGPVRSGPKPFSAPKPQTSPSPKRATKKEPAVLELEGKKWRVENQENVSNLVIEDTELKQVAYIYKCVNTTLQIKGKINSITVDNCKKLGLVFDDVVGIVEIINSKDVKVQVMGKVPTISINKTDGCHAYLSKNSLDCEIVSAKSSEMNVLIPTEGGDFNEFPVPEQFKTLWNGQKLVTTVTEIAG

SEQ ID NO: 336606 - DNA, 1359 bp, Artificial Sequence
  derived and/or modified sequence
atggccgacatgcaccggggctacgccgacagccccagcaaggccggagcagcaccctacgtccaggcattcgactctctgttagcaggaccagtggcggaatatctcaagattagtaaagagattggcggtgatgttcagaaacacgctgagatggtacataccggattaaagttggaaagggccctgctagtcaccgcctcgcaatgccaacaacccgctgaaaataaactttctgatcttctggcccctatctctgaacagataaaggaggtgataactttccgtgagaaaaaccggggttcaaagttgttcaaccatctaagtgcggtttcagagtccatccaggccctcggttgggtggccatggctcccaagccaggtccctatgtgaaggagatgaacgatgcggccatgttctatacaaatagggtgctgaaagagtacaaggatgtcgataagaaacacgtggactgggtgaaggcatatctatccatctggaccgagctgcaggcctacatcaaagaatttcatacaacgggcctcgcttggagcaaaacaggaccggttgccaaggaactatctggcctgccttcaggcccctctgcgggctcatgcccccctccaccacctccttgtccgcccccgccgcctgtgtccaccatcagctgttcttatgaatcagctagtaggtcttcacttttcgctcagattaaccagggagaaagcatcacgcacgccttaaaacatgtgagcgatgacatgaagacacacaaaaaccccgcactgaaggcacagtctggaccggtacgatccgggcctaagcctttctccgcaccgaagcctcagacgagcccatccccaaagcgcgcgacaaagaaggagcccgctgtgttggaacttgaaggaaagaaatggagagtggagaaccaggagaacgtgagtaacctggttatcgaggataccgagctgaagcaagtggcttatatttacaaatgtgtgaacacaacactgcagatcaaaggtaaaataaactctatcactgtcgacaattgcaagaaattaggcctagtttttgacgatgtggtgggaatcgtggagattatcaatagtaaggacgtgaaagtgcaggtcatgggtaaggtacccaccatcagcattaataagacagacggatgccatgcttatctctctaagaatagtctcgattgcgagatcgtctccgcaaagtcctccgagatgaacgtgttgattcctacagagggaggcgattttaatgaattccccgtacccgaacagttcaaaaccctttggaatggtcaaaaacttgtgacaacggtgactgagatagcggggtag

SEQ ID NO: 336607 - DNA, 1428 bp, Artificial Sequence
  derived and/or modified sequence
atggccgacatgcagaacctagttgagcggctcgagcgcgctgtcggcagattggaggctgtatcacacacctcagatatgcacaggggatatgcggacagtccttctaaggcgggagccgctccgtatgttcaggcttttgatagcctcctggccggtccagtcgccgagtacctgaaaatcagtaaagagataggcggtgatgtgcagaaacacgctgaaatggtccatacaggattgaagctggagcgggcacttttggtgactgcctcccagtgccaacagcctgccgaaaacaagctgtccgatctgctcgcacccatctcagaacagatcaaggaagtcattacattcagggaaaagaaccggggatctaaactgttcaaccacctgagtgccgtgtccgagtccattcaggctctcggctgggtggcaatggcccctaagccgggaccatacgttaaggaaatgaatgatgccgcaatgttctacacaaatcgggtgctgaaagaatataaggacgttgataagaaacatgtcgactgggtaaaagcgtatctgtccatctggactgaattgcaagcatacatcaaggagttccatactaccgggctagcctggagcaagactggaccggttgcaaaggaactaagcggtctgccatcaggaccgtccgcgggttcctgtcccccaccccctccgccatgcccccctcctcctcccgtctcaactatctcctgctcctacgagtcggcaagtagatcatccctgttcgctcagatcaaccagggagagagcataacgcacgcgctgaaacacgtgtccgatgatatgaagacacacaagaatcccgcattgaaagctcagagtggacctgtgcgttcagggcctaaaccattttctgctcctaaaccacagacaagtcctagccctaaacgagctacgaaaaaggaacccgctgtattagaattggaaggaaagaaatggcgagtggaaaaccaggagaacgtttccaacctggtcatagaagataccgagctcaagcaggtggcctacatttacaagtgtgttaatactaccctgcaaattaagggtaagatcaacagtattaccgttgataactgcaaaaaattaggactggtcttcgacgacgtggtgggtatcgtggagataataaatagcaaggacgtaaaggtccaggtcatggggaaagtgccaaccatcagcattaacaagacagatggttgtcatgcctacctgtctaagaactctctagattgcgaaattgttagtgcgaaaagctcagaaatgaacgtacttatccccaccgaggggggagacttcaatgaatttcctgtgccggagcagttcaaaaccctgtggaacggccagaagctcgtgacaactgtcactgagatcgcagggtag

SEQ ID NO: 336608 - DNA, 1428 bp, Artificial Sequence
  derived and/or modified sequence
atggctgacatgcagaaccttgtggaacggcttgagagagcagttgggaggctcgaagctgtctcgcatacctcagatatgcatcggggatacgccgacagcccatcgaaggccggagcggcaccatacgttcaagctttcgattccctgctggccggacctgtcgccgaatacctgaaaatttcgaaagagattgggggtgatgtacaaaagcatgcagaaatggtgcataccggcctgaaactagagcgagctctcctcgtgacagcatcccagtgccagcaaccagctgagaacaagctttccgatctgttggcgccaatttccgaacagattaaggaggttatcacatttcgggaaaaaaaccgcggatctaagctgttcaaccacctgtcagccgtgagcgagtccattcaggctctggggtgggtggccatggcacctaaacctgggccttacgtgaaggagatgaacgatgcggctatgttttacaccaacagggtactcaaagagtacaaagatgtcgacaagaagcacgtcgactgggtgaaagcctatctttccatttggacggaactccaggcctacattaaagagtttcataccaccggcctggcctggagtaaaaccggtcctgtagccaaggaactgtcaggtttgccttcaggtccttcggctggctcctgccctccccctccccctccctgtccccctccccctcccgtgtcaacgatatcctgctcgtacgaatccgcttccagaagctccctcttcgctcagataaaccagggagagagcattacacatgccttgaagcacgtatcagatgacatgaagactcacaaaaatccggcactgaaggcccagagtggaccggttagatctggacccaaacccttttccgctccaaaacctcagacctcgccaagtccaaagcgtgctacaaaaaaggagcccgctgtcctggaactcgaaggcaagaagtggcgggttgaaaaccaggaaaacgttagcaacctcgtgatagaggatactgagttgaagcaggtggcttacatttacaagtgcgttaacaccactttacaaatcaagggcaagatcaactcaatcacagttgataattgcaaaaaacttggtctcgtgtttgacgacgttgtggggatcgtggagattattaacagtaaggacgtcaaggtgcaagtcatgggcaaggttccaaccatctctataaacaaaactgatggctgtcacgcttacctgagcaaaaacagcttggattgtgagattgtgagtgccaagtcatcggagatgaacgttcttatccccacggagggtggtgacttcaacgaatttcctgtccctgagcagtttaagacactgtggaacggacaaaaactggtgaccaccgtcacggagattgctggttag

SEQ ID NO: 336609 - DNA, 1428 bp, Artificial Sequence
  derived and/or modified sequence
atggcggacatgcagaatctcgtggaaaggcttgagcgcgcagtgggaaggctggaggccgtgtctcacacgagtgatatgcatcggggttacgccgatagccctagtaaggcgggagccgcaccatacgtccaggcttttgattctctgctggccggtcctgtggcggagtacttaaaaatatcaaaggaaattgggggtgatgtccagaaacatgccgagatggtccatacagggcttaaacttgaaagggccctgctggtgacagcttcccaatgccagcagcctgcagagaacaagctgagtgacctgcttgcccctatttcagaacagataaaggaggtgatcacatttagggagaaaaaccgaggttccaagctgtttaatcatctctcggctgtgtcggaatccattcaagcccttggctgggtcgcgatggcaccgaaacccggaccgtacgtgaaggaaatgaacgatgctgcaatgttctacaccaaccgcgtgcttaaggagtataaagatgttgacaagaagcacgtggactgggtcaaggcatacctgtctatatggaccgaactccaggcatacataaaagagttccacaccacaggcttggcatggtcgaagacaggacctgtcgccaaggagctatcagggcttcccagtgggccatctgctggctcatgccctccaccaccacctccctgcccccctccccctcctgtgtccacaatcagctgcagctatgaatcagccagtcggagcagtctatttgcccaaatcaaccagggtgagtctataacgcacgctcttaaacatgtcagtgacgacatgaagacacataagaatcctgcattgaaggctcagagtggacctgtgcgcagcggcccaaagccttttagcgccccaaagccgcagaccagccctagtcctaagcgtgcgactaagaaagaacctgctgtgttggagttagagggcaagaagtggcgggtagagaatcaggagaatgtctcgaaccttgtgatcgaggatacggagctcaagcaggtcgcctatatctacaagtgtgtgaatacgacacttcaaattaagggaaagataaatagcataactgttgataactgtaagaagctggggctggtatttgacgatgtcgttggcattgttgagataatcaactctaaggatgtcaaggtccaggtaatgggaaaggtcccaaccatttctatcaacaagacagacggttgccacgcttacctctctaaaaatagcttagactgcgaaatagttagcgctaagagtagcgagatgaacgtgctgatccccaccgagggcggtgacttcaatgagttcccagttcctgagcagttcaagacactatggaacggccaaaagttagtcaccaccgtgaccgaaattgcgggatag

SEQ ID NO: 336610 - DNA, 627 bp, Artificial Sequence
  derived and/or modified sequence
atggccgatatgcagaatcttgtggaacgtttggagcgagctgttggacgtctcgaagccgtgagtcacacatctgatatgcataggggctatgctgacagcccttctaaggctggagccgctccatacgtgcaggcattcgattctctactggctggaccagtggctgagtatctcaaaatctccaaagagatcggtggcgacgtgcagaagcacgcggaaatggtccacacaggcctgaagttagagcgggctctcctggtgaccgcctcacagtgccagcagcccgcagaaaacaaactgtcagatctgctggcacccatttccgagcaaatcaaagaagtgatcactttcagggagaagaacaggggttcaaagctgttcaaccatttgagcgccgtttccgaaagcatccaggccctgggatgggtagcaatggcccctaaaccaggcccatatgtgaaggagatgaacgatgccgctatgttctatacaaatagggtcctgaaagagtacaaggatgttgataaaaaacacgtggactgggtcaaggcttacctttcgatctggaccgagctgcaggcttacatcaaggaattccacacaactggccttgcctggtcctag

SEQ ID NO: 336611 - DNA, 531 bp, Artificial Sequence
  derived and/or modified sequence
atggccgacatgcagaatctggtggaaaggctggagcgggctgtgggtcgccttgaggctgtgtcccacacctcagatatgcatcgaggatacgctgattcgccctcaaaagctggtgcagcaccctacgttcaggcatttgatagtctgctggccggtccagtggccgaataccttaaaatctctaaggagattggcggagacgtccagaagcacgccgagatggttcatacaggcctgaaactggaacgcgcattgcttgtgactgcgagccagtgtcagcaacccgctgagaacaagctttctgacctgctggcaccaatctctgaacaaataaaggaggttatcacttttagagaaaaaaataggggatctaagctctttaatcacctctctgctgtgagcgaatccatccaagccctggggtgggtcgccatggcacccaaacccggtccgtacgtcaaggagatgaatgacgccgcaatgttttacaccaatcgagtgctaaaagagtacaaggatgtcgattag

SEQ ID NO: 336612 - DNA, 543 bp, Artificial Sequence
  derived and/or modified sequence
atggccgacatgcagaaccttgtggagagacttgagcgggctgttggcagattggaggccgtctcgcatacatcagacatgcacagagggtatgccgattctccgagtaaagcaggagcggctccttacgtgcaggcctttgacagcttgctcgccggaccagtcgcggagtacctgaagatcagcaaagaaattggaggtgacgtgcagaagcacgccgagatggtccacacaggcctgaagctggaacgagcgttgctcgttacagcttctcagtgccaacagccagcagagaacaaactcagcgatctgcttgccccaatcagcgaacaaataaaagaagtgatcacattccgtgagaaaaaccgtgggagcaaactgtttaaccatctgtcagccgtctcagagtctatacaggcactcgggtgggtggctatggcccctaaacctggaccgtatgtgaaggaaatgaatgacgctgccatgttttataccaacagggtgctgaaggaatacaaggatgtagacaagaaacacgtctag

SEQ ID NO: 336613 - DNA, 612 bp, Artificial Sequence
  derived and/or modified sequence
atggccgacatgcaaaacctcgtggagcggctggagcgtgccgtggggagacttgaagccgtatcccacacctcagatatgcaccggggttacgccgattcaccaagcaaggcaggggctgccccttatgtgcaggcatttgactccctgctcgcaggcccagtggccgaataccttaaaatttcgaaggagataggcggtgatgtgcaaaaacacgctgaaatggtgcataccggcctgaagctcgagagagctctactggtcaccgccagccagtgccagcagccagctgagaataaactgtctgacctcctggccccaatctcggagcagatcaaggaggttattacatttcgcgagaaaaatcggggatctaagctattcaatcatctctcggccgtatccgagtcaatccaagccctgggctgggttgctatggcgcctaaacctgggccatacgtgaaggaaatgaacgacgcagctatgttctacacgaacagggtgctgaaggagtataaggacgttgacaagaagcacgtagattgggttaaagcatatctcagcatctggacagagttacaggcctacatcaaggagttccacactacttag

SEQ ID NO: 336614 - DNA, 609 bp, Artificial Sequence
  derived and/or modified sequence
atggccgatatgcagaacctagttgagaggctggagcgggctgtgggcaggttggaggcagtatcccacacaagcgacatgcacagggggtacgcagatagtcccagtaaggctggggctgctccctacgtgcaggcgttcgatagcctgctggcagggcctgtcgccgaatacttaaaaatatctaaggaaattgggggagatgtccagaaacacgccgagatggtccacacaggtctgaagctggaacgcgctctcctcgtgacagctagtcagtgtcagcagcccgcagaaaataaactgtccgacctcctggcgcctatttccgagcagataaaagaggtaatcacattccgggagaaaaacaggggcagtaaactttttaatcacctgagcgctgtgagcgaatctatccaggcactaggctgggtcgcgatggcccctaaacccggtccttatgttaaagaaatgaatgatgccgcaatgttttatacaaacagagtgttgaaggagtacaaagacgtcgataagaagcacgtcgattgggtgaaagcttacttgagcatctggactgagctgcaggcttacatcaaagaattccatacctag

SEQ ID NO: 336615 - DNA, 648 bp, Artificial Sequence
  derived and/or modified sequence
atggccgatatgcaaaatctcgtcgaaagattggagagggccgtggggagattagaagctgtttcccacaccagcgatatgcacagaggatacgccgacagtccgtcaaaggcaggtgcggctccctatgttcaagcatttgacagcctgctggccggtccagttgcagaatacttaaaaattagcaaggaaatcgggggtgacgttcagaagcacgccgagatggtacacaccggcctcaaattagagagagcattgctggtcacagcctctcagtgccagcagcctgctgagaacaagctatctgatttactagctccaatttcagagcaaattaaagaagtgattacgttcagagagaagaaccgcggtagtaaactattcaatcatctctctgcagtttctgaaagtatccaggccctaggttgggtggcaatggcccctaaacccggaccctatgtgaaggaaatgaacgacgcggctatgttttatactaatcgggtccttaaagaatacaaagatgtcgacaagaagcacgtggattgggtgaaagcctatttgagtatttggacggagttgcaagcatacatcaaagagtttcacaccaccggcttggcttggagtaaaactggaccagttgccaaatag

SEQ ID NO: 336616 - DNA, 177 bp, Artificial Sequence
  derived and/or modified sequence
atggcagacatgcagaatctcgttgaacggcttgaacgcgctgtgggtcgtttggaagccgtctcgcatacgtcagatatgcacagagggtatgctgattctccctccaaagccggagcggctccgtacgtgcaggcgttcgattctcttctcgctggtcccgtggccgaatattag

SEQ ID NO: 336617 - DNA, 772 bp, Artificial Sequence
  derived and/or modified sequence
attgctgggcggttcttgccggaagcggagagcggctgatcgcagtccggaggtgaggcggaactctgaggcagatatcctccctttcctcctcggctgctgctcttactttgacaagccaggctaacattgaagcaggtggtccattatggctgacatgcaaaatctggtagaaagattggagagggcagtgggccgcctggaggcagtatctcatacctctgacatgcaccgtgggtatgcagacagtccttcaaaagcaggagcagctccatatgtgcaggcatttgactcgctgcttgctggtcctgtggcagagtacttgaagatcagtaaagagattgggggagacgtgcagaaacatgcggagatggtccacacaggtttgaagttggagcgagctctgttggttacagcttctcagtgtcaacagccagcagaaaataagctttccgatttgttggcacccatctcagagcagatcaaagaagtgataacctttcgggagaagaaccgaggcagcaagttgtttaatcacctgtcagctgtcagcgaaagtatccaggccctgggctgggtggctatggctcccaagcctggcccttatgtgaaagaaatgaatgatgccgccatgttttatacaaaccgagtcctcaaagagtacaaagatgtggataagaagcatgtagactgggtcaaagcttatttaagtatatggacagagctgcaggcttacattaaggagttccataccaccggactggcctggagc

SEQ ID NO: 336618 - DNA, 525 bp, Artificial Sequence
  derived and/or modified sequence
atggcagacatgcagaaccttgttgagcgcttggaaagagccgtaggtcgcctggaggccgtgtcgcatactagcgacatgcatcgaggctatgccgattctccatctaaggctggcgctgccccttatgtccaggctttcgattccctgcttgccggtccagtcgctgagtacctaaagatctccaaagaaatcggcggagatgttcaaaagcacgctgagatggtgcataccggactcaagttggagagggcccttctggtaacagcctcacaatgtcagcagcctgccgagaacaagctatctgatctcctcgccccaatcagtgagcagatcaaggaagtgatcaccttccgtgaaaaaaatagagggtccaaactctttaatcacctgtccgctgtgtccgagagcattcaggctctcggatgggtcgccatggctcccaaacccggaccctatgtgaaggagatgaacgacgctgcaatgttttatactaaccgcgtgctgaaggagtacaaggactag

SEQ ID NO: 336619 - DNA, 610 bp, Artificial Sequence
  derived and/or modified sequence
ggaggtgaggcggaactctgaggacatagacctggaggcttctgctgctgctgcaggccaaggaatggaaaggtggtccattatggctgacatgcaaaatctggtagaaagattggagagggcagtgggccgcctggaggcagtatctcatacctctgacatgcaccgtgggtatgcagacagtccttcaaaagcaggagcagctccatatgtgcaggcatttgactcgctgcttgctggtcctgtggcagagtacttgaagatcagtaaagagattgggggagacgtgcagaaacatgcggagatggtccacacaggtttgaagttggagcgagctctgttggttacagcttctcagtgtcaacagccagcagaaaataagctttccgatttgttggcacccatctcagagcagatcaaagaagtgataacctttcgggagaagaaccgaggcagcaagttgtttaatcacctgtcagctgtcagcgaaagtatccaggccctgggctgggtggctatggctcccaagcctggcccttatgtgaaagaaatgaatgatgccgccatgttttatacaaaccgagtcctcaaagagtacaaagatgtggat

SEQ ID NO: 336620 - DNA, 1359 bp, Artificial Sequence
  derived and/or modified sequence
atggccgacatgcatcgcggttacgccgattccccctccaaagctggggcagcaccatacgtgcaggcattcgacagtttgttagccggtcccgttgcagaatatctcaaaattagcaaggagattggtggggatgtccaaaagcacgccgagatggtccacacgggcctgaaactggagcgggctctactcgtcactgcgagccagtgccagcagccagctgaaaataaactgtccgacctcctggcccctattagcgaacagatcaaagaggttattactttcagagaaaaaaatcgaggaagcaaactctttaaccacctttctgctgtgtctgaaagcatccaagcactcggatgggtggccatggcccctaagcctggcccatacgtgaaagagatgaacgacgccgctatgttttacaccaacagggtcctgaaggagtacaaagatgttgataagaaacacgtggactgggtcaaagcttacctgagcatctggacggagttacaggcctatataaaggagtttcatactactggcctcgcatggtctaagacaggtccagtggcaaaggaactgtcgggccttcctagcggcccatctgcgggaagctgcccaccgccaccaccaccttgtccgccaccgccaccggtgagcactatatcttgttcatatgaaagcgctagtcgaagctctctgtttgcacagattaatcagggtgagagcatcactcatgctttaaaacatgtgtcggacgacatgaagacgcacaagaaccccgctcttaaagctcagagcgggccagtgcggagtggtccaaaacccttcagcgccccaaaaccgcagacaagtccctcgcctaagcgcgctacaaagaaagagcccgcagttttggagctggagggtaagaagtggcgggtggagaaccaggagaacgtttccaatttggtcatcgaggatacggaactaaagcaggtggcttacatctacaaatgcgtgaataccacattacaaatcaagggtaagatcaacagcattacagtcgacaactgtaaaaagctgggactggttttcgatgatgtggtgggaattgttgagatcattaattctaaggacgttaaggtccaggtgatggggaaggtgcctacaatttcaattaataagactgatgggtgtcacgcctacctgagcaagaactcgctggattgcgaaatcgtgagtgcaaagtcctctgaaatgaatgtgctgatcccaaccgaggggggtgattttaacgaattccctgttccagagcagtttaagaccttatggaatgggcaaaaactagtaaccactgtgaccgagatcgcaggatag

SEQ ID NO: 336621 - DNA, 668 bp, Artificial Sequence
  derived and/or modified sequence
ttgctgggcggttcttgccggaagcggagagcggctgatcgcagtccggaggcagatatcctccctttcctcctcggctgctgctcttactttgacaagccaggctaacattgaagcaggtggtccattatggctgacatgcaaaatctggtagaaagattggagagggcagtgggccgcctggaggcagtatctcatacctctgacatgcaccgtgggtatgcagacagtccttcaaaagcaggagcagctccatatgtgcaggcatttgactcgctgcttgctggtcctgtggcagagtacttgaagatcagtaaagagattgggggagacgtgcagaaacatgcggagatggtccacacaggtttgaagttggagcgagctctgttggttacagcttctcagtgtcaacagccagcagaaaataagctttccgatttgttggcacccatctcagagcagatcaaagaagtgataacctttcgggagaagaaccgaggcagcaagttgtttaatcacctgtcagctgtcagcgaaagtatccaggccctgggctgggtggctatggctcccaagcctggcccttatgtgaaagaaatgaatgatgccgccatgttttatacaaaccgagtcctcaaagagtacaaagatgtggataagaagcatgt

SEQ ID NO: 336622 - DNA, 824 bp, Artificial Sequence
  derived and/or modified sequence
tctccggggcgtggcgaagaggggcggagtcacgagcggggcggtgagacttcctgcccagtcgcgggccagcctagcgcttcagccggcggctcatttccggtgggggcgccgcgcccagtgagggcccggaagtgggtcgcgcggagattgctgggcggttcttgccggaagcggagagcggctgatcgcagtccggagcaggtggtccattatggctgacatgcaaaatctggtagaaagattggagagggcagtgggccgcctggaggcagtatctcatacctctgacatgcaccgtgggtatgcagacagtccttcaaaagcaggagcagctccatatgtgcaggcatttgactcgctgcttgctggtcctgtggcagagtacttgaagatcagtaaagagattgggggagacgtgcagaaacatgcggagatggtccacacaggtttgaagttggagcgagctctgttggttacagcttctcagtgtcaacagccagcagaaaataagctttccgatttgttggcacccatctcagagcagatcaaagaagtgataacctttcgggagaagaaccgaggcagcaagttgtttaatcacctgtcagctgtcagcgaaagtatccaggccctgggctgggtggctatggctcccaagcctggcccttatgtgaaagaaatgaatgatgccgccatgttttatacaaaccgagtcctcaaagagtacaaagatgtggataagaagcatgtagactgggtcaaagcttatttaagtatatggacagagctgcaggcttacattaaggagttccataccaccg

SEQ ID NO: 336623 - DNA, 702 bp, Artificial Sequence
  derived and/or modified sequence
ggaggtgaggcggaactctgaggcagatatcctccctttcctcctcggctgctgctcttactttgacaagccaggctaacattgaaggtggtccattatggctgacatgcaaaatctggtagaaagattggagagggcagtgggccgcctggaggcagtatctcatacctctgacatgcaccgtgggtatgcagacagtccttcaaaagcaggagcagctccatatgtgcaggcatttgactcgctgcttgctggtcctgtggcagagtacttgaagatcagtaaagagattgggggagacgtgcagaaacatgcggagatggtccacacaggtttgaagttggagcgagctctgttggttacagcttctcagtgtcaacagccagcagaaaataagctttccgatttgttggcacccatctcagagcagatcaaagaagtgataacctttcgggagaagaaccgaggcagcaagttgtttaatcacctgtcagctgtcagcgaaagtatccaggccctgggctgggtggctatggctcccaagcctggcccttatgtgaaagaaatgaatgatgccgccatgttttatacaaaccgagtcctcaaagagtacaaagatgtggataagaagcatgtagactgggtcaaagcttatttaagtatatggacagagctgcaggcttacattaaggagttccatac

SEQ ID NO: 336624 - DNA, 739 bp, Artificial Sequence
  derived and/or modified sequence
ctgatcgcagtccggaggcagatatcctccctttcctcctcggctgctgctcttactttgacaagccaggctaacattgaaggtggtccattatggctgacatgcaaaatctggtagaaagattggagagggcagtgggccgcctggaggcagtatctcatacctctgacatgcaccgtgggtatgcagacagtccttcaaaagcaggagcagctccatatgtgcaggcatttgactcgctgcttgctggtcctgtggcagagtacttgaagatcagtaaagagattgggggagacgtgcagaaacatgcggagatggtccacacaggtttgaagttggagcgagctctgttggttacagcttctcagtgtcaacagccagcagaaaataagctttccgatttgttggcacccatctcagagcagatcaaagaagtgataacctttcgggagaagaaccgaggcagcaagttgtttaatcacctgtcagctgtcagcgaaagtatccaggccctgggctgggtggctatggctcccaagcctggcccttatgtgaaagaaatgaatgatgccgccatgttttatacaaaccgagtcctcaaagagtacaaagatgtggataagaagcatgtagactgggtcaaagcttatttaagtatatggacagagctgcaggcttacattaaggagttccataccaccggactggcctggagcaaaacggggcctgtggcaaaaga

SEQ ID NO: 336625 - DNA, 1428 bp, Artificial Sequence
  derived and/or modified sequence
atggccgacatgcagaatctggtagagcgcttagaacgcgccgttgggcgcctggaggctgtgagtcacacctcagacatgcacagaggttatgccgatagtccaagtaaagcgggcgcagccccctatgttcaggccttcgactcactgcttgccgggcccgtcgctgaatacctgaaaatttcaaaggaaattggaggagatgttcagaaacatgccgagatggtccacacggggctaaagttggaacgggccctcttggtaaccgcatcccagtgtcagcagcccgcggagaacaaattgtctgacttgctggctcccatatctgaacagatcaaggaagtcattacgtttcgcgaaaaaaacagaggatccaaactattcaaccacctgtccgctgtttccgagagcatccaggcattgggttgggtcgcaatggcccccaagcctgggccgtatgtgaaagaaatgaacgatgccgcaatgttttacacaaaccgtgtgctaaaagagtacaaggacgtcgacaagaagcacgtcgattgggtgaaagcctatctgagtatttggaccgaactgcaggcatatataaaggagttccatacaactggacttgcctggtcgaaaaccggtcccgtggcaaaagaattgtcagggctaccatctggacctagcgctggttcctgccccccccccccacctccttgccctccacccccacccgtttccaccataagctgttcctatgaatccgcatcccgttcatccctcttcgcccagattaatcagggcgagagcattactcacgctctgaagcacgtgagcgatgacatgaagacccacaaaaaccctgcactgaaggctcagtcaggtcccgtcagaagtgggcctaagcctttctctgctccaaaacctcaaacatcaccctctccaaaacgggccactaaaaaggagccggcagtgctcgaactggaaggtaaaaagtggcgcgtggaaaatcaggagaacgtttccaacctggtgattgaagatacggaactgaagcaagtcgcgtacatttacaaatgtgtgaacacaaccttacagataaaaggcaaaatcaattcaatcactgttgataattgtaaaaaactgggcctcgttttcgatgatgtggtcgggattgtagaaattattaactccaaagatgtaaaagtacaagtgatggggaaagtgcccacgatttctatcaacaagactgatggctgtcacgcctatctttcaaagaactccctagattgtgagatcgtgagtgccaagtctagcgaaatgaacgttttaatccccactgaaggcggagactttaacgagttcccagtaccagagcagttcaaaactctgtggaatggccagaaactggtcactaccgtcactgaaattgcaggttag

SEQ ID NO: 336626 - DNA, 1428 bp, Artificial Sequence
  derived and/or modified sequence
atggctgatatgcagaaccttgtggagaggttagaacgtgctgttgggcgcctagaagccgtgtctcatacaagcgacatgcatagaggatacgccgacagcccctccaaagctggcgcagcaccttacgtgcaggcttttgatagcctgctcgctgggcctgtggcagagtatctcaaaatatccaaagaaatcgggggggatgtccaaaagcatgcggaaatggtgcataccggacttaaacttgagagggctcttttggtcactgctagccaatgccagcagcctgctgagaacaagctgtcagatctgctggcccccattagcgagcagattaaagaagtgattacattcagggaaaaaaatagaggctcaaaactatttaaccacctgtcggcagtctccgagagcatccaggcgctggggtgggtagctatggcacccaaacccggaccatatgttaaggaaatgaacgacgctgccatgttctacaccaaccgggttcttaaagagtacaaggatgtggacaagaagcacgtcgactgggtaaaggcgtacttgtccatttggaccgaactgcaggcatatatcaaagagtttcatacaaccggtctcgcctggtccaagactgggccagtcgcaaaggaactttctggacttccctctggaccctcagccgggtcttgtcctcccccgccaccaccctgccctccacctcctcccgtgagcacaatcagctgctcttacgaatcggccagccggagctccctttttgcgcaaattaatcagggggaaagcataacccatgcgctgaaacatgtatccgacgacatgaaaacacacaagaaccctgccctgaaggcccaatccgggcccgtcagaagcggccctaaacctttttccgctcccaagccccagacttcaccatcgcctaagcgggcaacaaaaaaggaacctgctgtcctggaattagagggaaaaaaatggagagtagagaatcaagaaaacgtatcaaatcttgtgatagaagataccgaattaaagcaggtagcttatatatacaagtgtgtgaacacaaccctgcagattaaaggcaagattaattccataaccgtggacaattgcaaaaagctgggcctggtgtttgatgatgtagtgggaatcgtagagattattaacagcaaggatgtcaaagtgcaagttatgggaaaagtgcctaccattagcatcaataaaacagacggctgccacgcctatctcagcaagaactctctcgattgcgagatcgtgtcagcgaaaagtagtgagatgaacgtgcttattcccactgaagggggagacttcaatgaatttccagtgcctgaacagtttaaaactctgtggaatggacagaaattggtcacaaccgtcaccgagattgcgggctag

SEQ ID NO: 336627 - DNA, 1428 bp, Artificial Sequence
  derived and/or modified sequence
atggcagacatgcagaacctggtcgaaaggcttgagagagcggtgggaagattggaggctgtttcccacacctctgacatgcatcgcgggtatgccgatagtcctagcaaagcaggcgctgctccatatgtgcaggcattcgacagtttactagccggccctgttgcagaatatctcaaaatatccaaggaaatcggaggcgacgttcagaagcacgctgagatggttcacacagggctcaagttggagagagctcttttggtaactgccagtcaatgtcaacaaccagctgagaataagctgagcgacctcttagcccctatttctgagcaaattaaggaagtcattacctttagagaaaagaaccgcggcagcaaattgtttaatcatctgagcgccgtaagcgaatctatccaggctttaggctgggttgcaatggcacctaagccagggccatacgtgaaggagatgaatgacgctgctatgttttacaccaatcgggtgcttaaagagtataaagatgttgataagaaacatgttgactgggtgaaagcgtacctgtctatctggaccgaactccaggcatatatcaaagaattccacacaaccggcctagcctggtctaaaacgggtcctgtggcaaaagaactgtctggactgccctccgggccatccgctggatcgtgcccccctccacctccaccttgccccccgccacctcccgtgagtaccataagttgctcttacgagtccgccagccgtagcagcctgttcgcccaaatcaaccaaggagagtctatcacgcacgcgctcaagcacgtaagtgacgacatgaagacccataaaaatccagccctgaaagcccagtccggccctgttcgcagcggacctaagcctttctctgcccccaaaccacagactagtccaagcccgaaacgcgctacaaaaaaggagccagctgtactggagttagagggaaaaaagtggagagtggaaaaccaggaaaacgtctctaatctcgtgatcgaggatacagaactaaaacaagttgcctatatctacaaatgcgtgaatacaactctgcagatcaagggcaaaatcaattctataacagttgacaactgtaagaagttaggcctggtatttgacgatgtggtcggcattgtggaaattatcaactcgaaggatgtcaaggtgcaggttatgggaaaagtgcctacgatctctatcaacaagaccgatggatgccatgcatacctctcgaagaacagcctggactgcgaaattgtgtctgccaagagttctgagatgaatgtcttgatccccactgagggcggcgactttaacgagttcccagttccagaacagtttaagacgctgtggaatggccagaagctggtcaccaccgttaccgaaatcgctggttag

SEQ ID NO: 336628 - DNA, 627 bp, Artificial Sequence
  derived and/or modified sequence
atggcagacatgcagaatctggtcgagagactcgagagagcagtcggcaggcttgaagccgtcagccatacaagcgatatgcatcgaggctatgcagattctccctctaaagctggcgctgccccatatgttcaagccttcgatagcctactcgccggcccagtggccgaatatctgaagatcagtaaagagatcggtggtgatgtgcagaagcatgccgagatggttcatacaggcctgaagctggagagagcactcctggtgacagcctcccagtgccaacaaccagccgagaacaagctgtccgacttattagcaccaatatctgagcagattaaggaagtcatcacattccgcgaaaaaaatagggggtcaaaactgttcaatcatctgtccgctgtgtccgagtccatccaagctctgggctgggtcgccatggccccgaaacctgggccttacgttaaggaaatgaatgacgctgcaatgttctatacaaaccgagtgttgaaggagtacaaggatgtcgataagaagcacgttgactgggttaaagcatatctgtctatctggactgaattgcaggcgtacatcaaagagtttcacactacagggctcgcctggtcatag

SEQ ID NO: 336629 - DNA, 531 bp, Artificial Sequence
  derived and/or modified sequence
atggccgatatgcagaatctcgtcgaacgcttagagcgtgccgttgggcgccttgaagctgtatcacataccagcgacatgcacagagggtacgcagattcgccatctaaagcaggcgccgccccctacgtacaggcattcgatagtctgctcgccggccctgttgcagagtacttaaagatttccaaagagatcgggggggacgtacagaaacacgcagagatggtacacaccggactgaagctagagcgggctctgttggtgacggcctctcagtgtcagcagccagccgagaacaaactttcagatctactcgctccaatctcggaacagataaaggaggtgattacctttagagagaagaaccgtggcagtaagctcttcaaccatctctctgccgtgagcgagagcattcaggctttgggctgggttgctatggcccccaaaccgggcccgtacgtgaaggagatgaatgacgcagctatgttttatacaaaccgtgtactgaaggagtataaagatgtcgactag

SEQ ID NO: 336630 - DNA, 543 bp, Artificial Sequence
  derived and/or modified sequence
atggccgacatgcagaacctcgttgaacggctcgagagggctgtaggacggttggaagccgtttctcatacctccgacatgcacagaggctacgcagactccccatccaaagcaggagccgcaccctacgtccaggcttttgactctttgcttgccgggccagttgccgagtatttaaagatatccaaagagattggaggagacgtccaaaagcacgcagaaatggttcacaccgggcttaaacttgagagggcactgctggttaccgcgtcacaatgccagcaacctgctgaaaataaactgagcgatctcctggcaccgatctcagagcagataaaagaagtgatcaccttcagggagaagaacaggggatccaaactcttcaatcatctgtccgcagtcagtgagtcaatccaggccctcgggtgggtcgctatggccccaaagcccgggccctacgtgaaagaaatgaatgacgccgctatgttttatactaacagagtcctgaaagaatataaggatgttgacaaaaagcacgtttag

SEQ ID NO: 336631 - DNA, 612 bp, Artificial Sequence
  derived and/or modified sequence
atggctgatatgcagaatctcgttgagagactggagcgcgcggttggccggctggaggcagtgagtcacacatctgacatgcaccgcgggtacgctgattccccttccaaagctggcgcggccccttacgtccaggcctttgactccctcctggcgggacctgtagcagagtacctcaagatatccaaagaaatagggggagatgttcagaagcacgccgaaatggtccacacggggctgaagctggaacgcgctcttctggtgacggcttcacaatgccagcaacctgcagagaataaattgtctgacctgctcgctccgatatccgagcagatcaaggaagttattacctttcgagaaaagaacagaggctcaaaactttttaatcatttgagtgcagttagtgaatccattcaagctctaggttgggtggccatggcacctaaacccggaccgtatgttaaagaaatgaacgatgcagccatgttttacacgaatagagtcctgaaagagtataaggatgttgataagaagcacgtagattgggtgaaggcttatttgtcaatttggacggagctgcaggcctatattaaggagttccacaccacctag

SEQ ID NO: 336632 - DNA, 609 bp, Artificial Sequence
  derived and/or modified sequence
atggctgacatgcaaaacttagtcgaacggttggagcgggctgtgggtcgtctggaggccgtcagtcacacaagtgacatgcatcgcggctacgccgactctccctcaaaggcgggcgcggccccctatgtgcaggcattcgactctctcctggcgggaccagttgccgagtatctgaagatctctaaggaaatcgggggtgacgtacagaaacacgcagaaatggttcacactggtctgaagctcgaaagagctcttcttgtgaccgccagtcagtgtcagcaacccgctgagaacaagctgagtgatctcctggcaccaatttctgagcaaatcaaggaggtgattacatttagggaaaaaaaccgcggatcaaaacttttcaaccatctttcagctgtctctgaatctatacaggcactgggctgggtggccatggcaccgaaaccaggaccctacgtcaaggagatgaacgatgcggcaatgttctatactaacagagtacttaaagagtacaaagatgtggacaaaaagcatgttgattgggttaaagcatatctatctatctggaccgagctgcaagcatacataaaagagttccatacctag

SEQ ID NO: 336633 - DNA, 648 bp, Artificial Sequence
  derived and/or modified sequence
atggccgacatgcaaaatcttgtggaacgcttagagcgagccgtcggacgcctggaagctgtctcacatacttcggatatgcacagaggttacgcagattctccatctaaagctggggccgccccctatgtacaggcctttgactcacttctcgcaggtcctgttgccgagtacctgaaaattagcaaggagatcggcggcgacgttcagaagcacgcagaaatggtgcacacagggcttaaattggagcgcgccctgctggtaaccgcttcccaatgtcaacagcccgcagagaataagctaagcgacttgctagcccctatttccgaacagataaaagaagttataacgtttcgggagaagaacagaggctcgaaattatttaatcatctgtcggcagtgagcgagtccatccaagctctggggtgggtggccatggcgccgaaacctggaccctacgtgaaagagatgaacgacgccgccatgttctatacaaatcgagtccttaaggagtataaggacgttgacaaaaagcacgtggactgggtgaaggcttatctttcaatttggactgagctgcaggcctacatcaaggagtttcatacaacaggtctcgcctggtcaaaaactggcccagtggcaaagtag

SEQ ID NO: 336634 - DNA, 177 bp, Artificial Sequence
  derived and/or modified sequence
atggcagacatgcagaacctcgttgaaagactagaacgcgcagtcggccgtttggaggccgtgtctcacacatctgacatgcatagaggatatgctgacagtccaagcaaagcaggcgccgcaccttacgttcaggcattcgattcactgctggccggtcctgtggccgagtactag

SEQ ID NO: 336635 - DNA, 525 bp, Artificial Sequence
  derived and/or modified sequence
atggccgacatgcagaatctggtggagagactggaacgcgctgtcggccgccttgaggccgtgagccatacatctgatatgcatcggggctacgctgacagcccttccaaagcaggcgctgctccctacgtccaggccttcgatagcctcctcgccggtcccgtcgctgaatacttaaaaatctcaaaagaaattggaggggacgtgcagaaacatgctgaaatggtccatacaggccttaagttggagagggccctccttgttactgcgtctcagtgtcaacaacccgccgagaataagctctctgatcttctggcgcccatctctgaacagatcaaagaggttatcacattccgagaaaagaatcgcggttccaaactgttcaatcacctgtcagcagtatctgagtcgattcaggctctgggatgggtggcaatggcgcccaaacccggaccctatgtgaaagagatgaacgatgcagccatgttctacaccaaccgcgtcctgaaagagtataaagattag

SEQ ID NO: 336636 - DNA, 1359 bp, Artificial Sequence
  derived and/or modified sequence
atggctgatatgcacagaggatacgccgattcaccaagcaaggccggcgccgccccatatgtacaagcattcgatagcctgctggctggtcctgttgcagagtacttgaaaataagcaaagaaatcggcggagacgtccagaaacatgcagaaatggtgcacacaggactcaagctagaacgcgcactcctggttacagcttcacagtgccagcagccagcagagaacaaactgtctgatctgctggcaccaatcagcgaacagatcaaggaggtgataacttttagggaaaaaaacagaggatcgaaactatttaaccatctgagcgcagtgagtgagtcaatacaagccctgggctgggttgcaatggccccaaagcctggtccctacgtgaaggagatgaatgacgcagctatgttttacacaaacagggtgctgaaggaatataaggacgtcgacaagaagcatgtcgattgggttaaagcgtacttatccatttggactgaacttcaggcgtacatcaaagagttccatacaacaggcttggcttggagtaaaaccggtccggttgctaaggaattgtcaggactgccatcgggtccctcagcagggtcctgtccccctcctcctcctccgtgtccaccacctccccctgtgtccacgatctcttgcagttatgagagcgcatcacgatctagtttgtttgcccagattaaccagggagaaagcattacccacgctctgaagcacgtgtccgacgatatgaaaacacataagaatcccgccctcaaggcgcagagcggcccagtgcgcagcggccccaagccctttagcgctcctaaaccacaaacgtccccctctcccaagcgagccaccaagaaggaacccgcggtgttggaattggaaggaaagaaatggcgggtggagaaccaggagaatgttagtaatctggtcatagaagacactgaacttaaacaggtggcatacatatataagtgcgtgaatactacattgcagatcaaaggtaagataaatagcattactgttgataactgtaagaaactgggtctcgtctttgatgatgttgtgggcatcgtagagatcattaatagcaaagacgtaaaggtgcaagtgatgggcaaagtgcccacgatctcgattaacaagacagacggttgccacgcctatctttcgaagaacagcttggactgtgagatagtctcagcaaaatcttctgagatgaacgtgctcattcccacggagggaggggacttcaatgaattccccgtgcctgagcaatttaagacgttgtggaacggccagaagctggttaccacagtaacagagattgcaggctag

SEQ ID NO: 336637 - DNA, 273 bp, Artificial Sequence
  derived and/or modified sequence
ctacgcgcgtgtcatgaaccctgccgagagggccggggctgaggccctcaggccgacccggactcttgggcgcggtctcttgagcaggtggtccattatggctgacatgcaaaatctggtagaaagattggagagggcagtgggccgcctggaggcagtatctcatacctctgacatgcaccgtgggtatgcagacagtccttcaaaagcaggagcagctccatatgtgcaggcatttgactcgctgcttgctggtcctgtggcagagtactt

SEQ ID NO: 336638 - DNA, 681 bp, Artificial Sequence
  derived and/or modified sequence
tttacggactgcagcttaaaggaaccggcctctgccattgagaccaaactgacagaggaactggtcactcttctgttctttccagagaggagcttagccagggacttctgcccttcctgggcccgggcctcgggggcgattccggcaggtggtccattatggctgacatgcaaaatctggtagaaagattggagagggcagtgggccgcctggaggcagtatctcatacctctgacatgcaccgtgggtatgcagacagtccttcaaaagcaggagcagctccatatgtgcaggcatttgactcgctgcttgctggtcctgtggcagagtacttgaagatcagtaaagagattgggggagacgtgcagaaacatgcggagatggtccacacaggtttgaagttggagcgagctctgttggttacagcttctcagtgtcaacagccagcagaaaataagctttccgatttgttggcacccatctcagagcagatcaaagaagtgataacctttcgggagaagaaccgaggcagcaagttgtttaatcacctgtcagctgtcagcgaaagtatccaggccctgggctgggtggctatggctcccaagcctggcccttatgtgaaagaaatgaatgatgccgccatgttttatacaaaccgagtcctcaaagagtacaaagatg

SEQ ID NO: 336639 - DNA, 1428 bp, Artificial Sequence
  derived and/or modified sequence
atggcagatatgcagaaccttgtcgagagacttgagcgcgctgttggccgcctagaagctgtctctcatacatcagacatgcaccgtggttatgccgactctcccagcaaggccggcgccgcaccctatgtacaagcctttgacagtctcctggctggcccagtcgctgagtatctgaaaatcagtaaggaaattgggggcgacgtacaaaagcacgccgagatggtgcacacaggactaaagttagagagagccctgttggtcactgccagtcaatgtcagcaacctgccgagaataaactctccgacctgttagcgccaatttccgagcaaattaaagaagttattacatttagagagaaaaaccgggggtccaagctcttcaaccacctaagtgcagtttccgagagtattcaagccttggggtgggttgctatggcaccaaagcctggcccgtacgtcaaggagatgaatgacgccgcaatgttttatacgaatagagttctgaaagaatacaaggatgtagataagaagcacgtagactgggtgaaggcatacctttcaatctggacagaactgcaggcatatattaaagaatttcatactactggacttgcgtggtccaagacagggcccgtggcaaaagaactgtccggactgccttccggcccctccgctgggagttgtccccctccaccaccaccatgccctccgccccccccagtctccaccatatcttgttcatatgaatccgcctctcgatcttctctgttcgcccaaattaaccagggcgagtccataacgcacgccctaaaacatgtctcagacgacatgaaaacccacaaaaacccagcattaaaagctcagtcaggccccgtccgctctggccccaaaccgttctcagcccctaagccacagacctccccaagtccaaagagagcaacaaagaaggagcccgcggtcctggagttagaaggcaagaagtggcgggtggagaatcaggaaaacgtctcaaatttggttatcgaggacacagagctcaaacaggtcgcttacatttataagtgcgtcaatacaaccctccaaataaaaggtaagatcaacagcataaccgtcgacaactgcaagaaattgggacttgtgtttgatgacgtggttggtatcgtagagatcattaacagcaaagacgtcaaagtgcaggttatgggcaaggttccaactatttccattaacaagactgacgggtgtcacgcttacttgtccaaaaactctcttgattgcgaaattgtgagcgcaaagagttctgagatgaacgttttaatcccaacggagggcggggattttaatgaatttccggtaccagaacagtttaagacactgtggaacggccaaaaacttgtcactaccgttactgaaattgccggctag

SEQ ID NO: 336640 - DNA, 1428 bp, Artificial Sequence
  derived and/or modified sequence
atggccgatatgcagaatctcgtggagaggttggaaagggcggtaggaaggcttgaggcagtatcgcatacatcagacatgcacagaggttatgctgactctccgagtaaagcgggtgctgccccttacgtccaggccttcgattctctgctggccggacctgtggctgagtatttgaaaatatctaaagagataggcggcgatgtacagaagcacgccgagatggtgcataccggactgaaattagaaagagccctactcgtgactgccagtcagtgtcaacagcctgctgaaaacaagctgtcagacctacttgctccaatttctgagcagattaaagaagtgattacctttcgtgaaaaaaacagagggtctaaattgttcaatcatttatcagccgtatcagagagcattcaggcactcggctgggtagctatggccccaaagcctggaccctacgtcaaggaaatgaatgatgccgcgatgttctatactaaccgagtgctgaaagagtacaaagatgtggacaagaaacatgttgattgggtaaaggcatacttatctatctggaccgaattgcaggcctacattaaagagttccacacgactggactggcctggtcaaagaccggacccgtggccaaagaactcagtggacttccctccggacccagcgccggctcatgtcctcctcctccacccccctgcccacctccccctccagtgtcgaccatctcatgctcttacgaatccgcttcgaggtctagcctgttcgcccagataaatcaaggagagtccataacccacgccttgaagcacgtgagcgatgatatgaaaactcataagaaccccgccttaaaagcacaatccgggcccgtacgctccggtcctaagccattttccgctcccaagccccagacttcaccatcgcctaagcgggcaacaaaaaaggaacctgctgtcctggaattagagggaaaaaaatggagagtagagaatcaagaaaacgtatcaaatcttgtgatagaagataccgaattaaagcaggtagcttatatatacaagtgtgtgaacacaaccctgcagattaaaggcaagattaattccataaccgtggacaattgcaaaaagctgggcctggtgtttgatgatgtagtgggaatcgtagagattattaacagcaaggatgtcaaagtgcaagtgatgggcaaagtccccacgatatctataaataaaactgatggatgccacgcctacctatccaaaaactcattagattgcgaaatcgtctcagccaaatcctccgaaatgaacgtgctgattccaaccgagggtggcgactttaatgaatttcccgtgcctgagcaatttaaaacgctgtggaacggccagaagctggtgactaccgtgacggagatagccggatag

SEQ ID NO: 336641 - DNA, 1428 bp, Artificial Sequence
  derived and/or modified sequence
atggccgatatgcagaacctggtggagcgactggagagggcggtgggcaggttggaggctgtgagccacacaagcgatatgcacagaggatatgcagattcgccaagtaaagccggtgccgcaccctacgtccaggcttttgattcactcctcgccggaccagtggccgaatacctgaaaatcagcaaggagatagggggggatgtacagaaacatgcagagatggtgcatacggggctgaagctagagagggcccttttggtgaccgccagtcagtgccagcagcccgcagagaacaagttgtctgacctgttggccccaatctccgagcagatcaaggaggttatcacctttcgcgaaaaaaacaggggaagcaaactgtttaaccatctatccgccgtttctgagtcaattcaagctttgggttgggttgctatggccccgaaacccggaccttacgtgaaagagatgaatgacgcagccatgttctacaccaacagagttctgaaagaatacaaggatgtcgataagaaacatgttgattgggtgaaggcatacctctccatctggaccgaactgcaagcctatattaaagagtttcatacaacaggtttagcatggagtaaaaccggccctgtcgccaaagagttaagcggtctccccagcggtccatcagccggtagctgtccacctcctcctccaccctgtcccccaccaccccccgtgagtacaatctcatgcagctacgagtcagcttcacgtagcagcctctttgcccagattaatcagggtgaaagcatcactcatgcccttaaacatgtaagcgacgacatgaaaacccacaagaatccggccttgaaggcacagagtggccccgtccgatctggtccaaagccattttcagctcctaaaccccagacctctccctctcctaagcgcgcaaccaaaaaagagccagctgtgcttgaactggaaggaaagaagtggcgggtggagaatcaagagaacgtctctaaccttgtgatcgaggatacagagctcaagcaggtagcctatatttataaatgtgtcaacactacgctgcaaataaaaggcaagattaattcaataacagtagacaattgcaagaaactcggtctcgttttcgacgatgtcgtaggtattgtagagattattaactctaaggatgtcaaagtgcaagtcatgggtaaagtgcccacaatctcgattaataaaacagatggatgccacgcctacctcagtaagaacagtttggactgtgaaatcgtctctgcaaagtcaagtgagatgaatgtcctcatcccaaccgagggcggtgattttaacgagtttcccgttcccgagcaattcaagaccctatggaatggccaaaaattagtaaccaccgtgaccgaaatcgccggctag

SEQ ID NO: 336642 - DNA, 627 bp, Artificial Sequence
  derived and/or modified sequence
atggccgatatgcagaatctcgtcgaaaggttggaacgagccgtgggacgtctcgaagccgtgtcacacacgtccgatatgcatcgtgggtatgccgattcaccaagtaaggcaggagctgctccctatgtccaggcgtttgatagccttctcgctggtcccgtggcggaatacttgaagatcagcaaggagatcggtggggatgttcagaaacatgcagagatggttcacaccggactgaaattagagcgagcactgctcgtcactgctagccagtgtcaacagcctgccgaaaacaaactgtccgacttattagcaccaatatctgagcagattaaggaagtcatcacattccgcgaaaaaaatagggggtcaaaactgttcaatcatctgtccgctgtgtccgagtccatccaagctctgggctgggtcgccatggccccgaaacctgggccttacgttaaggaaatgaatgacgctgcaatgttctatacaaaccgagtgttgaaggagtacaaggatgtcgataagaagcacgttgactgggttaaagcatatctgtctatctggactgaattgcaggcgtacatcaaagagtttcacacgaccggtttagcatggagttag

SEQ ID NO: 336643 - DNA, 531 bp, Artificial Sequence
  derived and/or modified sequence
atggcagatatgcagaacctggtagagagactggagcgagccgttgggcggcttgaggcagtgtcgcacacgtcagacatgcacagaggttacgcggattcacccagcaaagccggcgctgccccctatgttcaggcattcgatagtctgctagccggccctgttgccgaatatctgaaaatcagcaaggaaattggcggggatgtccagaaacatgcagaaatggtgcacaccgggctgaagctggaaagagcccttcttgtgaccgcctctcaatgccagcagccagcggagaacaagctgtccgacctactggcccccattagcgaacagatcaaagaggttataacattcagagaaaaaaaccgcggatctaaactttttaatcacttatccgccgtcagtgagtcaatccaggctttagggtgggttgctatggcaccgaagcctgggccctacgtaaaggaaatgaatgacgcagccatgttctatactaaccgtgtgcttaaggaatacaaggatgtggattag

SEQ ID NO: 336644 - DNA, 543 bp, Artificial Sequence
  derived and/or modified sequence
atggcagatatgcagaacctggtcgagcgtctggagagagccgtggggaggctggaagctgtgtcccacacatcagatatgcatagaggctacgccgatagtccaagtaaagccggcgccgcaccttacgttcaagcttttgacagcctgcttgccgggcccgtggctgaatacctgaagatttcaaaggagattggtggagacgtgcaaaaacacgctgagatggttcataccggcctgaagttagaacgcgcccttttagttacagctagtcaatgtcaacagcctgctgaaaacaaactatctgatcttttggccccaatctccgaacagatcaaagaggtgattactttcagagaaaagaatagaggttccaaattatttaatcatctgagtgcagtgagcgaatctatacaggccttgggttgggtcgccatggcccccaaacctggaccgtacgtgaaggaaatgaacgacgcagccatgttctacactaaccgggttttaaaagagtataaggacgtcgacaagaagcatgtatag

SEQ ID NO: 336645 - DNA, 612 bp, Artificial Sequence
  derived and/or modified sequence
atggcagatatgcagaatctcgtagagcgacttgagagggccgtcggcagactcgaagctgtctcccacacaagcgacatgcaccgaggatacgccgattcccccagcaaagctggagccgccccttatgtccaggcatttgactccctactcgccggcccggtcgcagaatacctcaagatatccaaagaaattggtggtgacgtccagaaacatgccgaaatggttcacacgggcctcaaattagagcgggcgctgctggtcaccgcgtctcaatgtcagcaacccgcagagaataagttgagtgacctcctggctcccatctccgagcaaataaaagaagtgatcacttttagggagaaaaatagaggctccaaactcttcaaccatctttccgccgtttcagagagcatccaggccttaggatgggtagctatggcccctaaacctggcccttatgtaaaagaaatgaacgatgcggccatgttctacaccaaccgggtgctgaaagaatataaggatgtggacaagaaacacgtcgactgggtaaaagcatacctttcaatttggaccgaattacaagcatacatcaaggaatttcacactacctag

SEQ ID NO: 336646 - DNA, 609 bp, Artificial Sequence
  derived and/or modified sequence
atggccgacatgcagaacctcgtggaacgtttggaaagagcggtcgggcggctggaagccgtgtctcacacatctgacatgcatcgtggctatgccgattcccccagtaaggcaggtgccgcaccctacgtgcaggccttcgattcactcttggcgggccctgttgccgaatatttaaaaataagtaaggaaataggaggggatgtccaaaagcacgccgaaatggtacataccgggcttaaattggagagggcattgcttgtaaccgcctcccaatgtcaacagcccgctgaaaacaagctgagtgatctcctggcaccaatttctgagcaaatcaaggaggtgattacatttagggaaaaaaaccgcggatcaaaacttttcaaccatctttcagctgtctctgaatctatacaggcactgggctgggtggccatggcaccgaaaccaggaccctacgtcaaggagatgaacgatgcggcaatgttctatactaacagagtacttaaagagtacaaagatgtggacaaaaagcatgttgattgggttaaagcatatctatctatctggaccgagctgcaagcatacataaaagagttccacacctag

SEQ ID NO: 336647 - DNA, 648 bp, Artificial Sequence
  derived and/or modified sequence
atggccgacatgcaaaatcttgtggaacgcttagagcgagccgtcggacgcctggaagctgtctcacatacttcggatatgcacagaggttacgcagattctccatctaaagctggggccgccccctatgtacaggcctttgactcacttctcgcaggtcctgttgccgagtacctgaaaattagcaaggagatcggcggcgacgttcagaagcacgcagaaatggtgcacacagggcttaaattggagcgcgccctgctggtaaccgcttcccaatgtcaacagcccgcagagaataagctctccgatttgcttgctccaatctcagaacaaataaaggaagtaataacattcagggagaaaaatagaggttctaaactgttcaatcacttaagtgctgtgagcgaatccatccaagcacttgggtgggtggctatggctccaaaacccggtccttacgttaaggaaatgaatgacgctgccatgttttacaccaaccgcgtattaaaagaatataaagatgtagataagaagcatgtggattgggtcaaggcttacctgtctatttggaccgaacttcaggcctatattaaagagttccataccaccggcctcgcttggagcaaaaccggccccgtcgctaagtag

SEQ ID NO: 336648 - DNA, 525 bp, Artificial Sequence
  derived and/or modified sequence
atggcagatatgcaaaatttggttgagaggctggaacgcgccgtgggcagactggaagccgtatctcacacatcagacatgcaccgaggctatgcagattccccctccaaagcaggcgccgccccatacgtgcaggctttcgattcactattggccggtccagtcgcagaatatttaaagataagcaaagagatcggtggcgacgtgcagaagcacgcagagatggttcatacgggtctgaaacttgagagagccctgctcgtgacagcttcccagtgtcagcagcccgcggagaacaagttgagcgacctcctcgccccaatttctgaacagattaaggaggtgattacattcagagaaaaaaaccgtggatctaagctgtttaatcacttgagcgctgtgagcgaatctatacaggcattaggctgggttgctatggctccgaagcccggcccttacgtaaaggaaatgaatgatgcagcaatgttttacaccaacagagttcttaaagaatataaggactag

SEQ ID NO: 336649 - DNA, 1359 bp, Artificial Sequence
  derived and/or modified sequence
atggccgatatgcaccggggctatgccgactcaccctccaaggctggcgccgctccatacgtccaggcttttgactctctccttgccggccccgttgccgagtatcttaaaatcagcaaggaaattgggggcgacgtgcagaaacacgcagagatggtgcatactgggttgaagcttgaacgcgccctcctcgtcactgctagccagtgccaacagcccgcagagaataagttgagcgaccttttggccccaattagtgaacagattaaggaagtcataacttttcgggagaagaaccgggggagcaagctgttcaaccatctgtccgcggtgtccgagagtatccaggcactcggatgggtcgcaatggctcccaaacctggtccatatgtcaaggaaatgaatgatgctgccatgttctacactaacagggtgctaaaggaatataaagatgttgacaagaagcacgtcgactgggtcaaagcatatctctctatctggacagagctacaggcctatataaaggaatttcacacaacagggttggcatggtcaaaaacaggcccagtggccaaagagttaagcggtctgccaagtggcccctcagccggatcctgtccaccgcctcctcccccttgcccccctccaccacctgtaagcacaatttcttgtagctacgaatctgcatcacgctcatctctcttcgcacaaatcaaccaaggcgagtccatcactcatgctctcaagcacgtatctgacgatatgaaaacgcacaagaaccccgcattgaaggcccaatccggacctgtgcgctccggcccaaaaccttttagtgcacctaaaccgcagacctctccttcaccgaaacgagccacaaagaaggaacctgctgtgttggaattagagggcaaaaagtggcgggtagagaaccaagaaaacgtttcaaatctggtgattgaggacacagagcttaaacaggtcgcgtacatctacaaatgtgtgaatacgactctgcaaatcaaaggaaagatcaacagcattactgtggacaattgcaaaaagctgggcttggtctttgatgatgtcgtgggtattgtcgaaataataaatagcaaagacgttaaggtgcaggtgatgggtaaagtgccaaccatatcgattaacaagacagacggttgtcatgcttacttgtcgaaaaattctttagactgtgaaattgtatcagctaaatcctccgagatgaacgtgctgattccaaccgaggggggtgattttaacgagtttcccgtccctgagcagttcaagactctgtggaatggacaaaagctcgtaactacagttacggaaattgccggctag

SEQ ID NO: 336650 - DNA, 1442 bp, Artificial Sequence
  derived and/or modified sequence
ggaagcggagagcggctgatcgcagtccggaggtgaggcggaactctgaggtggtccattatggctgacatgcaccgtgggtatgcagacagtccttcaaaagcaggagcagctccatatgtgcaggcatttgactcgctgcttgctggtcctgtggcagagtacttgaagatcagtaaagagattgggggagacgtgcagaaacatgcggagatggtccacacaggtttgaagttggagcgagctctgttggttacagcttctcagtgtcaacagccagcagaaaataagctttccgatttgttggcacccatctcagagcagatcaaagaagtgataacctttcgggagaagaaccgaggcagcaagttgtttaatcacctgtcagctgtcagcgaaagtatccaggccctgggctgggtggctatggctcccaagcctggcccttatgtgaaagaaatgaatgatgccgccatgttttatacaaaccgagtcctcaaagagtacaaagatgtggataagaagcatgtagactgggtcaaagcttatttaagtatatggacagagctgcaggcttacattaaggagttccataccaccggactggcctggagcaaaacggggcctgtggcaaaagaactgagcggactgccatctggaccctctgccggatcatgtcctcctccccctccaccatgcccccctcctcccccagtctctaccatttcatgctcatatgagtctgcttcccgctcatcactgttcgcgcagattaatcagggggagagcattacacatgccctgaaacatgtatctgatgacatgaagactcacaagaaccctgccctgaaggctcagagtggtccagtacgcagtggccccaaaccattctctgcacctaaaccccaaaccagcccatcccccaaacgagccacaaagaaggagccagctgtacttgaactggagggcaagaagtggagagtggaaaatcaggaaaatgtttccaacctggtgattgaggacacagagctgaaacaggtggcttacatatacaagtgtgtcaacacgacattgcaaatcaagggcaaaattaactccattacagtagataactgtaagaaacttggcctggtattcgatgacgtggtgggcattgtggagataatcaacagtaaggatgtcaaagttcaggtaatgggtaaagtgccaaccatatccatcaacaaaacagatggctgccatgcttacctgagcaagaattccctggattgtgaaatagtcagtgccaaatcttccgagatgaatgtcctcattcctacagaaggcggtgactttaatgaattcccagttcctgagcagttcaagaccctatggaacgggcagaagttggtcaccacagtgacagaaattgctggataagcgaagtgccactgggttctttg

SEQ ID NO: 336651 - DNA, 1428 bp, Artificial Sequence
  derived and/or modified sequence
atggccgacatgcagaacctggtggagagactggagagagccgtgggcagactggaggccgtgagccacaccagcgacatgcacagaggctacgccgacagccccagcaaggccggcgccgccccctacgtgcaggccttcgacagcctgctggccggccccgtggccgagtacctgaagatcagcaaggagatcggcggcgacgtgcagaagcacgccgagatggtgcacaccggcctgaagctggagagagccctgctggtgaccgccagccagtgccagcagcccgccgagaacaagctgagcgacctgctggcccccatcagcgagcagatcaaggaggtgatcaccttcagagagaagaacagaggcagcaagctgttcaaccacctgagcgccgtgagcgagagcatccaggccctgggctgggtggccatggcccccaagcccggcccctacgtgaaggagatgaacgacgccgccatgttctacaccaacagagtgctgaaggagtacaaggacgtggacaagaagcacgtggactgggtgaaggcctacctgagcatctggaccgagctgcaggcctacatcaaggagttccacaccaccggcctggcctggagcaagaccggccccgtggccaaggagctgagcggcctgcccagcggccccagcgccggcagctgccccccccccccccccccctgccccccccccccccccgtgagcaccatcagctgcagctacgagagcgccagcagaagcagcctgttcgcccagatcaaccagggcgagagcatcacccacgccctgaagcacgtgagcgacgacatgaagacccacaagaaccccgccctgaaggcccagagcggccccgtgagaagcggccccaagcccttcagcgcccccaagccccagaccagccccagccccaagagagccaccaagaaggagcccgccgtgctggagctggagggcaagaagtggagagtggagaaccaggagaacgtgagcaacctggtgatcgaggacaccgagctgaagcaggtggcctacatctacaagtgcgtgaacaccaccctgcagatcaagggcaagatcaacagcatcaccgtggacaactgcaagaagctgggcctggtgttcgacgacgtggtgggcatcgtggagatcatcaacagcaaggacgtgaaggtgcaggtgatgggcaaggtgcccaccatcagcatcaacaagaccgacggctgccacgcctacctgagcaagaacagcctggactgcgagatcgtgagcgccaagagcagcgagatgaacgtgctgatccccaccgagggcggcgacttcaacgagttccccgtgcccgagcagttcaagaccctgtggaacggccagaagctggtgaccaccgtgaccgagatcgccggctag

SEQ ID NO: 336652 - DNA, 627 bp, Artificial Sequence
  derived and/or modified sequence
atggccgacatgcagaacctggtggagagactggagagagccgtgggcagactggaggccgtgagccacaccagcgacatgcacagaggctacgccgacagccccagcaaggccggcgccgccccctacgtgcaggccttcgacagcctgctggccggccccgtggccgagtacctgaagatcagcaaggagatcggcggcgacgtgcagaagcacgccgagatggtgcacaccggcctgaagctggagagagccctgctggtgaccgccagccagtgccagcagcccgccgagaacaagctgagcgacctgctggcccccatcagcgagcagatcaaggaggtgatcaccttcagagagaagaacagaggcagcaagctgttcaaccacctgagcgccgtgagcgagagcatccaggccctgggctgggtggccatggcccccaagcccggcccctacgtgaaggagatgaacgacgccgccatgttctacaccaacagagtgctgaaggagtacaaggacgtggacaagaagcacgtggactgggtgaaggcctacctgagcatctggaccgagctgcaggcctacatcaaggagttccacaccaccggcctggcctggagctag

SEQ ID NO: 336653 - DNA, 531 bp, Artificial Sequence
  derived and/or modified sequence
atggccgacatgcagaacctggtggagagactggagagagccgtgggcagactggaggccgtgagccacaccagcgacatgcacagaggctacgccgacagccccagcaaggccggcgccgccccctacgtgcaggccttcgacagcctgctggccggccccgtggccgagtacctgaagatcagcaaggagatcggcggcgacgtgcagaagcacgccgagatggtgcacaccggcctgaagctggagagagccctgctggtgaccgccagccagtgccagcagcccgccgagaacaagctgagcgacctgctggcccccatcagcgagcagatcaaggaggtgatcaccttcagagagaagaacagaggcagcaagctgttcaaccacctgagcgccgtgagcgagagcatccaggccctgggctgggtggccatggcccccaagcccggcccctacgtgaaggagatgaacgacgccgccatgttctacaccaacagagtgctgaaggagtacaaggacgtggactag

SEQ ID NO: 336654 - DNA, 543 bp, Artificial Sequence
  derived and/or modified sequence
atggccgacatgcagaacctggtggagagactggagagagccgtgggcagactggaggccgtgagccacaccagcgacatgcacagaggctacgccgacagccccagcaaggccggcgccgccccctacgtgcaggccttcgacagcctgctggccggccccgtggccgagtacctgaagatcagcaaggagatcggcggcgacgtgcagaagcacgccgagatggtgcacaccggcctgaagctggagagagccctgctggtgaccgccagccagtgccagcagcccgccgagaacaagctgagcgacctgctggcccccatcagcgagcagatcaaggaggtgatcaccttcagagagaagaacagaggcagcaagctgttcaaccacctgagcgccgtgagcgagagcatccaggccctgggctgggtggccatggcccccaagcccggcccctacgtgaaggagatgaacgacgccgccatgttctacaccaacagagtgctgaaggagtacaaggacgtggacaagaagcacgtgtag

SEQ ID NO: 336655 - DNA, 612 bp, Artificial Sequence
  derived and/or modified sequence
atggccgacatgcagaacctggtggagagactggagagagccgtgggcagactggaggccgtgagccacaccagcgacatgcacagaggctacgccgacagccccagcaaggccggcgccgccccctacgtgcaggccttcgacagcctgctggccggccccgtggccgagtacctgaagatcagcaaggagatcggcggcgacgtgcagaagcacgccgagatggtgcacaccggcctgaagctggagagagccctgctggtgaccgccagccagtgccagcagcccgccgagaacaagctgagcgacctgctggcccccatcagcgagcagatcaaggaggtgatcaccttcagagagaagaacagaggcagcaagctgttcaaccacctgagcgccgtgagcgagagcatccaggccctgggctgggtggccatggcccccaagcccggcccctacgtgaaggagatgaacgacgccgccatgttctacaccaacagagtgctgaaggagtacaaggacgtggacaagaagcacgtggactgggtgaaggcctacctgagcatctggaccgagctgcaggcctacatcaaggagttccacaccacctag

SEQ ID NO: 336656 - DNA, 609 bp, Artificial Sequence
  derived and/or modified sequence
atggccgacatgcagaacctggtggagagactggagagagccgtgggcagactggaggccgtgagccacaccagcgacatgcacagaggctacgccgacagccccagcaaggccggcgccgccccctacgtgcaggccttcgacagcctgctggccggccccgtggccgagtacctgaagatcagcaaggagatcggcggcgacgtgcagaagcacgccgagatggtgcacaccggcctgaagctggagagagccctgctggtgaccgccagccagtgccagcagcccgccgagaacaagctgagcgacctgctggcccccatcagcgagcagatcaaggaggtgatcaccttcagagagaagaacagaggcagcaagctgttcaaccacctgagcgccgtgagcgagagcatccaggccctgggctgggtggccatggcccccaagcccggcccctacgtgaaggagatgaacgacgccgccatgttctacaccaacagagtgctgaaggagtacaaggacgtggacaagaagcacgtggactgggtgaaggcctacctgagcatctggaccgagctgcaggcctacatcaaggagttccacacctag

SEQ ID NO: 336657 - DNA, 648 bp, Artificial Sequence
  derived and/or modified sequence
atggccgacatgcagaacctggtggagagactggagagagccgtgggcagactggaggccgtgagccacaccagcgacatgcacagaggctacgccgacagccccagcaaggccggcgccgccccctacgtgcaggccttcgacagcctgctggccggccccgtggccgagtacctgaagatcagcaaggagatcggcggcgacgtgcagaagcacgccgagatggtgcacaccggcctgaagctggagagagccctgctggtgaccgccagccagtgccagcagcccgccgagaacaagctgagcgacctgctggcccccatcagcgagcagatcaaggaggtgatcaccttcagagagaagaacagaggcagcaagctgttcaaccacctgagcgccgtgagcgagagcatccaggccctgggctgggtggccatggcccccaagcccggcccctacgtgaaggagatgaacgacgccgccatgttctacaccaacagagtgctgaaggagtacaaggacgtggacaagaagcacgtggactgggtgaaggcctacctgagcatctggaccgagctgcaggcctacatcaaggagttccacaccaccggcctggcctggagcaagaccggccccgtggccaagtag

SEQ ID NO: 336658 - DNA, 177 bp, Artificial Sequence
  derived and/or modified sequence
atggccgacatgcagaacctggtggagagactggagagagccgtgggcagactggaggccgtgagccacaccagcgacatgcacagaggctacgccgacagccccagcaaggccggcgccgccccctacgtgcaggccttcgacagcctgctggccggccccgtggccgagtactag

SEQ ID NO: 336659 - DNA, 525 bp, Artificial Sequence
  derived and/or modified sequence
atggccgacatgcagaacctggtggagagactggagagagccgtgggcagactggaggccgtgagccacaccagcgacatgcacagaggctacgccgacagccccagcaaggccggcgccgccccctacgtgcaggccttcgacagcctgctggccggccccgtggccgagtacctgaagatcagcaaggagatcggcggcgacgtgcagaagcacgccgagatggtgcacaccggcctgaagctggagagagccctgctggtgaccgccagccagtgccagcagcccgccgagaacaagctgagcgacctgctggcccccatcagcgagcagatcaaggaggtgatcaccttcagagagaagaacagaggcagcaagctgttcaaccacctgagcgccgtgagcgagagcatccaggccctgggctgggtggccatggcccccaagcccggcccctacgtgaaggagatgaacgacgccgccatgttctacaccaacagagtgctgaaggagtacaaggactag

SEQ ID NO: 336660 - DNA, 1359 bp, Artificial Sequence
  derived and/or modified sequence
atggccgacatgcacagaggctacgccgacagccccagcaaggccggcgccgccccctacgtgcaggccttcgacagcctgctggccggccccgtggccgagtacctgaagatcagcaaggagatcggcggcgacgtgcagaagcacgccgagatggtgcacaccggcctgaagctggagagagccctgctggtgaccgccagccagtgccagcagcccgccgagaacaagctgagcgacctgctggcccccatcagcgagcagatcaaggaggtgatcaccttcagagagaagaacagaggcagcaagctgttcaaccacctgagcgccgtgagcgagagcatccaggccctgggctgggtggccatggcccccaagcccggcccctacgtgaaggagatgaacgacgccgccatgttctacaccaacagagtgctgaaggagtacaaggacgtggacaagaagcacgtggactgggtgaaggcctacctgagcatctggaccgagctgcaggcctacatcaaggagttccacaccaccggcctggcctggagcaagaccggccccgtggccaaggagctgagcggcctgcccagcggccccagcgccggcagctgccccccccccccccccccctgccccccccccccccccgtgagcaccatcagctgcagctacgagagcgccagcagaagcagcctgttcgcccagatcaaccagggcgagagcatcacccacgccctgaagcacgtgagcgacgacatgaagacccacaagaaccccgccctgaaggcccagagcggccccgtgagaagcggccccaagcccttcagcgcccccaagccccagaccagccccagccccaagagagccaccaagaaggagcccgccgtgctggagctggagggcaagaagtggagagtggagaaccaggagaacgtgagcaacctggtgatcgaggacaccgagctgaagcaggtggcctacatctacaagtgcgtgaacaccaccctgcagatcaagggcaagatcaacagcatcaccgtggacaactgcaagaagctgggcctggtgttcgacgacgtggtgggcatcgtggagatcatcaacagcaaggacgtgaaggtgcaggtgatgggcaaggtgcccaccatcagcatcaacaagaccgacggctgccacgcctacctgagcaagaacagcctggactgcgagatcgtgagcgccaagagcagcgagatgaacgtgctgatccccaccgagggcggcgacttcaacgagttccccgtgcccgagcagttcaagaccctgtggaacggccagaagctggtgaccaccgtgaccgagatcgccggctag

SEQ ID NO: 336661 - DNA, 1428 bp, Artificial Sequence
  derived and/or modified sequence
atggccgatatgcagaacttagtggaacgactagagagagccgttgggaggctcgaagcggtctcccacacaagcgatatgcataggggctacgccgattccccctctaaggcgggagctgccccgtacgtccaggccttcgattcgttgcttgctggacctgttgcagagtacttaaagatcagcaaggagatcggcggtgatgtacagaaacacgcagaaatggtgcacaccggcctcaaacttgaaagagccttgctggttacggcctcgcagtgtcagcagcctgcagaaaataagctgtctgacctcctcgcgcccatatccgaacagattaaggaggttattaccttccgcgaaaaaaatagaggatccaagctgttcaatcacctctctgcagtcagtgaaagtatacaagccttgggatgggtagctatggccccaaagcccggcccgtacgtgaaggagatgaacgatgccgcaatgttctacaccaatagagtgctgaaggagtataaggacgtagacaaaaaacacgtggactgggttaaagcctacctcagcatttggaccgaactgcaggcctacatcaaggaatttcacactactggcttagcttggagcaagaccggtccagtcgctaaggagctgagcggcctgcccagtggtccgtctgcggggagctgccctccaccaccacctccctgtccacccccccctccagtgtccaccatttcatgtagctatgaaagcgcaagtcgatcttcattattcgcacagatcaatcagggggaaagcattacccacgctctcaagcacgttagcgacgacatgaaaacgcataaaaaccctgcactgaaggcacagagcggacccgttcggtctggtccaaaacctttcagtgcccctaaaccccagacgagccctagtcctaagcgcgccaccaagaaagaacccgccgtactcgaactagaagggaagaagtggcgcgtggaaaaccaggagaatgtgtccaatttagttattgaggatacagagttgaaacaggtggcctacatatacaaatgcgttaacaccacactccagatcaaagggaagataaactctatcacagttgacaactgcaaaaaactcggtctagtgttcgacgatgtagtgggcattgtggagattattaacagcaaagatgtcaaggtgcaggtgatgggcaaggtgcctacgatcagtataaataagacagatgggtgccacgcttatctgtcaaagaatagtcttgattgtgagatcgtgagtgccaaatcttcagagatgaatgtgttgatccctaccgaggggggggactttaatgagttccctgtgccggaacagtttaaaacactgtggaatggacagaagctggtaaccaccgttactgaaattgccgggtag

SEQ ID NO: 336662 - DNA, 1428 bp, Artificial Sequence
  derived and/or modified sequence
atggcagatatgcaaaatctggtcgagcgcctagagcgggccgtgggcagattagaggctgtgagtcatacctccgacatgcatcgaggatatgccgactccccttctaaggccggggctgcaccctacgtgcaggctttcgactcgcttctcgccggaccagtggccgagtacttgaagatttcaaaagagattggcggggatgtccagaagcacgccgaaatggtgcataccggcctgaagctggaaagggctctgctggtgaccgcctcccaatgccagcagcctgccgagaataagctatcggacctgctggctcccatatccgaacaaatcaaagaggtgatcaccttcagagagaaaaatcgaggcagtaaactgttcaaccacttatctgccgtctccgagtctattcaggcactgggttgggtggccatggcacccaagcccggaccttacgtcaaggaaatgaacgacgccgccatgttttataccaatagggttctgaaagaatacaaagacgtagataagaagcatgtcgactgggttaaggcgtatctgtccatctggactgaattgcaggcttacataaaagagttccacacgacaggcttggcctggtcaaagactggccctgttgcgaaagagctctctggcctgccgagcggtccgtccgcaggatcttgtcccccccctcccccgccatgtcctccccctcctccagtgtctacaattagctgctcttatgaaagtgcaagtagaagcagcctcttcgcacaaatcaatcagggcgagagtatcacccacgccctcaaacacgtgtccgatgacatgaaaacccataagaatcctgctttaaaggcccagtcagggcctgtgcgcagcggccctaagcctttcagtgcccctaagcctcagacaagtccctcacctaaacgcgctaccaaaaaagaacccgcagttcttgagcttgagggcaagaagtggcgcgtggagaaccaagaaaacgtctccaatcttgttatcgaagataccgagcttaagcaggtggcgtatatttacaagtgcgtcaacacaacactgcaaatcaaaggaaagattaatagcataaccgtggataactgtaagaagttaggactggtctttgacgatgtcgtgggcatcgtcgagattattaattcgaaggatgtaaaagttcaagtgatgggcaaggtcccgacaatcagcatcaacaaaaccgacggttgccacgcctacttaagtaagaatagtcttgactgcgagatagtaagcgctaaatctagtgaaatgaatgtgctcattcccacagagggaggcgacttcaatgagtttcccgtcccggaacaatttaaaactctgtggaatggccagaaactggtgacaaccgtcaccgaaatcgctggttag

SEQ ID NO: 336663 - DNA, 1428 bp, Artificial Sequence
  derived and/or modified sequence
atggctgacatgcagaatctagtggagcggctggagcgggccgttgggaggttggaggcagtcagccacacctcggatatgcataggggttacgcggacagcccttcgaaggctggtgcagcgccatacgtgcaggcctttgactccttgctcgccggcccggtggccgagtatcttaaaatttctaaggagattggtggtgacgtacaaaagcacgccgagatggtgcacaccggactgaaactcgaaagggcacttctggtaacagcatcacaatgtcagcagcccgccgagaacaaactgtctgacctcctggccccaatatcagagcagattaaagaagtaataacctttcgagagaaaaacagggggtctaagctttttaaccacctgtctgccgtgtccgaaagcattcaggccctcgggtgggtggccatggcgcctaaacccgggccatatgtaaaagaaatgaacgacgcagctatgttctataccaaccgcgtgctgaaggaatacaaagatgtcgataaaaagcatgtggattgggtgaaggcgtacttgagtatctggacagagttgcaggcctacattaaggagtttcacacaaccggtctggcctggtccaaaaccggtcccgtagcaaaggaactttctggacttccatctggtcccagcgctggaagttgcccacccccccctcctccgtgtccacccccaccacctgtgtctactatctcttgcagctacgagtcggcttcccgctcaagcctgtttgctcagatcaaccagggagagtcaatcactcatgccctgaaacatgtctccgatgatatgaagactcataagaatcccgctctgaaagcgcagtcaggccctgtgagatccggcccaaagccctttagtgcaccgaagccccagacatctccgagtcccaagcgagctacaaagaaggaaccagccgttttggaactggaagggaagaaatggcgagttgagaaccaagagaacgtatccaatctggttattgaggataccgaactcaagcaggtggcctacatttataagtgtgtcaataccacgttacagatcaagggcaagatcaattccatcacagtggacaactgtaaaaagctggggttggtgtttgatgacgtggtcggcattgttgagattattaattctaaggacgtgaaagttcaggtgatgggaaaggtacccacgattagcatcaacaagaccgacggctgccacgcctacctatctaagaattcccttgactgtgagattgtttctgccaagagctccgagatgaatgtgctcattccgactgagggcggagattttaacgagttccctgtgccggagcagtttaaaacgttgtggaatggtcaaaagctggtcacaactgtaacagaaatcgctgggtag

SEQ ID NO: 336664 - DNA, 627 bp, Artificial Sequence
  derived and/or modified sequence
atggccgacatgcagaacctggttgagagactggaacgcgccgtagggaggctcgaggctgtgtcacatacttccgacatgcatcgaggatatgcggactccccgtccaaagctggggcagcaccctatgttcaagctttcgacagtctactcgccggcccagtcgctgaatacctgaaaatttcaaaagaaattggaggtgacgtgcagaaacatgccgagatggtacataccggcctgaagctagagagggcactcttggttactgcttctcagtgtcagcagcctgcggaaaataagctttccgatctgctggcacctatcagcgagcagatcaaagaggtaattaccttcagggaaaagaaccggggatcaaagctgttcaatcatctttccgctgtctctgagtctattcaggcactaggctgggtcgcgatggcaccaaaacccgggccgtacgttaaggaaatgaatgacgcggccatgttttacacaaatcgcgtgctgaaggaatataaagacgtcgataagaagcacgtggattgggttaaggcctacttgagtatttggaccgaattgcaggcctacatcaaggaatttcacactacagggctcgcctggtcctag

SEQ ID NO: 336665 - DNA, 531 bp, Artificial Sequence
  derived and/or modified sequence
atggctgacatgcagaatttagtggagcggcttgaacgagccgtaggccgcctcgaggctgtgagtcatacgtccgacatgcatcgggggtatgccgacagccctagtaaggctggggccgccccttacgtgcaggccttcgacagcctgttggccgggcccgtggcggaatatcttaagatctccaaggaaatcgggggggatgtccagaaacacgcagagatggtgcataccgggttgaagctagaacgggctctgcttgtgactgcatctcagtgccagcagcccgctgaaaataagctctctgatctgctagcccctatctctgaacagataaaggaagttatcacattcagggagaaaaacagaggaagcaagctgtttaatcatctaagcgctgtctctgaaagcattcaagcattaggctgggtcgccatggcacccaagccaggaccatacgtaaaggaaatgaatgatgcagcaatgttctacactaaccgcgtcctgaaggagtataaggatgtggattag

SEQ ID NO: 336666 - DNA, 543 bp, Artificial Sequence
  derived and/or modified sequence
atggccgacatgcagaacttggttgaacgactggagagagccgttggacggctagaagccgtatctcatacttctgacatgcacagggggtatgccgactcaccctccaaggccggtgcagcaccgtacgttcaggcctttgactcgttactcgccggacctgtggccgaatatctcaagatttcaaaagaaattgggggggatgtacagaaacacgctgagatggtgcataccggcctgaagctcgaaagggccttactggtaacagcaagtcagtgccagcagccagctgagaacaagctttccgatctgttagcaccaatctcggagcagatcaaagaggtcatcacttttagggaaaaaaaccggggcagcaaactgtttaaccacctgtccgcagtatcagaaagcattcaggccctaggatgggtggctatggcacccaagcccgggccatatgtcaaagaaatgaacgacgcggcaatgttttacactaatcgtgtcctgaaagagtacaaggacgtggataagaaacatgtgtag

SEQ ID NO: 336667 - DNA, 612 bp, Artificial Sequence
  derived and/or modified sequence
atggcagatatgcagaacctggtggagcgtctggagcgagccgtggggcgtctcgaagctgtgtcacatacctctgatatgcaccgggggtacgccgactcaccttcaaaagcgggcgccgccccatacgtgcaagctttcgattctcttctggctggacctgtcgctgaatatttaaagatttcaaaagaaatcgggggagacgtccaaaagcacgccgaaatggtccacaccggtctcaaattagagagggctctgctggtaactgccagtcagtgccagcagcccgcggaaaacaagctctcagacctgttggccccaataagcgagcaaattaaggaggtgattacatttcgcgaaaaaaaccgggggtctaaactgtttaatcatctgtccgcagtcagcgaaagcattcaggccctgggctgggtggcaatggcccctaagcccggcccgtacgtgaaggagatgaacgacgccgccatgttttatacaaaccgcgtcctaaaggaatataaggatgtcgataagaaacacgtcgactgggtcaaggcatatctaagcatttggactgagctgcaggcttacatcaaggaatttcacacaacttag

SEQ ID NO: 336668 - DNA, 609 bp, Artificial Sequence
  derived and/or modified sequence
atggccgatatgcagaatctggtcgaaaggctggagcgcgccgtcggcaggctcgaagcagtgtctcacacctcagatatgcatcgaggttacgccgactctccttctaaagcaggggcagccccatatgtccaagcttttgacagtctcctcgctgggcctgtcgcggagtacctcaagatctcgaaagagatagggggtgacgtgcagaagcatgcagagatggttcacactggactcaagctagagcgggccttattagtgaccgcatctcaatgtcagcagcctgccgaaaacaaattgagcgatctgctagcccccatctcggaacaaatcaaggaggtgattactttccgcgagaaaaatcgaggctccaaattgttcaaccacttatctgctgtgagtgaatcaattcaggcactcggctgggtggccatggcaccaaaaccaggtccatatgttaaggagatgaacgatgccgccatgttctatacaaatcgcgtgcttaaagagtataaagatgtggacaagaaacacgtggactgggtgaaggcctatctaagtatttggactgaacttcaagcttatataaaggaattccacacttag

SEQ ID NO: 336669 - DNA, 648 bp, Artificial Sequence
  derived and/or modified sequence
atggctgatatgcagaacttagttgaacggttggaacgagccgtcgggcgcctcgaagctgtgagccatacctctgatatgcataggggctacgcggactcaccatcgaaggccggtgccgcgccatacgtgcaggcctttgactcccttttggcaggacctgttgctgagtacctcaagatcagcaaggaaatcgggggcgatgtccagaagcacgcagagatggtgcacacaggtttaaaacttgagagggcactccttgtgactgccagtcagtgccagcagccagctgagaataagctaagcgacctcctggctcccatctctgagcagattaaagaggtcatcacttttcgggaaaaaaatcgcgggtccaaactatttaaccacctatctgctgtttccgagagcatccaggcgctggggtgggttgctatggctcctaaacctggcccttatgtcaaggaaatgaacgatgccgccatgttttacacaaatagggtcctcaaggaatacaaggacgtggataagaagcatgtggactgggtgaaggcctacttatccatctggacagagcttcaggcctacattaaagagttccacactaccggcctggcttggtccaaaactggtcccgtcgcgaaatag

SEQ ID NO: 336670 - DNA, 177 bp, Artificial Sequence
  derived and/or modified sequence
atggctgacatgcagaacctagtagaaagactggagagggcagtcggaagactggaggccgtgagccacaccagcgacatgcaccgcggctatgccgacagccccagcaaggcgggcgctgcgccatatgtgcaagccttcgactctctccttgcaggacccgttgcggagtattag

SEQ ID NO: 336671 - DNA, 525 bp, Artificial Sequence
  derived and/or modified sequence
atggcggatatgcagaacctggtggaaagactggagagggctgttgggcgattggaggctgtctcgcacacctctgatatgcatcgcggctacgcagactccccgagcaaagcgggtgccgccccctacgtgcaggcatttgatagcctgctggctggacccgtggccgagtatctgaagatcagtaaagaaatcggcggggatgtccagaaacatgctgaaatggtgcacaccggcttgaagctggagagggctctgttagtgacagccagtcagtgtcagcagccagcagagaacaaactgtcagacctcttggccccaataagcgagcaaataaaggaggtgattaccttccgcgaaaaaaatagggggtccaaattgtttaatcacctcagtgctgtctccgaatcaatacaggctttggggtgggtggcgatggcaccgaagcctgggccctatgtgaaagaaatgaacgatgccgctatgttttatactaaccgcgttctgaaggagtacaaagactag

SEQ ID NO: 336672 - DNA, 1359 bp, Artificial Sequence
  derived and/or modified sequence
atggccgatatgcaccgcggctatgcagactctccctcaaaggcaggagcagccccctacgtacaggccttcgattctctgctcgccggacccgtagcagagtatctcaagatcagcaaagagattggcggcgacgtacagaagcacgccgaaatggtgcacacaggtttaaagctcgaacgcgcactactagtaacagcaagtcagtgccagcagccagctgagaataagttgtccgacctgctggcgccaattagtgagcagattaaagaagttatcaccttccgcgaaaaaaatagaggtagcaagctgtttaatcatctctctgccgtctctgaatcaattcaggctctcggctgggtggccatggcgccgaagcctggcccttatgtgaaggagatgaacgatgccgccatgttctataccaatcgcgttcttaaagagtacaaagacgtcgacaaaaaacatgtcgactgggtaaaggcctatctctccatttggaccgagctccaagcatacatcaaagagtttcacaccacaggactcgcctggtcaaaaaccggccccgtcgcaaaagaactgtctggcttgcctagcggcccctccgcaggaagttgtcctccccccccccccccttgcccacctccacctcctgtgagtaccatctcgtgttcttacgaaagtgcgtcacgctcctccttgttcgcccaaatcaaccagggcgaaagcatcactcacgctttgaaacatgtgtcagatgacatgaaaacacataaaaaccccgcgctgaaggcacagagtggcccggtgcggtcggggccgaaacccttcagtgctcctaagccccaaaccagtcccagtccaaagagagccacaaagaaggagcctgcagtccttgaactggaaggaaagaaatggagggttgagaaccaagaaaatgtgtctaacctggtgatcgaggataccgagcttaagcaggtggcctatatatacaaatgcgtgaatacgacacttcagataaaaggtaagattaacagcatcaccgtggacaactgcaagaaactcggactagtgttcgatgatgtagtcgggattgtggagattattaactctaaagatgttaaagtccaggtaatggggaaggtgcccacaattagcatcaacaagacagacggttgccacgcctatttaagtaagaactcgttggattgtgagattgtgagcgccaaaagttcagagatgaatgtgctgatccccaccgaggggggcgacttcaacgagtttccggtcccagaacagttcaagaccctgtggaacggccagaaactggtcacaaccgtaactgagatcgccggttag

SEQ ID NO: 336673 - DNA, 1428 bp, Artificial Sequence
  derived and/or modified sequence
atggctgacatgcagaacctggtggagcggctggagagagctgtgggccgcctggaggccgtgagccacaccagtgacatgcaccggggctacgccgacagccccagcaaggccggggccgccccctacgtgcaggcctttgacagcctgctggccggccctgtggccgagtacctgaagatcagcaaggagattggaggagatgtgcagaagcatgctgagatggtgcacacaggcctgaagctggagcgggccctgctggtgacagccagccagtgccagcagcctgctgagaacaagctgagtgacctgctggcccccatcagcgagcagatcaaggaggtgatcaccttccgggagaagaacagaggcagcaagctgttcaaccacctgtctgctgtgtctgagagcatccaggccctgggctgggtggccatggcccccaagccaggcccctacgtgaaggagatgaatgatgctgccatgttctacaccaacagagtgctgaaggagtacaaggatgtggacaagaagcacgtggactgggtgaaggcctacctgagcatctggacagagctgcaggcctacatcaaggagttccacaccaccggcctggcctggagcaagacaggccctgtggccaaggagctgagcggcctgcccagcggccccagcgctggcagctgccccccacctcctccaccctgccccccacctcctcctgtgtccaccatcagctgcagctatgaaagtgccagccgcagcagcctgtttgcccagatcaaccagggcgagagcatcacccacgccctgaagcacgtgtctgatgacatgaagacccacaagaacccagccctgaaggcccagagcggccctgtgcgcagcggccccaagcccttcagcgcccccaagccccagaccagccccagccccaagagggccaccaagaaggagcctgctgtgctggagctggagggcaagaagtggagggtggagaaccaggagaatgtgagcaacctggtgattgaggacacagagctgaagcaggtggcctacatctacaagtgtgtgaacaccaccctgcagatcaagggcaagatcaacagcatcaccgtggacaactgcaagaagctgggcctggtgtttgatgatgtggtgggcatcgtggagatcatcaacagcaaggatgtgaaggtgcaggtgatgggcaaggtgcccaccatcagcatcaacaagacagatggctgccacgcctacctgagcaagaacagcctggactgtgaaattgtgtctgccaagagcagcgagatgaatgtgctgatccccacagaaggaggagacttcaatgagttccctgtgcctgagcagttcaagaccctgtggaatggccagaagctggtgaccaccgtgacagaaattgctggatag

SEQ ID NO: 336674 - DNA, 1496 bp, Artificial Sequence
  derived and/or modified sequence
gccggaagcggagagcggctgatcgcagtccggaggtgaggcggaactctgagcaggtggtccattatggctgacatgcaaaatctggtagaaagattggagagggcagtgggccgcctggaggcagtatctcatacctctgacatgcaccgtgggtatgcagacagtccttcaaaagcaggagcagctccatatgtgcaggcatttgactcgctgcttgctggtcctgtggcagagtacttgaagatcagtaaagagattgggggagacgtgcagaaacatgcggagatggtccacacaggtttgaagttggagcgagctctgttggttacagcttctcagtgtcaacagccagcagaaaataagctttccgatttgttggcacccatctcagagcagatcaaagaagtgataacctttcgggagaagaaccgaggcagcaagttgtttaatcacctgtcagctgtcagcgaaagtatccaggccctgggctgggtggctatggctcccaagcctggcccttatgtgaaagaaatgaatgatgccgccatgttttatacaaaccgagtcctcaaagagtacaaagatgtggataagaagcatgtagactgggtcaaagcttatttaagtatatggacagagctgcaggcttacattaaggagttccataccaccggactggcctggagcaaaacggggcctgtggcaaaagaactgagcggactgccatctggaccctctgccggatcatgtcctcctccccctccaccatgcccccctcctcccccagtctctaccatttcatgctcatatgagtctgcttcccgctcatcactgttcgcgcagattaatcagggggagagcattacacatgccctgaaacatgtatctgatgacatgaagactcacaagaaccctgccctgaaggctcagagtggtccagtacgcagtggccccaaaccattctctgcacctaaaccccaaaccagcccatcccccaaacgagccacaaagaaggagccagctgtacttgaactggagggcaagaagtggagagtggaaaatcaggaaaatgtttccaacctggtgattgaggacacagagctgaaacaggtggcttacatatacaagtgtgtcaacacgacattgcaaatcaagggcaaaattaactccattacagtagataactgtaagaaacttggcctggtattcgatgacgtggtgggcattgtggagataatcaacagtaaggatgtcaaagttcaggtaatgggtaaagtgccaaccatatccatcaacaaaacagatggctgccatgcttacctgagcaagaattccctggattgtgaaatagtcagtgccaaatcttccgagatgaatgtcctcattcctacagaaggcggtgactttaatgaattcccagttcctgagcagttcaagaccctatggaacgggcagaagttggtcaccacagtgacagaaattgctggataagc

SEQ ID NO: 336675 - DNA, 3105 bp, Artificial Sequence
  derived and/or modified sequence
gcggagcgtggcctcgatcaccaccgagagctgacggccgcccggattcccgccctcagagaatcctggcccccagtcgttccaagaccctttacggactgcagcttaaaggaaccggcctctgccattgagaccaaactgacagaggaactggtcactcttctgttctttccagagaggagcttagccagggacttctgcccttcctgggcccgggcctcgggggcgattccgggtaggtaaagcggaacgagggcgtggcctctcttgtgagcccgccctccccgtgtcgctcccgccttgagggcggggctctttcccaagtgccctctgtgagagccgggccgctctctccggggcgtggcgaagaggggcggagtcacgagcggggcggtgagacttcctgcccagtcgcgggccagcctagcgcttcagccggcggctcatttccggtgggggcgccgcgcccagtgagggcccggaagtgggtcgcgcggagattgctgggcggttcttgccggaagcggagagcggctgatcgcagtccggaggtggtccattatggctgacatgcaaaatctggtagaaagattggagagggcagtgggccgcctggaggcagtatctcatacctctgacatgcaccgtgggtatgcagacagtccttcaaaagcaggagcagctccatatgtgcaggcatttgactcgctgcttgctggtcctgtggcagagtacttgaagatcagtaaagagattgggggagacgtgcagaaacatgcggagatggtccacacaggtttgaagttggagcgagctctgttggttacagcttctcagtgtcaacagccagcagaaaataagctttccgatttgttggcacccatctcagagcagatcaaagaagtgataacctttcgggagaagaaccgaggcagcaagttgtttaatcacctgtcagctgtcagcgaaagtatccaggccctgggctgggtggctatggctcccaagcctggcccttatgtgaaagaaatgaatgatgccgccatgttttatacaaaccgagtcctcaaagagtacaaagatgtggataagaagcatgtagactgggtcaaagcttatttaagtatatggacagagctgcaggcttacattaaggagttccataccaccggactggcctggagcaaaacggggcctgtggcaaaagaactgagcggactgccatctggaccctctgccggatcatgtcctcctccccctccaccatgcccccctcctcccccagtctctaccatttcatgctcatatgagtctgcttcccgctcatcactgttcgcgcagattaatcagggggagagcattacacatgccctgaaacatgtatctgatgacatgaagactcacaagaaccctgccctgaaggctcagagtggtccagtacgcagtggccccaaaccattctctgcacctaaaccccaaaccagcccatcccccaaacgagccacaaagaaggagccagctgtacttgaactggagggcaagaagtggagagtggaaaatcaggaaaatgtttccaacctggtgattgaggacacagagctgaaacaggtggcttacatatacaagtgtgtcaacacgacattgcaaatcaagggcaaaattaactccattacagtagataactgtaagaaacttggcctggtattcgatgacgtggtgggcattgtggagataatcaacagtaaggatgtcaaagttcaggtaatgggtaaagtgccaaccatatccatcaacaaaacagatggctgccatgcttacctgagcaagaattccctggattgtgaaatagtcagtgccaaatcttccgagatgaatgtcctcattcctacagaaggcggtgactttaatgaattcccagttcctgagcagttcaagaccctatggaacgggcagaagttggtcaccacagtgacagaaattgctggataagcgaagtgccactgggttctttgccctcccttcacaccatgggataaatctgtatcaagacggttcttttctagatttcctctacctttttgctcttaaaactgcttctctgctctgagaagcacagctacctgccttcactgaaatatacctcaggctgaaatttggggtgggatagcaggtcagttgatcttctgcaggaaggtgcagcttttccatatcagctcaaccacgccgccagtccattcttaaggaactgccgactaggactgatgatgcattttagctttgagcttttgggggttattctaccaacaaacagtccattggaaagaaaacagtccctggaattaacagatcagaatgttcacactggttaatctttttttaacaatgagcatgaaggtagcagaagctggtgtgtttccagatggttcttctaaccaaactaatttttcactgttgacaagcgaggcaagggttgcactggaccaaaggctgaggcttggccatctagcattccatacaaaattgtttcctataagcattccttttattctctattctatcctgggtctgcctcaaccgtgagataggagagtctctggtactagctgctgtagcagtgcccttcatccagggcagttaatggagtcttggaccctttctttctctgggatccctgcccagcaccttcctatagagatgactttaaaaggaaaaaaaaaaaaaaaaaaacccacatgatttcaaggagtctggcattcctgaatccttcttccctgccaggtgcctgtcacctgtcttcactgcctccttttccctgtcatgctcatcagcttatggcttctgtctaagcacctgaacagaggactgaaacctccactgcaggctggttttaggtcttgaattatgtaagaatcttgcacagcactgctaatgtaaatttcagttgtttttccctctaggacaaacacttaccaaaatatgcaacttttttttggtgggaagagagattgtcctgtgatttctacccatttcctgaggcctgtggaaataaacctttatgtacttaaagttatacagaaaatagaataaagttaataccaaacttgc

SEQ ID NO: 336676 - DNA, 2217 bp, Artificial Sequence
  derived and/or modified sequence
gagcggctgatcgcagtccggaggtgaggcggaactctgaggtggtccattatggctgacatgcaaaatctggtagaaagattggagagggcagtgggccgcctggaggcagtatctcatacctctgacatgcaccgtgggtatgcagacagtccttcaaaagcaggagcagctccatatgtgcaggcatttgactcgctgcttgctggtcctgtggcagagtacttgaagatcagtaaagagattgggggagacgtgcagaaacatgcggagatggtccacacaggtttgaagttggagcgagctctgttggttacagcttctcagtgtcaacagccagcagaaaataagctttccgatttgttggcacccatctcagagcagatcaaagaagtgataacctttcgggagaagaaccgaggcagcaagttgtttaatcacctgtcagctgtcagcgaaagtatccaggccctgggctgggtggctatggctcccaagcctggcccttatgtgaaagaaatgaatgatgccgccatgttttatacaaaccgagtcctcaaagagtacaaagatgtggataagaagcatgtagactgggtcaaagcttatttaagtatatggacagagctgcaggcttacattaaggagttccataccaccggactggcctggagcaaaacggggcctgtggcaaaagaactgagcggactgccatctggaccctctgccggatcatgtcctcctccccctccaccatgcccccctcctcccccagtctctaccatttcatgctcatatgagtctgcttcccgctcatcactgttcgcgcagattaatcagggggagagcattacacatgccctgaaacatgtatctgatgacatgaagactcacaagaaccctgccctgaaggctcagagtggtccagtacgcagtggccccaaaccattctctgcacctaaaccccaaaccagcccatcccccaaacgagccacaaagaaggagccagctgtacttgaactggagggcaagaagtggagagtggaaaatcaggaaaatgtttccaacctggtgattgaggacacagagctgaaacaggtggcttacatatacaagtgtgtcaacacgacattgcaaatcaagggcaaaattaactccattacagtagataactgtaagaaacttggcctggtattcgatgacgtggtgggcattgtggagataatcaacagtaaggatgtcaaagttcaggtaatgggtaaagtgccaaccatatccatcaacaaaacagatggctgccatgcttacctgagcaagaattccctggattgtgaaatagtcagtgccaaatcttccgagatgaatgtcctcattcctacagaaggcggtgactttaatgaattcccagttcctgagcagttcaagaccctatggaacgggcagaagttggtcaccacagtgacagaaattgctggataagcgaagtgccactgggttctttgccctcccttcacaccatgggataaatctgtatcaagacggttcttttctagatttcctctacctttttgctcttaaaactgcttctctgctctgagaagcacagctacctgccttcactgaaatatacctcaggctgaaatttggggtgggatagcaggtcagttgatcttctgcaggaaggtgcagcttttccatatcagctcaaccacgccgccagtccattcttaaggaactgccgactaggactgatgatgcattttagctttgagcttttgggggttattctaccaacaaacagtccattggaaagaaaacagtccctggaattaacagatcagaatgttcacactggttaatctttttttaacaatgagcatgaaggtagcagaagctggtgtgtttccagatggttcttctaaccaaactaatttttcactgttgacaagcgaggcaagggttgcactggaccaaaggctgaggcttggccatctagcattccatacaaaattgtttcctataagcattccttttattctctattctatcctgggtctgcctcaaccgtgagataggagagtctctggtactagctgctgtagcagtgcccttcatccagggcagttaatggagtcttggaccctttctttctctgggatccctgcccagcaccttcctatagagatgactttaaaaggaaaaaaaaaaaaaaaaaaa

SEQ ID NO: 336677 - DNA, 627 bp, Artificial Sequence
  derived and/or modified sequence
atggctgacatgcagaacctggtggagcggctggagagagctgtgggccgcctggaggccgtgagccacaccagtgacatgcaccggggctacgccgacagccccagcaaggccggggccgccccctacgtgcaggcctttgacagcctgctggccggccctgtggccgagtacctgaagatcagcaaggagattggaggagatgtgcagaagcatgctgagatggtgcacacaggcctgaagctggagcgggccctgctggtgacagccagccagtgccagcagcctgctgagaacaagctgagtgacctgctggcccccatcagcgagcagatcaaggaggtgatcaccttccgggagaagaacagaggcagcaagctgttcaaccacctgtctgctgtgtctgagagcatccaggccctgggctgggtggccatggcccccaagccaggcccctacgtgaaggagatgaatgatgctgccatgttctacaccaacagagtgctgaaggagtacaaggatgtggacaagaagcacgtggactgggtgaaggcctacctgagcatctggacagagctgcaggcctacatcaaggagttccacaccaccggcctggcctggagctag

SEQ ID NO: 336678 - DNA, 531 bp, Artificial Sequence
  derived and/or modified sequence
atggctgacatgcagaacctggtggagcggctggagagagctgtgggccgcctggaggccgtgagccacaccagtgacatgcaccggggctacgccgacagccccagcaaggccggggccgccccctacgtgcaggcctttgacagcctgctggccggccctgtggccgagtacctgaagatcagcaaggagattggaggagatgtgcagaagcatgctgagatggtgcacacaggcctgaagctggagcgggccctgctggtgacagccagccagtgccagcagcctgctgagaacaagctgagtgacctgctggcccccatcagcgagcagatcaaggaggtgatcaccttccgggagaagaacagaggcagcaagctgttcaaccacctgtctgctgtgtctgagagcatccaggccctgggctgggtggccatggcccccaagccaggcccctacgtgaaggagatgaatgatgctgccatgttctacaccaacagagtgctgaaggagtacaaggatgtggactag

SEQ ID NO: 336679 - DNA, 543 bp, Artificial Sequence
  derived and/or modified sequence
atggctgacatgcagaacctggtggagcggctggagagagctgtgggccgcctggaggccgtgagccacaccagtgacatgcaccggggctacgccgacagccccagcaaggccggggccgccccctacgtgcaggcctttgacagcctgctggccggccctgtggccgagtacctgaagatcagcaaggagattggaggagatgtgcagaagcatgctgagatggtgcacacaggcctgaagctggagcgggccctgctggtgacagccagccagtgccagcagcctgctgagaacaagctgagtgacctgctggcccccatcagcgagcagatcaaggaggtgatcaccttccgggagaagaacagaggcagcaagctgttcaaccacctgtctgctgtgtctgagagcatccaggccctgggctgggtggccatggcccccaagccaggcccctacgtgaaggagatgaatgatgctgccatgttctacaccaacagagtgctgaaggagtacaaggatgtggacaagaagcacgtgtag

SEQ ID NO: 336680 - DNA, 612 bp, Artificial Sequence
  derived and/or modified sequence
atggctgacatgcagaacctggtggagcggctggagagagctgtgggccgcctggaggccgtgagccacaccagtgacatgcaccggggctacgccgacagccccagcaaggccggggccgccccctacgtgcaggcctttgacagcctgctggccggccctgtggccgagtacctgaagatcagcaaggagattggaggagatgtgcagaagcatgctgagatggtgcacacaggcctgaagctggagcgggccctgctggtgacagccagccagtgccagcagcctgctgagaacaagctgagtgacctgctggcccccatcagcgagcagatcaaggaggtgatcaccttccgggagaagaacagaggcagcaagctgttcaaccacctgtctgctgtgtctgagagcatccaggccctgggctgggtggccatggcccccaagccaggcccctacgtgaaggagatgaatgatgctgccatgttctacaccaacagagtgctgaaggagtacaaggatgtggacaagaagcacgtggactgggtgaaggcctacctgagcatctggacagagctgcaggcctacatcaaggagttccacaccacctag

SEQ ID NO: 336681 - DNA, 609 bp, Artificial Sequence
  derived and/or modified sequence
atggctgacatgcagaacctggtggagcggctggagagagctgtgggccgcctggaggccgtgagccacaccagtgacatgcaccggggctacgccgacagccccagcaaggccggggccgccccctacgtgcaggcctttgacagcctgctggccggccctgtggccgagtacctgaagatcagcaaggagattggaggagatgtgcagaagcatgctgagatggtgcacacaggcctgaagctggagcgggccctgctggtgacagccagccagtgccagcagcctgctgagaacaagctgagtgacctgctggcccccatcagcgagcagatcaaggaggtgatcaccttccgggagaagaacagaggcagcaagctgttcaaccacctgtctgctgtgtctgagagcatccaggccctgggctgggtggccatggcccccaagccaggcccctacgtgaaggagatgaatgatgctgccatgttctacaccaacagagtgctgaaggagtacaaggatgtggacaagaagcacgtggactgggtgaaggcctacctgagcatctggacagagctgcaggcctacatcaaggagttccacacctag

SEQ ID NO: 336682 - DNA, 648 bp, Artificial Sequence
  derived and/or modified sequence
atggctgacatgcagaacctggtggagcggctggagagagctgtgggccgcctggaggccgtgagccacaccagtgacatgcaccggggctacgccgacagccccagcaaggccggggccgccccctacgtgcaggcctttgacagcctgctggccggccctgtggccgagtacctgaagatcagcaaggagattggaggagatgtgcagaagcatgctgagatggtgcacacaggcctgaagctggagcgggccctgctggtgacagccagccagtgccagcagcctgctgagaacaagctgagtgacctgctggcccccatcagcgagcagatcaaggaggtgatcaccttccgggagaagaacagaggcagcaagctgttcaaccacctgtctgctgtgtctgagagcatccaggccctgggctgggtggccatggcccccaagccaggcccctacgtgaaggagatgaatgatgctgccatgttctacaccaacagagtgctgaaggagtacaaggatgtggacaagaagcacgtggactgggtgaaggcctacctgagcatctggacagagctgcaggcctacatcaaggagttccacaccaccggcctggcctggagcaagacaggccctgtggccaagtag

SEQ ID NO: 336683 - DNA, 177 bp, Artificial Sequence
  derived and/or modified sequence
atggctgacatgcagaacctggtggagcggctggagagagctgtgggccgcctggaggccgtgagccacaccagtgacatgcaccggggctacgccgacagccccagcaaggccggggccgccccctacgtgcaggcctttgacagcctgctggccggccctgtggccgagtactag

SEQ ID NO: 336684 - DNA, 525 bp, Artificial Sequence
  derived and/or modified sequence
atggctgacatgcagaacctggtggagcggctggagagagctgtgggccgcctggaggccgtgagccacaccagtgacatgcaccggggctacgccgacagccccagcaaggccggggccgccccctacgtgcaggcctttgacagcctgctggccggccctgtggccgagtacctgaagatcagcaaggagattggaggagatgtgcagaagcatgctgagatggtgcacacaggcctgaagctggagcgggccctgctggtgacagccagccagtgccagcagcctgctgagaacaagctgagtgacctgctggcccccatcagcgagcagatcaaggaggtgatcaccttccgggagaagaacagaggcagcaagctgttcaaccacctgtctgctgtgtctgagagcatccaggccctgggctgggtggccatggcccccaagccaggcccctacgtgaaggagatgaatgatgctgccatgttctacaccaacagagtgctgaaggagtacaaggactag

SEQ ID NO: 336685 - DNA, 1359 bp, Artificial Sequence
  derived and/or modified sequence
atggctgacatgcaccggggctatgctgacagccccagcaaggccggggccgccccctacgtgcaggcctttgacagcctgctggccggccctgtggccgagtacctgaagatcagcaaggagattggaggagatgtgcagaagcacgccgagatggtgcacacaggcctgaagctggagcgggccctgctggtgacagccagccagtgccagcagcctgctgagaacaagctgagtgacctgctggcccccatcagcgagcagatcaaggaggtgatcaccttccgggagaagaacagaggcagcaagctgttcaaccacctgtctgctgtgtctgagagcatccaggccctgggctgggtggccatggcccccaagccaggcccctacgtgaaggagatgaatgatgctgccatgttctacaccaacagagtgctgaaggagtacaaggatgtggacaagaagcacgtggactgggtgaaggcctacctgagcatctggacagagctgcaggcctacatcaaggagttccacaccaccggcctggcctggagcaagacaggccctgtggccaaggagctgagcggcctgcccagcggccccagcgctggcagctgccccccacctcctccaccctgccccccacctcctcctgtgtccaccatcagctgcagctatgagagcgccagccgcagcagcctgtttgcccagatcaaccagggcgagagcatcacccacgccctgaagcacgtgtctgatgacatgaagacccacaagaacccagccctgaaggcccagagcggccctgtgcgcagcggccccaagcccttcagcgcccccaagccccagaccagccccagccccaagagggccaccaagaaggagcctgctgtgctggagctggagggcaagaagtggagggtggagaaccaggagaatgtgagcaacctggtgattgaggacacagagctgaagcaggtggcctacatctacaagtgtgtgaacaccaccctgcagatcaagggcaagatcaacagcatcaccgtggacaactgcaagaagctgggcctggtgtttgatgatgtggtgggcatcgtggagatcatcaacagcaaggatgtgaaggtgcaggtgatgggcaaggtgcccaccatcagcatcaacaagacagatggctgccacgcctacctgagcaagaacagcctggactgtgagatcgtgtctgccaagagcagcgagatgaatgtgctgatccccacagagggcggggacttcaatgagttccctgtgcctgagcagttcaagaccctgtggaatggccagaagctggtgaccaccgtgacagaaattgctggatag

SEQ ID NO: 336686 - DNA, 1428 bp, Artificial Sequence
  derived and/or modified sequence
atggccgacatgcagaacctggtggagcggctggagcgggccgtgggacgcctcgaagcggtgagccacaccagtgatatgcacagaggctacgccgattcaccatctaaggctggggcagcgccgtatgtgcaggctttcgattcactgctggctggccctgtcgcagagtatctgaaaatatcaaaagaaatcggaggcgacgtgcagaaacacgctgagatggtgcacacaggactgaagctcgagcgcgctttgctggtcactgctagtcagtgtcagcagcctgcagagaacaaactgtccgacctattggccccaatcagcgagcagataaaggaggtgatcacattccgcgaaaagaaccggggctcaaaattgtttaaccatctgagcgccgtgtctgaaagtatccaggccctgggttgggtcgctatggcaccaaaacccggcccatatgtaaaggaaatgaatgatgctgccatgttttacacaaatcgggtgctaaaggagtataaggatgtggataaaaagcacgtggattgggttaaagcttacttgtccatttggactgagctgcaggcatacatcaaagaatttcataccaccggcctggcctggagcaagacgggacctgtcgcaaaggaactctcgggcctaccatcgggaccatcagccggatcgtgccctcccccgccacccccatgtccacctcctcctcccgtctccacaatcagttgtagttacgagtccgccagcaggtccagcctgttcgcacagatcaatcaaggggaatcaattacccacgcacttaaacatgtctctgacgacatgaaaacccataagaacccggctctgaaagcacagtcagggcccgtacggtctggccctaaaccattttccgcaccaaaaccacagacaagccccagtcccaaacgcgcaacaaagaaagaacccgccgtgttggagctggaggggaagaagtggagggtcgaaaatcaggagaatgtgtccaatctggtcattgaggacacagaactgaaacaagtggcgtacatttacaaatgcgtgaacaccaccttgcagataaaaggaaaaataaactcaataaccgtagacaactgcaagaaactcggcttggtgtttgatgatgttgtgggtattgtggaaatcatcaactcaaaggatgttaaagtgcaagtgatgggcaaagtcccaacaatcagcatcaacaagaccgatggctgccatgcatatctgtcgaagaattctctggactgcgagatcgtgtctgcaaaaagctcggaaatgaacgtcctgatcccaaccgaggggggcgattttaacgagtttcctgtgccagagcagttcaaaacattgtggaacggacagaagctggttaccacagtgaccgagatcgccggctag

SEQ ID NO: 336687 - DNA, 1428 bp, Artificial Sequence
  derived and/or modified sequence
atggccgacatgcagaacctggtggagcggctggagcgggccgtggggcggctcgaagccgttagccatacctccgacatgcaccgaggttatgcagatagcccctcaaaggcaggagccgctccctacgtgcaggcttttgacagcctgctggcgggcccagttgcggagtatctcaaaatctctaaagagataggtggcgacgttcaaaagcacgccgagatggtgcacactggtctgaagctcgagcgcgcactattagtaaccgcttctcaatgccagcagcccgcggaaaacaagttgtcagatttgctcgccccaatatctgaacagatcaaagaagtcatcacttttcgggagaagaatagagggagcaagttgtttaatcatctttcagccgtatcagagagcattcaggccctggggtgggtcgccatggcacccaagcctgggccctacgtgaaagaaatgaacgacgcagccatgttttataccaaccgagtcctgaaggagtacaaagacgtcgacaagaagcatgtagattgggtcaaagcctacttaagtatttggaccgaactgcaggcatacataaaagaatttcatactacaggactcgcatggtcaaaaactgggcccgtggctaaagaattgtcaggccttccaagcggcccctccgcaggcagctgcccgccaccaccacctccgtgcccaccacctccgcctgtatctacaatcagctgctcatacgaatctgcttcgcgatcatcgttgttcgcccagattaatcagggtgagagcatcacacacgccctcaagcacgtttcagatgacatgaagactcataagaatcctgctcttaaagcacagtcgggtcccgtgcgctcaggcccaaagccgttctccgcaccaaagccacagacctctcctagccccaagcgcgcaacaaagaaggagccggctgtgcttgaactggaaggaaaaaaatggcgagtggaaaatcaggaaaatgtgagcaatctcgtgatcgaggacacagaactgaaacaggttgcatacatctataagtgcgtgaacacgacactgcagatcaaaggtaagattaatagcatcacagtagataattgcaaaaagcttggattggtgttcgatgatgtcgtaggcatcgttgaaattatcaatagtaaagacgtcaaggtgcaagtcatgggcaaagttcccacaatcagcattaataaaaccgatggctgtcatgcctatctcagtaagaattccctggactgcgagattgtgagtgccaagagtagcgagatgaatgtgctgatccccactgagggcggtgacttcaatgagtttcccgttcccgaacagtttaaaacactgtggaacggccaaaaattggtgaccacagtcacagagatagctggctag

SEQ ID NO: 336688 - DNA, 1428 bp, Artificial Sequence
  derived and/or modified sequence
atggccgacatgcagaacctggtggagcggctggagcgggccgtgggtaggctggaagctgtcagtcacaccagtgatatgcataggggttacgcggactcaccttcaaaggcgggggccgccccctatgttcaggccttcgattccctcctggccggccctgtggctgagtatttgaaaattagcaaggagatcgggggcgacgtccaaaaacacgccgagatggtacacacaggtttaaagctggaaagggcattgctcgtgactgcctcccagtgccaacagcccgcagagaacaagctgagtgatctgctggcacctatctctgagcagatcaaagaggttatcacttttcgggaaaagaacagggggagcaagctcttcaaccacctgtcagctgtgtcagaatccatccaagcattgggctgggttgcaatggcacccaaaccagggccatatgtgaaggaaatgaatgacgccgcgatgttttacaccaatcgggttttaaaggagtataaggacgtggacaagaagcacgtcgattgggtgaaagcctatctgtccatatggaccgagctgcaagcctacattaaagagtttcacacgacggggctggcatggtccaagaccggacccgtcgcgaaggaattgtccggcttaccctctggaccaagtgcggggtcctgtcctccccctccgcccccatgtccccctcctcctcccgtctccacaatcagctgttcctacgagtccgcatcacgctctagcttgtttgcccagatcaatcagggggaatccataacgcacgccttgaagcatgtgagcgacgatatgaagacgcacaaaaaccccgctttgaaagcccagagcggccctgtgcgctcaggaccaaaaccattttccgcccccaagccccagacatcaccaagtccaaagagggccaccaagaaggaacctgccgtcctcgaactggaggggaagaagtggcgggttgaaaatcaggagaacgtgagtaacctggtaatagaggatacggagctcaagcaggtggcttacatttataaatgtgtgaacaccaccttacaaataaagggcaagattaattctatcaccgtcgataactgcaagaaattgggcctggtcttcgatgatgtggtgggcatcgtggagataatcaacagtaaggacgtaaaggttcaagtgatgggcaaggtgccgaccatctccatcaacaaaaccgatggctgccacgcctacctcagtaaaaactcgctggattgcgaaatcgtgtccgcaaaatcttccgaaatgaacgtccttattcccaccgagggtggagatttcaacgagttcccagttcccgagcaattcaagactctgtggaacggtcagaagcttgttacaaccgttacagaaatagcgggttag

SEQ ID NO: 336689 - DNA, 627 bp, Artificial Sequence
  derived and/or modified sequence
atggccgacatgcagaacctggtggagcggctggagcgggccgtgggacgtctggaggctgtgtctcacacatccgacatgcaccgcggttacgcagactcgccctcaaaggcgggcgctgccccttacgtgcaggctttcgacagcctgctggcgggtccggttgcagaatacttgaagattagcaaggagataggtggggatgtccagaaacatgctgaaatggtgcacaccgggttgaaacttgagagagccctgctggttacagcttcacagtgtcagcagcctgcagagaataagctgtctgacttattagctcctattagtgagcagattaaggaggtcatcacattcagagagaagaaccgcgggtcaaagcttttcaaccatctgtccgccgtctctgagtctatccaagccctgggctgggtggccatggctccaaaaccaggcccttacgtcaaagagatgaatgacgctgcaatgttttacacgaacagagtgctgaaggagtacaaggacgtggacaagaagcacgtagattgggtgaaagcatatttgagcatttggactgaattgcaggcctacatcaaggagttccacacaaccggtctggcatggagctag

SEQ ID NO: 336690 - DNA, 531 bp, Artificial Sequence
  derived and/or modified sequence
atggccgacatgcagaacctggtggagcggctggagcgggccgtgggccgcctggaggctgtatctcacacctcagatatgcaccgcggttacgctgactcacctagcaaagcgggggccgctccctacgtgcaggcattcgattcactacttgctggtcctgtcgctgaatacctgaagatcagtaaggagattggcggcgatgtccagaaacatgcagagatggtgcacactggtcttaagctggagcgggcattgctcgtcacagcgagccaatgccaacagcccgccgagaataaactgagtgaccttctggcccctattagtgagcaaattaaggaagtgattacatttcgtgagaaaaaccgcggaagcaagctgttcaatcacctcagcgctgtgtctgagtctattcaggcactgggttgggtggctatggctccaaagcctgggccatacgtcaaagaaatgaatgacgctgccatgttttacacaaatagagtgctgaaggaatataaggacgtagactag

SEQ ID NO: 336691 - DNA, 543 bp, Artificial Sequence
  derived and/or modified sequence
atggccgacatgcagaacctggtggagcggctggagcgggccgtggggcggcttgaagctgtatcacacacgagcgatatgcatcgaggttacgccgacagcccttcaaaagccggcgcggccccatacgtgcaggcctttgattcacttttggctggacctgtggctgaatatttgaagattagcaaggagatcgggggggacgtacaaaaacacgctgagatggttcacaccggcttgaaactcgaaagagccctcttagtgaccgcttcacagtgtcagcaacccgcggaaaacaaactatcagatttgctggcacctatctcagaacaaatcaaagaggtgattacctttagggagaagaaccgaggcagtaagctcttcaatcatctctctgccgtgagcgagagtatacaggctcttggctgggtggccatggcgcccaagcctggcccttatgttaaggaaatgaatgacgccgctatgttttacaccaatagagtgctcaaagaatacaaggacgtggacaaaaagcatgtgtag

SEQ ID NO: 336692 - DNA, 612 bp, Artificial Sequence
  derived and/or modified sequence
atggccgacatgcagaacctggtggagcggctggagcgggccgtgggacggctggaagccgtgtctcacacctcagacatgcatcggggttatgctgactcccccagtaaggcaggtgctgccccgtacgtccaggcttttgattccctgttagcgggccccgtggccgagtatctcaaaatctccaaggagatcggaggggatgtacaaaagcacgccgagatggttcatacaggtctgaaactggagagggctttgttggtcactgcttcacagtgtcagcagcctgccgaaaacaaactatctgacttattggcccccattagtgagcagatcaaagaagtaattacattcagggagaagaaccggggtagcaagcttttcaatcatctcagcgcggtgtcggagtcaatccaggccctggggtgggttgctatggctccgaagccggggccctatgttaaagagatgaatgatgccgccatgttctacaccaatcgagttttaaaggaatacaaggacgtggacaagaagcacgtggactgggttaaggcatacctaagcatctggacagagctccaggcatatattaaagaattccatactacctag

SEQ ID NO: 336693 - DNA, 609 bp, Artificial Sequence
  derived and/or modified sequence
atggccgacatgcagaacctggtggagcggctggagcgggccgtggggcggctagaagccgtgtctcacacctcggatatgcacagaggttatgccgactctcccagtaaggcaggagcggccccctatgtccaggccttcgactccctattggctggacccgtcgccgagtatctgaagatatccaaggaaattggtggcgacgtgcagaagcacgctgagatggtccatacgggactgaagctcgagcgggcgctcctggtgactgcttcacagtgccagcagcctgcggagaataagctgtccgatctgctcgcgcccatatcagaacagatcaaggaagtaatcacctttagagagaagaaccgcggctctaaactgtttaatcacctctctgctgtaagtgaaagtattcaggccctgggctgggtggccatggccccaaagccgggtccgtatgttaaagagatgaatgacgccgccatgttctacaccaatagagttctcaaggaatataaggatgtggacaaaaaacacgtcgattgggtgaaggcatacttaagtatttggacagagcttcaggcatacattaaagaattccatacatag

SEQ ID NO: 336694 - DNA, 648 bp, Artificial Sequence
  derived and/or modified sequence
atggccgacatgcagaacctggtggagcggctggagcgggccgtgggtcggctggaggcagtttctcacacctccgacatgcatagaggttacgccgattcgccctcaaaagctggtgccgcgccctacgtgcaagcttttgatagtttattggctgggcctgtggcagagtatctgaaaatcagcaaggagattggtggcgacgttcaaaaacatgcggagatggtgcacaccggactgaaactggagcgggcactcctagttactgccagccaatgtcagcagcctgccgagaacaaactgagtgacttgctcgctcccatcagcgaacagatcaaggaagtgataacgttcagggagaagaatcgtggctccaaattattcaaccatttgtctgcagtcagtgaatccatccaagccctggggtgggttgctatggctcctaaacctggaccatacgtgaaggagatgaatgacgctgccatgttctatacaaacagagtgttgaaggaatacaaagatgttgacaaaaagcacgttgactgggttaaggcctatctctctatttggaccgaactccaggcatacatcaaggagttccacacaaccggactcgcatggtcaaagacaggccctgtggccaagtag

SEQ ID NO: 336695 - DNA, 177 bp, Artificial Sequence
  derived and/or modified sequence
atggccgacatgcagaacctggtggagcggctggagcgggccgtgggaaggctggaggcagtgagccacacaagcgacatgcaccggggctacgcggactccccctctaaagcaggggccgccccttatgtgcaggcatttgattcactgctcgcagggcccgtggccgagtactag

SEQ ID NO: 336696 - DNA, 525 bp, Artificial Sequence
  derived and/or modified sequence
atggccgacatgcagaacctggtggagcggctggagcgggccgtgggtagactcgaggccgttagccacacatctgacatgcaccggggatatgctgactcaccaagcaaggctggcgccgctccctacgtccaggcctttgattccctattggcaggtccggtggccgagtatcttaagatatccaaggagatcggcggcgacgtgcagaaacatgcagagatggtgcatactgggttgaaacttgagcgggcattgttggtgaccgcctcccagtgccagcagcctgccgagaacaaactgtccgacctgttagctcctatatctgagcaaattaaggaggttattacatttcgcgagaaaaacagaggttcaaagctctttaaccacctctctgctgtgagcgagtctattcaagcactcggctgggttgccatggcacccaaacccggaccttatgtgaaggagatgaatgatgccgctatgttctacacaaaccgggtcctcaaagagtataaggactag

SEQ ID NO: 336697 - RNA, 1428 nt, Artificial Sequence
  derived and/or modified sequence
auggccgacaugcagaaucugguagagcgcuuagaacgcgccguugggcgccuggaggcugugagucacaccucagacaugcacagagguuaugccgauaguccaaguaaagcgggcgcagcccccuauguucaggccuucgacucacugcuugccgggcccgucgcugaauaccugaaaauuucaaaggaaauuggaggagauguucagaaacaugccgagaugguccacacggggcuaaaguuggaacgggcccucuugguaaccgcaucccagugucagcagcccgcggagaacaaauugucugacuugcuggcucccauaucugaacagaucaaggaagucauuacguuucgcgaaaaaaacagaggauccaaacuauucaaccaccuguccgcuguuuccgagagcauccaggcauuggguugggucgcaauggcccccaagccugggccguaugugaaagaaaugaacgaugccgcaauguuuuacacaaaccgugugcuaaaagaguacaaggacgucgacaagaagcacgucgauugggugaaagccuaucugaguauuuggaccgaacugcaggcauauauaaaggaguuccauacaacuggacuugccuggucgaaaaccggucccguggcaaaagaauugucagggcuaccaucuggaccuagcgcugguuccugccccccccccccaccuccuugcccuccacccccacccguuuccaccauaagcuguuccuaugaauccgcaucccguucaucccucuucgcccagauuaaucagggcgagagcauuacucacgcucugaagcacgugagcgaugacaugaagacccacaaaaacccugcacugaaggcucagucaggucccgucagaagugggccuaagccuuucucugcuccaaaaccucaaacaucacccucuccaaaacgggccacuaaaaaggagccggcagugcucgaacuggaagguaaaaaguggcgcguggaaaaucaggagaacguuuccaaccuggugauugaagauacggaacugaagcaagucgcguacauuuacaaaugugugaacacaaccuuacagauaaaaggcaaaaucaauucaaucacuguugauaauuguaaaaaacugggccucguuuucgaugauguggucgggauuguagaaauuauuaacuccaaagauguaaaaguacaagugauggggaaagugcccacgauuucuaucaacaagacugauggcugucacgccuaucuuucaaagaacucccuagauugugagaucgugagugccaagucuagcgaaaugaacguuuuaauccccacugaaggcggagacuuuaacgaguucccaguaccagagcaguucaaaacucuguggaauggccagaaacuggucacuaccgucacugaaauugcagguuag

SEQ ID NO: 336698 - RNA, 1428 nt, Artificial Sequence
  derived and/or modified sequence
auggcugauaugcagaaccuuguggagagguuagaacgugcuguugggcgccuagaagccgugucucauacaagcgacaugcauagaggauacgccgacagccccuccaaagcuggcgcagcaccuuacgugcaggcuuuugauagccugcucgcugggccuguggcagaguaucucaaaauauccaaagaaaucgggggggauguccaaaagcaugcggaaauggugcauaccggacuuaaacuugagagggcucuuuuggucacugcuagccaaugccagcagccugcugagaacaagcugucagaucugcuggcccccauuagcgagcagauuaaagaagugauuacauucagggaaaaaaauagaggcucaaaacuauuuaaccaccugucggcagucuccgagagcauccaggcgcugggguggguagcuauggcacccaaacccggaccauauguuaaggaaaugaacgacgcugccauguucuacaccaaccggguucuuaaagaguacaaggauguggacaagaagcacgucgacuggguaaaggcguacuuguccauuuggaccgaacugcaggcauauaucaaagaguuucauacaaccggucucgccugguccaagacugggccagucgcaaaggaacuuucuggacuucccucuggacccucagccgggucuuguccucccccgccaccacccugcccuccaccuccucccgugagcacaaucagcugcucuuacgaaucggccagccggagcucccuuuuugcgcaaauuaaucagggggaaagcauaacccaugcgcugaaacauguauccgacgacaugaaaacacacaagaacccugcccugaaggcccaauccgggcccgucagaagcggcccuaaaccuuuuuccgcucccaagccccagacuucaccaucgccuaagcgggcaacaaaaaaggaaccugcuguccuggaauuagagggaaaaaaauggagaguagagaaucaagaaaacguaucaaaucuugugauagaagauaccgaauuaaagcagguagcuuauauauacaagugugugaacacaacccugcagauuaaaggcaagauuaauuccauaaccguggacaauugcaaaaagcugggccugguguuugaugauguagugggaaucguagagauuauuaacagcaaggaugucaaagugcaaguuaugggaaaagugccuaccauuagcaucaauaaaacagacggcugccacgccuaucucagcaagaacucucucgauugcgagaucgugucagcgaaaaguagugagaugaacgugcuuauucccacugaagggggagacuucaaugaauuuccagugccugaacaguuuaaaacucuguggaauggacagaaauuggucacaaccgucaccgagauugcgggcuag

SEQ ID NO: 336699 - RNA, 1428 nt, Artificial Sequence
  derived and/or modified sequence
auggcagacaugcagaaccuggucgaaaggcuugagagagcggugggaagauuggaggcuguuucccacaccucugacaugcaucgcggguaugccgauaguccuagcaaagcaggcgcugcuccauaugugcaggcauucgacaguuuacuagccggcccuguugcagaauaucucaaaauauccaaggaaaucggaggcgacguucagaagcacgcugagaugguucacacagggcucaaguuggagagagcucuuuugguaacugccagucaaugucaacaaccagcugagaauaagcugagcgaccucuuagccccuauuucugagcaaauuaaggaagucauuaccuuuagagaaaagaaccgcggcagcaaauuguuuaaucaucugagcgccguaagcgaaucuauccaggcuuuaggcuggguugcaauggcaccuaagccagggccauacgugaaggagaugaaugacgcugcuauguuuuacaccaaucgggugcuuaaagaguauaaagauguugauaagaaacauguugacugggugaaagcguaccugucuaucuggaccgaacuccaggcauauaucaaagaauuccacacaaccggccuagccuggucuaaaacggguccuguggcaaaagaacugucuggacugcccuccgggccauccgcuggaucgugccccccuccaccuccaccuugccccccgccaccucccgugaguaccauaaguugcucuuacgaguccgccagccguagcagccuguucgcccaaaucaaccaaggagagucuaucacgcacgcgcucaagcacguaagugacgacaugaagacccauaaaaauccagcccugaaagcccaguccggcccuguucgcagcggaccuaagccuuucucugcccccaaaccacagacuaguccaagcccgaaacgcgcuacaaaaaaggagccagcuguacuggaguuagagggaaaaaaguggagaguggaaaaccaggaaaacgucucuaaucucgugaucgaggauacagaacuaaaacaaguugccuauaucuacaaaugcgugaauacaacucugcagaucaagggcaaaaucaauucuauaacaguugacaacuguaagaaguuaggccugguauuugacgauguggucggcauuguggaaauuaucaacucgaaggaugucaaggugcagguuaugggaaaagugccuacgaucucuaucaacaagaccgauggaugccaugcauaccucucgaagaacagccuggacugcgaaauugugucugccaagaguucugagaugaaugucuugauccccacugagggcggcgacuuuaacgaguucccaguuccagaacaguuuaagacgcuguggaauggccagaagcuggucaccaccguuaccgaaaucgcugguuag

SEQ ID NO: 336700 - RNA, 627 nt, Artificial Sequence
  derived and/or modified sequence
auggcagacaugcagaaucuggucgagagacucgagagagcagucggcaggcuugaagccgucagccauacaagcgauaugcaucgaggcuaugcagauucucccucuaaagcuggcgcugccccauauguucaagccuucgauagccuacucgccggcccaguggccgaauaucugaagaucaguaaagagaucgguggugaugugcagaagcaugccgagaugguucauacaggccugaagcuggagagagcacuccuggugacagccucccagugccaacaaccagccgagaacaagcuguccgacuuauuagcaccaauaucugagcagauuaaggaagucaucacauuccgcgaaaaaaauagggggucaaaacuguucaaucaucuguccgcuguguccgaguccauccaagcucugggcugggucgccauggccccgaaaccugggccuuacguuaaggaaaugaaugacgcugcaauguucuauacaaaccgaguguugaaggaguacaaggaugucgauaagaagcacguugacuggguuaaagcauaucugucuaucuggacugaauugcaggcguacaucaaagaguuucacacuacagggcucgccuggucauag

SEQ ID NO: 336701 - RNA, 531 nt, Artificial Sequence
  derived and/or modified sequence
auggccgauaugcagaaucucgucgaacgcuuagagcgugccguugggcgccuugaagcuguaucacauaccagcgacaugcacagaggguacgcagauucgccaucuaaagcaggcgccgcccccuacguacaggcauucgauagucugcucgccggcccuguugcagaguacuuaaagauuuccaaagagaucgggggggacguacagaaacacgcagagaugguacacaccggacugaagcuagagcgggcucuguuggugacggccucucagugucagcagccagccgagaacaaacuuucagaucuacucgcuccaaucucggaacagauaaaggaggugauuaccuuuagagagaagaaccguggcaguaagcucuucaaccaucucucugccgugagcgagagcauucaggcuuugggcuggguugcuauggcccccaaaccgggcccguacgugaaggagaugaaugacgcagcuauguuuuauacaaaccguguacugaaggaguauaaagaugucgacuag

SEQ ID NO: 336702 - RNA, 543 nt, Artificial Sequence
  derived and/or modified sequence
auggccgacaugcagaaccucguugaacggcucgagagggcuguaggacgguuggaagccguuucucauaccuccgacaugcacagaggcuacgcagacuccccauccaaagcaggagccgcacccuacguccaggcuuuugacucuuugcuugccgggccaguugccgaguauuuaaagauauccaaagagauuggaggagacguccaaaagcacgcagaaaugguucacaccgggcuuaaacuugagagggcacugcugguuaccgcgucacaaugccagcaaccugcugaaaauaaacugagcgaucuccuggcaccgaucucagagcagauaaaagaagugaucaccuucagggagaagaacaggggauccaaacucuucaaucaucuguccgcagucagugagucaauccaggcccucgggugggucgcuauggccccaaagcccgggcccuacgugaaagaaaugaaugacgccgcuauguuuuauacuaacagaguccugaaagaauauaaggauguugacaaaaagcacguuuag

SEQ ID NO: 336703 - RNA, 612 nt, Artificial Sequence
  derived and/or modified sequence
auggcugauaugcagaaucucguugagagacuggagcgcgcgguuggccggcuggaggcagugagucacacaucugacaugcaccgcggguacgcugauuccccuuccaaagcuggcgcggccccuuacguccaggccuuugacucccuccuggcgggaccuguagcagaguaccucaagauauccaaagaaauagggggagauguucagaagcacgccgaaaugguccacacggggcugaagcuggaacgcgcucuucuggugacggcuucacaaugccagcaaccugcagagaauaaauugucugaccugcucgcuccgauauccgagcagaucaaggaaguuauuaccuuucgagaaaagaacagaggcucaaaacuuuuuaaucauuugagugcaguuagugaauccauucaagcucuagguuggguggccauggcaccuaaacccggaccguauguuaaagaaaugaacgaugcagccauguuuuacacgaauagaguccugaaagaguauaaggauguugauaagaagcacguagauugggugaaggcuuauuugucaauuuggacggagcugcaggccuauauuaaggaguuccacaccaccuag

SEQ ID NO: 336704 - RNA, 609 nt, Artificial Sequence
  derived and/or modified sequence
auggcugacaugcaaaacuuagucgaacgguuggagcgggcugugggucgucuggaggccgucagucacacaagugacaugcaucgcggcuacgccgacucucccucaaaggcgggcgcggcccccuaugugcaggcauucgacucucuccuggcgggaccaguugccgaguaucugaagaucucuaaggaaaucgggggugacguacagaaacacgcagaaaugguucacacuggucugaagcucgaaagagcucuucuugugaccgccagucagugucagcaacccgcugagaacaagcugagugaucuccuggcaccaauuucugagcaaaucaaggaggugauuacauuuagggaaaaaaaccgcggaucaaaacuuuucaaccaucuuucagcugucucugaaucuauacaggcacugggcuggguggccauggcaccgaaaccaggacccuacgucaaggagaugaacgaugcggcaauguucuauacuaacagaguacuuaaagaguacaaagauguggacaaaaagcauguugauuggguuaaagcauaucuaucuaucuggaccgagcugcaagcauacauaaaagaguuccauaccuag

SEQ ID NO: 336705 - RNA, 648 nt, Artificial Sequence
  derived and/or modified sequence
auggccgacaugcaaaaucuuguggaacgcuuagagcgagccgucggacgccuggaagcugucucacauacuucggauaugcacagagguuacgcagauucuccaucuaaagcuggggccgcccccuauguacaggccuuugacucacuucucgcagguccuguugccgaguaccugaaaauuagcaaggagaucggcggcgacguucagaagcacgcagaaauggugcacacagggcuuaaauuggagcgcgcccugcugguaaccgcuucccaaugucaacagcccgcagagaauaagcuaagcgacuugcuagccccuauuuccgaacagauaaaagaaguuauaacguuucgggagaagaacagaggcucgaaauuauuuaaucaucugucggcagugagcgaguccauccaagcucugggguggguggccauggcgccgaaaccuggacccuacgugaaagagaugaacgacgccgccauguucuauacaaaucgaguccuuaaggaguauaaggacguugacaaaaagcacguggacugggugaaggcuuaucuuucaauuuggacugagcugcaggccuacaucaaggaguuucauacaacaggucucgccuggucaaaaacuggcccaguggcaaaguag

SEQ ID NO: 336706 - RNA, 177 nt, Artificial Sequence
  derived and/or modified sequence
auggcagacaugcagaaccucguugaaagacuagaacgcgcagucggccguuuggaggccgugucucacacaucugacaugcauagaggauaugcugacaguccaagcaaagcaggcgccgcaccuuacguucaggcauucgauucacugcuggccgguccuguggccgaguacuag

SEQ ID NO: 336707 - RNA, 525 nt, Artificial Sequence
  derived and/or modified sequence
auggccgacaugcagaaucugguggagagacuggaacgcgcugucggccgccuugaggccgugagccauacaucugauaugcaucggggcuacgcugacagcccuuccaaagcaggcgcugcucccuacguccaggccuucgauagccuccucgccggucccgucgcugaauacuuaaaaaucucaaaagaaauuggaggggacgugcagaaacaugcugaaaugguccauacaggccuuaaguuggagagggcccuccuuguuacugcgucucagugucaacaacccgccgagaauaagcucucugaucuucuggcgcccaucucugaacagaucaaagagguuaucacauuccgagaaaagaaucgcgguuccaaacuguucaaucaccugucagcaguaucugagucgauucaggcucugggauggguggcaauggcgcccaaacccggacccuaugugaaagagaugaacgaugcagccauguucuacaccaaccgcguccugaaagaguauaaagauuag

SEQ ID NO: 336708 - RNA, 1359 nt, Artificial Sequence
  derived and/or modified sequence
auggcugauaugcacagaggauacgccgauucaccaagcaaggccggcgccgccccauauguacaagcauucgauagccugcuggcugguccuguugcagaguacuugaaaauaagcaaagaaaucggcggagacguccagaaacaugcagaaauggugcacacaggacucaagcuagaacgcgcacuccugguuacagcuucacagugccagcagccagcagagaacaaacugucugaucugcuggcaccaaucagcgaacagaucaaggaggugauaacuuuuagggaaaaaaacagaggaucgaaacuauuuaaccaucugagcgcagugagugagucaauacaagcccugggcuggguugcaauggccccaaagccuggucccuacgugaaggagaugaaugacgcagcuauguuuuacacaaacagggugcugaaggaauauaaggacgucgacaagaagcaugucgauuggguuaaagcguacuuauccauuuggacugaacuucaggcguacaucaaagaguuccauacaacaggcuuggcuuggaguaaaaccgguccgguugcuaaggaauugucaggacugccaucgggucccucagcaggguccugucccccuccuccuccuccguguccaccaccucccccuguguccacgaucucuugcaguuaugagagcgcaucacgaucuaguuuguuugcccagauuaaccagggagaaagcauuacccacgcucugaagcacguguccgacgauaugaaaacacauaagaaucccgcccucaaggcgcagagcggcccagugcgcagcggccccaagcccuuuagcgcuccuaaaccacaaacgucccccucucccaagcgagccaccaagaaggaacccgcgguguuggaauuggaaggaaagaaauggcggguggagaaccaggagaauguuaguaaucuggucauagaagacacugaacuuaaacagguggcauacauauauaagugcgugaauacuacauugcagaucaaagguaagauaaauagcauuacuguugauaacuguaagaaacugggucucgucuuugaugauguugugggcaucguagagaucauuaauagcaaagacguaaaggugcaagugaugggcaaagugcccacgaucucgauuaacaagacagacgguugccacgccuaucuuucgaagaacagcuuggacugugagauagucucagcaaaaucuucugagaugaacgugcucauucccacggagggaggggacuucaaugaauuccccgugccugagcaauuuaagacguuguggaacggccagaagcugguuaccacaguaacagagauugcaggcuag

SEQ ID NO: 336709 - RNA, 1428 nt, Artificial Sequence
  derived and/or modified sequence
auggcagauaugcagaaccuugucgagagacuugagcgcgcuguuggccgccuagaagcugucucucauacaucagacaugcaccgugguuaugccgacucucccagcaaggccggcgccgcacccuauguacaagccuuugacagucuccuggcuggcccagucgcugaguaucugaaaaucaguaaggaaauugggggcgacguacaaaagcacgccgagauggugcacacaggacuaaaguuagagagagcccuguuggucacugccagucaaugucagcaaccugccgagaauaaacucuccgaccuguuagcgccaauuuccgagcaaauuaaagaaguuauuacauuuagagagaaaaaccggggguccaagcucuucaaccaccuaagugcaguuuccgagaguauucaagccuugggguggguugcuauggcaccaaagccuggcccguacgucaaggagaugaaugacgccgcaauguuuuauacgaauagaguucugaaagaauacaaggauguagauaagaagcacguagacugggugaaggcauaccuuucaaucuggacagaacugcaggcauauauuaaagaauuucauacuacuggacuugcgugguccaagacagggcccguggcaaaagaacuguccggacugccuuccggccccuccgcugggaguugucccccuccaccaccaccaugcccuccgccccccccagucuccaccauaucuuguucauaugaauccgccucucgaucuucucuguucgcccaaauuaaccagggcgaguccauaacgcacgcccuaaaacaugucucagacgacaugaaaacccacaaaaacccagcauuaaaagcucagucaggccccguccgcucuggccccaaaccguucucagccccuaagccacagaccuccccaaguccaaagagagcaacaaagaaggagcccgcgguccuggaguuagaaggcaagaaguggcggguggagaaucaggaaaacgucucaaauuugguuaucgaggacacagagcucaaacaggucgcuuacauuuauaagugcgucaauacaacccuccaaauaaaagguaagaucaacagcauaaccgucgacaacugcaagaaauugggacuuguguuugaugacgugguugguaucguagagaucauuaacagcaaagacgucaaagugcagguuaugggcaagguuccaacuauuuccauuaacaagacugacgggugucacgcuuacuuguccaaaaacucucuugauugcgaaauugugagcgcaaagaguucugagaugaacguuuuaaucccaacggagggcggggauuuuaaugaauuuccgguaccagaacaguuuaagacacuguggaacggccaaaaacuugucacuaccguuacugaaauugccggcuag

SEQ ID NO: 336710 - RNA, 1428 nt, Artificial Sequence
  derived and/or modified sequence
auggccgauaugcagaaucucguggagagguuggaaagggcgguaggaaggcuugaggcaguaucgcauacaucagacaugcacagagguuaugcugacucuccgaguaaagcgggugcugccccuuacguccaggccuucgauucucugcuggccggaccuguggcugaguauuugaaaauaucuaaagagauaggcggcgauguacagaagcacgccgagauggugcauaccggacugaaauuagaaagagcccuacucgugacugccagucagugucaacagccugcugaaaacaagcugucagaccuacuugcuccaauuucugagcagauuaaagaagugauuaccuuucgugaaaaaaacagagggucuaaauuguucaaucauuuaucagccguaucagagagcauucaggcacucggcuggguagcuauggccccaaagccuggacccuacgucaaggaaaugaaugaugccgcgauguucuauacuaaccgagugcugaaagaguacaaagauguggacaagaaacauguugauuggguaaaggcauacuuaucuaucuggaccgaauugcaggccuacauuaaagaguuccacacgacuggacuggccuggucaaagaccggacccguggccaaagaacucaguggacuucccuccggacccagcgccggcucauguccuccuccuccaccccccugcccaccucccccuccagugucgaccaucucaugcucuuacgaauccgcuucgaggucuagccuguucgcccagauaaaucaaggagaguccauaacccacgccuugaagcacgugagcgaugauaugaaaacucauaagaaccccgccuuaaaagcacaauccgggcccguacgcuccgguccuaagccauuuuccgcucccaagccccagacuucaccaucgccuaagcgggcaacaaaaaaggaaccugcuguccuggaauuagagggaaaaaaauggagaguagagaaucaagaaaacguaucaaaucuugugauagaagauaccgaauuaaagcagguagcuuauauauacaagugugugaacacaacccugcagauuaaaggcaagauuaauuccauaaccguggacaauugcaaaaagcugggccugguguuugaugauguagugggaaucguagagauuauuaacagcaaggaugucaaagugcaagugaugggcaaaguccccacgauaucuauaaauaaaacugauggaugccacgccuaccuauccaaaaacucauuagauugcgaaaucgucucagccaaauccuccgaaaugaacgugcugauuccaaccgaggguggcgacuuuaaugaauuucccgugccugagcaauuuaaaacgcuguggaacggccagaagcuggugacuaccgugacggagauagccggauag

SEQ ID NO: 336711 - RNA, 1428 nt, Artificial Sequence
  derived and/or modified sequence
auggccgauaugcagaaccugguggagcgacuggagagggcggugggcagguuggaggcugugagccacacaagcgauaugcacagaggauaugcagauucgccaaguaaagccggugccgcacccuacguccaggcuuuugauucacuccucgccggaccaguggccgaauaccugaaaaucagcaaggagauagggggggauguacagaaacaugcagagauggugcauacggggcugaagcuagagagggcccuuuuggugaccgccagucagugccagcagcccgcagagaacaaguugucugaccuguuggccccaaucuccgagcagaucaaggagguuaucaccuuucgcgaaaaaaacaggggaagcaaacuguuuaaccaucuauccgccguuucugagucaauucaagcuuuggguuggguugcuauggccccgaaacccggaccuuacgugaaagagaugaaugacgcagccauguucuacaccaacagaguucugaaagaauacaaggaugucgauaagaaacauguugauugggugaaggcauaccucuccaucuggaccgaacugcaagccuauauuaaagaguuucauacaacagguuuagcauggaguaaaaccggcccugucgccaaagaguuaagcggucuccccagcgguccaucagccgguagcuguccaccuccuccuccacccugucccccaccaccccccgugaguacaaucucaugcagcuacgagucagcuucacguagcagccucuuugcccagauuaaucagggugaaagcaucacucaugcccuuaaacauguaagcgacgacaugaaaacccacaagaauccggccuugaaggcacagaguggccccguccgaucugguccaaagccauuuucagcuccuaaaccccagaccucucccucuccuaagcgcgcaaccaaaaaagagccagcugugcuugaacuggaaggaaagaaguggcggguggagaaucaagagaacgucucuaaccuugugaucgaggauacagagcucaagcagguagccuauauuuauaaaugugucaacacuacgcugcaaauaaaaggcaagauuaauucaauaacaguagacaauugcaagaaacucggucucguuuucgacgaugucguagguauuguagagauuauuaacucuaaggaugucaaagugcaagucauggguaaagugcccacaaucucgauuaauaaaacagauggaugccacgccuaccucaguaagaacaguuuggacugugaaaucgucucugcaaagucaagugagaugaauguccucaucccaaccgagggcggugauuuuaacgaguuucccguucccgagcaauucaagacccuauggaauggccaaaaauuaguaaccaccgugaccgaaaucgccggcuag

SEQ ID NO: 336712 - RNA, 627 nt, Artificial Sequence
  derived and/or modified sequence
auggccgauaugcagaaucucgucgaaagguuggaacgagccgugggacgucucgaagccgugucacacacguccgauaugcaucguggguaugccgauucaccaaguaaggcaggagcugcucccuauguccaggcguuugauagccuucucgcuggucccguggcggaauacuugaagaucagcaaggagaucgguggggauguucagaaacaugcagagaugguucacaccggacugaaauuagagcgagcacugcucgucacugcuagccagugucaacagccugccgaaaacaaacuguccgacuuauuagcaccaauaucugagcagauuaaggaagucaucacauuccgcgaaaaaaauagggggucaaaacuguucaaucaucuguccgcuguguccgaguccauccaagcucugggcugggucgccauggccccgaaaccugggccuuacguuaaggaaaugaaugacgcugcaauguucuauacaaaccgaguguugaaggaguacaaggaugucgauaagaagcacguugacuggguuaaagcauaucugucuaucuggacugaauugcaggcguacaucaaagaguuucacacgaccgguuuagcauggaguuag

SEQ ID NO: 336713 - RNA, 531 nt, Artificial Sequence
  derived and/or modified sequence
auggcagauaugcagaaccugguagagagacuggagcgagccguugggcggcuugaggcagugucgcacacgucagacaugcacagagguuacgcggauucacccagcaaagccggcgcugcccccuauguucaggcauucgauagucugcuagccggcccuguugccgaauaucugaaaaucagcaaggaaauuggcggggauguccagaaacaugcagaaauggugcacaccgggcugaagcuggaaagagcccuucuugugaccgccucucaaugccagcagccagcggagaacaagcuguccgaccuacuggcccccauuagcgaacagaucaaagagguuauaacauucagagaaaaaaaccgcggaucuaaacuuuuuaaucacuuauccgccgucagugagucaauccaggcuuuaggguggguugcuauggcaccgaagccugggcccuacguaaaggaaaugaaugacgcagccauguucuauacuaaccgugugcuuaaggaauacaaggauguggauuag

SEQ ID NO: 336714 - RNA, 543 nt, Artificial Sequence
  derived and/or modified sequence
auggcagauaugcagaaccuggucgagcgucuggagagagccguggggaggcuggaagcugugucccacacaucagauaugcauagaggcuacgccgauaguccaaguaaagccggcgccgcaccuuacguucaagcuuuugacagccugcuugccgggcccguggcugaauaccugaagauuucaaaggagauugguggagacgugcaaaaacacgcugagaugguucauaccggccugaaguuagaacgcgcccuuuuaguuacagcuagucaaugucaacagccugcugaaaacaaacuaucugaucuuuuggccccaaucuccgaacagaucaaagaggugauuacuuucagagaaaagaauagagguuccaaauuauuuaaucaucugagugcagugagcgaaucuauacaggccuuggguugggucgccauggcccccaaaccuggaccguacgugaaggaaaugaacgacgcagccauguucuacacuaaccggguuuuaaaagaguauaaggacgucgacaagaagcauguauag

SEQ ID NO: 336715 - RNA, 612 nt, Artificial Sequence
  derived and/or modified sequence
auggcagauaugcagaaucucguagagcgacuugagagggccgucggcagacucgaagcugucucccacacaagcgacaugcaccgaggauacgccgauucccccagcaaagcuggagccgccccuuauguccaggcauuugacucccuacucgccggcccggucgcagaauaccucaagauauccaaagaaauugguggugacguccagaaacaugccgaaaugguucacacgggccucaaauuagagcgggcgcugcuggucaccgcgucucaaugucagcaacccgcagagaauaaguugagugaccuccuggcucccaucuccgagcaaauaaaagaagugaucacuuuuagggagaaaaauagaggcuccaaacucuucaaccaucuuuccgccguuucagagagcauccaggccuuaggauggguagcuauggccccuaaaccuggcccuuauguaaaagaaaugaacgaugcggccauguucuacaccaaccgggugcugaaagaauauaaggauguggacaagaaacacgucgacuggguaaaagcauaccuuucaauuuggaccgaauuacaagcauacaucaaggaauuucacacuaccuag

SEQ ID NO: 336716 - RNA, 609 nt, Artificial Sequence
  derived and/or modified sequence
auggccgacaugcagaaccucguggaacguuuggaaagagcggucgggcggcuggaagccgugucucacacaucugacaugcaucguggcuaugccgauucccccaguaaggcaggugccgcacccuacgugcaggccuucgauucacucuuggcgggcccuguugccgaauauuuaaaaauaaguaaggaaauaggaggggauguccaaaagcacgccgaaaugguacauaccgggcuuaaauuggagagggcauugcuuguaaccgccucccaaugucaacagcccgcugaaaacaagcugagugaucuccuggcaccaauuucugagcaaaucaaggaggugauuacauuuagggaaaaaaaccgcggaucaaaacuuuucaaccaucuuucagcugucucugaaucuauacaggcacugggcuggguggccauggcaccgaaaccaggacccuacgucaaggagaugaacgaugcggcaauguucuauacuaacagaguacuuaaagaguacaaagauguggacaaaaagcauguugauuggguuaaagcauaucuaucuaucuggaccgagcugcaagcauacauaaaagaguuccacaccuag

SEQ ID NO: 336717 - RNA, 648 nt, Artificial Sequence
  derived and/or modified sequence
auggccgacaugcaaaaucuuguggaacgcuuagagcgagccgucggacgccuggaagcugucucacauacuucggauaugcacagagguuacgcagauucuccaucuaaagcuggggccgcccccuauguacaggccuuugacucacuucucgcagguccuguugccgaguaccugaaaauuagcaaggagaucggcggcgacguucagaagcacgcagaaauggugcacacagggcuuaaauuggagcgcgcccugcugguaaccgcuucccaaugucaacagcccgcagagaauaagcucuccgauuugcuugcuccaaucucagaacaaauaaaggaaguaauaacauucagggagaaaaauagagguucuaaacuguucaaucacuuaagugcugugagcgaauccauccaagcacuuggguggguggcuauggcuccaaaacccgguccuuacguuaaggaaaugaaugacgcugccauguuuuacaccaaccgcguauuaaaagaauauaaagauguagauaagaagcauguggauugggucaaggcuuaccugucuauuuggaccgaacuucaggccuauauuaaagaguuccauaccaccggccucgcuuggagcaaaaccggccccgucgcuaaguag

SEQ ID NO: 336718 - RNA, 525 nt, Artificial Sequence
  derived and/or modified sequence
auggcagauaugcaaaauuugguugagaggcuggaacgcgccgugggcagacuggaagccguaucucacacaucagacaugcaccgaggcuaugcagauucccccuccaaagcaggcgccgccccauacgugcaggcuuucgauucacuauuggccgguccagucgcagaauauuuaaagauaagcaaagagaucgguggcgacgugcagaagcacgcagagaugguucauacgggucugaaacuugagagagcccugcucgugacagcuucccagugucagcagcccgcggagaacaaguugagcgaccuccucgccccaauuucugaacagauuaaggaggugauuacauucagagaaaaaaaccguggaucuaagcuguuuaaucacuugagcgcugugagcgaaucuauacaggcauuaggcuggguugcuauggcuccgaagcccggcccuuacguaaaggaaaugaaugaugcagcaauguuuuacaccaacagaguucuuaaagaauauaaggacuag

SEQ ID NO: 336719 - RNA, 1359 nt, Artificial Sequence
  derived and/or modified sequence
auggccgauaugcaccggggcuaugccgacucacccuccaaggcuggcgccgcuccauacguccaggcuuuugacucucuccuugccggccccguugccgaguaucuuaaaaucagcaaggaaauugggggcgacgugcagaaacacgcagagauggugcauacuggguugaagcuugaacgcgcccuccucgucacugcuagccagugccaacagcccgcagagaauaaguugagcgaccuuuuggccccaauuagugaacagauuaaggaagucauaacuuuucgggagaagaaccgggggagcaagcuguucaaccaucuguccgcgguguccgagaguauccaggcacucggaugggucgcaauggcucccaaaccugguccauaugucaaggaaaugaaugaugcugccauguucuacacuaacagggugcuaaaggaauauaaagauguugacaagaagcacgucgacugggucaaagcauaucucucuaucuggacagagcuacaggccuauauaaaggaauuucacacaacaggguuggcauggucaaaaacaggcccaguggccaaagaguuaagcggucugccaaguggccccucagccggauccuguccaccgccuccucccccuugccccccuccaccaccuguaagcacaauuucuuguagcuacgaaucugcaucacgcucaucucucuucgcacaaaucaaccaaggcgaguccaucacucaugcucucaagcacguaucugacgauaugaaaacgcacaagaaccccgcauugaaggcccaauccggaccugugcgcuccggcccaaaaccuuuuagugcaccuaaaccgcagaccucuccuucaccgaaacgagccacaaagaaggaaccugcuguguuggaauuagagggcaaaaaguggcggguagagaaccaagaaaacguuucaaaucuggugauugaggacacagagcuuaaacaggucgcguacaucuacaaaugugugaauacgacucugcaaaucaaaggaaagaucaacagcauuacuguggacaauugcaaaaagcugggcuuggucuuugaugaugucguggguauugucgaaauaauaaauagcaaagacguuaaggugcaggugauggguaaagugccaaccauaucgauuaacaagacagacgguugucaugcuuacuugucgaaaaauucuuuagacugugaaauuguaucagcuaaauccuccgagaugaacgugcugauuccaaccgaggggggugauuuuaacgaguuucccgucccugagcaguucaagacucuguggaauggacaaaagcucguaacuacaguuacggaaauugccggcuag

SEQ ID NO: 336720 - protein, 474 aa, Artificial Sequence
  derived and/or modified sequence
MADMQNLVERLERAVGRLEAVSHTSDMHRGYADSPSKGAAPYVQAFDSLLAGPVAEYLKISKEIGGDVQKHAEMVHTGLKLERALLVTASQCQQPAENKLSDLLAPISEQIKEVITFREKNRGSKLFNHLSAVSESIQALGWVAMAPKPGPYVKEMNDAAMFYTNRVLKEYKDVDKKHVDWVKAYLSIWTELQAYIKEFHTTGLAWSKTGPVAKELSGLPSGPSAGSCPPPPPPCPPPPPVSTISCSYESASRSSLFAQINQGESITHALKHVSDDMKTHKNPALKAQSGPVRSGPKPFSAPKPQTSPSPKRATKKEPAVLELEGKKWRVENQENVSNLVIEDTELKQVAYIYKCVNTTLQIKGKINSITVDNCKKLGLVFDDVVGIVEIINSKDVKVQVMGKVPTISINKTDGCHAYLSKNSLDCEIVSAKSSEMNVLIPTEGGDFNEFPVPEQFKTLWNGQKLVTTVTEIAG

SEQ ID NO: 336721 - protein, 145 aa, Artificial Sequence
  derived and/or modified sequence
MADMQNLVERLERAVGRLEAVSHTSDMHRGYADSPSKAGAAPYVQAYIKEFHTTGLAWSKTGPVAKELSGLPSGPSAGSCPPPPPPCPPPPPVSTISCSYESASRSSLFAQINQGESITHALKHVSDDMKTHKNPALKAQSGPVR

SEQ ID NO: 336722 - protein, 263 aa, Artificial Sequence
  derived and/or modified sequence
MADMQNLVERLERAVGRLEAVSHTSDMHRGYADSPSKGAAPYVQAFDSLLAGPVAEYLKISKEIGGDVQKHAEMVHTGLKLERALLVTASQCQQPAENKLSDLLAPISEQIKEVITFREKNRGSKLFNHLSAVSESIQALGWVAMAPKPGPYVKEMNDAAMFYTNRVLKEYKDVDKKHVDWVKAYLSIWTELQAYIKEFHTTGLAWSKTGPVAKELSGLPSGPSAGSCPPPPPPCPPPPPVSTISCSYESASRSSLFAQINQG

SEQ ID NO: 336723 - DNA, 1425 bp, Artificial Sequence
  derived and/or modified sequence
atggcggacatgcagaatcttgtagagcggctggaacgcgctgtgggaagacttgaggcggtttctcacacgtctgacatgcaccgaggctatgcagatagtccatccaagggtgccgctccgtatgtccaagccttcgacagccttctagcgggacctgtggctgaatatctcaaaattagcaaagagatagggggagacgtgcagaagcatgccgagatggtgcatactggtctgaaactggagcgcgctctgctggtcaccgcctcgcagtgtcaacagcctgctgaaaacaagttgtccgacctcctggcacccatcagcgagcagatcaaagaggtgattaccttccgggagaaaaacaggggctccaaattgtttaaccacctgtctgccgtgtccgaaagcatccaggctcttgggtgggtggccatggctccaaaacctggcccttacgtgaaggagatgaatgacgctgcgatgttctatacaaaccgtgtgctgaaggagtataaagatgtagataagaagcatgttgactgggttaaggcatacttatcaatttggacggaactgcaggcctatattaaggaattccacacaacgggcctggcatggagcaaaactggtcccgttgctaaggaacttagtggcctgccctccggaccaagcgctggctcatgccctccccctccacccccatgcccaccgccaccgcctgtgtctacaatatcatgcagttatgaatctgcaagccgtagctcgctgttcgctcagatcaaccagggggaatccatcactcacgccctgaaacatgtgagcgacgacatgaagacccacaagaaccccgctctgaaggcacagtccggccctgtgagaagtgggccaaaacctttttcagctcccaagccccagaccagtccatcccctaagcgagcgaccaagaaagaacccgctgtgctagaattagagggcaaaaagtggcgagtggagaaccaggaaaatgtttccaatctagtgattgaagacaccgaactaaagcaggtggcctatatctataagtgcgttaatactaccttgcagatcaaagggaagatcaattccatcactgtcgataactgtaagaagctcggcctggtattcgacgatgtggtgggaattgtggaaatcattaattccaaagacgtgaaagtacaggtgatgggaaaggtgccgaccatctccattaacaaaacagatggatgccatgcctatttatcgaaaaacagcctggattgtgagatcgtctccgcaaagagttccgagatgaacgtcttaattccaaccgagggaggagattttaatgaattcccggtgccagagcagttcaagacgctgtggaacggacaaaaactcgtgacaactgtgactgagattgctgggtag

SEQ ID NO: 336724 - DNA, 438 bp, Artificial Sequence
  derived and/or modified sequence
atggccgacatgcagaatctggtggaacggcttgagcgggcagtggggcgattggaggctgtgtcgcacacgtctgacatgcatagagggtacgctgactcccctagcaaggctggcgcagccccttacgttcaggcgtacatcaaggaattccataccacagggctggcttggtctaagacaggtcctgttgcaaaagaattaagtggtttaccttcaggaccatccgccggaagttgcccacctccccctccaccctgcccacccccaccccctgtatccaccattagctgttcttacgaaagtgcaagcagatccagcctattcgcacagataaatcagggcgaatcaatcactcacgccctgaaacacgtgagcgacgatatgaagacccacaagaatcctgccctaaaggcccagagcgggcctgtacgctag

SEQ ID NO: 336725 - DNA, 1425 bp, Artificial Sequence
  derived and/or modified sequence
atggccgatatgcaaaacctggtggaaaggctggaaagggcggtggggaggctagaggccgtgagccacaccagtgacatgcaccgtgggtatgccgactccccttccaagggagccgctccttatgttcaagcttttgattcactcctggcaggcccagtggcagagtacctaaaaatttcgaaagagatcggaggggacgtgcagaaacacgctgaaatggtgcatacgggtctcaagttggagcgagcccttctggtaacagcttctcaatgccagcagcccgctgagaacaaactgagcgatctgttagccccaatatcagagcagatcaaagaggtgatcacttttcgcgagaaaaatcggggttctaagttattcaatcacctgagcgcagttagtgagtccattcaggccctagggtgggtcgccatggcccctaagcctgggccttacgtcaaggaaatgaacgatgctgccatgttctatacaaatcgcgtgctcaaggaatataaagacgtcgacaagaagcatgtcgattgggtgaaagcctatttgagcatctggactgaactgcaggcgtatatcaaggagttccacacaaccgggcttgcctggagcaagacaggacccgtggccaaggaactatcaggtttaccatcagggccatctgccggatcatgtccaccacctccacctccatgcccccctccaccgccagtgtcgacaataagctgtagttatgaaagcgcttcccgcagtagcctctttgcccaaattaaccagggtgagagcatcacacacgccctgaaacatgtttctgatgacatgaaaacccataagaatcccgcactgaaggcccagtcgggacccgtcagatctggcccaaagcctttctcagctccaaaaccgcaaacctcccccagccccaaaagggccacaaaaaaagagcctgccgtgctggagctcgagggcaagaaatggcgcgttgagaaccaggaaaatgtcagtaatctcgtaatcgaggacacagagctgaagcaggttgcctacatctataaatgtgtgaatacgacactgcagattaagggaaaaattaattccattactgtggacaactgcaagaagctgggtcttgtcttcgacgatgtggttggtattgtggagattatcaattccaaggatgtgaaagtccaggtcatggggaaggtgcccactatcagtatcaataagaccgatggctgtcatgcttatctgtcaaaaaactctctagattgcgagatagtttccgctaagagttccgagatgaatgttttaattccaacagaggggggtgattttaacgaatttccagtgcctgagcagtttaaaacactgtggaacggccagaaactcgttaccaccgtgacagaaatagccggttag

SEQ ID NO: 336726 - DNA, 1425 bp, Artificial Sequence
  derived and/or modified sequence
atggctgatatgcaaaatctggttgagcgcctggaacgagctgtcggaaggctcgaggcagtcagtcacactagcgatatgcaccgaggctatgccgatagtccgagcaagggcgcagcaccatacgtgcaggcatttgactctttactggcagggccagtggccgaatacctcaagatttccaaagagattggcggagacgttcagaagcacgccgagatggtgcacactggcttaaagttggaacgagcacttctagtgactgcctcacagtgtcaacagcccgcagaaaacaagctcagtgacctcctggctcccatcagcgagcagattaaggaggttattacgttcagagagaaaaatcgtggctcaaaactgtttaatcacctttccgccgtttcagagtccattcaggcattaggatgggtggctatggcccctaagccaggaccgtacgttaaggaaatgaatgacgccgcaatgttctatacaaacagggtcctgaaggaatataaagatgtggacaaaaaacacgtagattgggtgaaagcctacctgagcatttggaccgaactgcaggcctatatcaaagaatttcatacgacaggcctggcatggtccaaaaccggtcccgtcgcaaaggagttatccgggttacctagcggcccatctgccggttcttgcccgcctccaccgcctccatgcccaccacctcccccagtgtccaccatttcttgctcctacgagtctgctagcagatcctctctgttcgcgcagataaatcaaggggaatcaatcacacatgccctgaagcacgtgtctgacgatatgaaaacccataagaatccggcacttaaagcgcagtccgggcctgtgagatccgggccaaaacctttcagtgctcccaaaccacagacgtcccctagccctaaaagggccaccaagaaagaacccgcagtgctagagcttgaaggaaagaagtggcgcgtggagaaccaggagaatgtgagcaacttggtgatagaagatactgaactgaagcaggtcgcctacatctataagtgtgtgaacactacactgcagataaaaggaaaaatcaactcaatcaccgtcgataactgcaagaaattaggcctcgtatttgatgatgtggttgggatcgtggagatcatcaattccaaagacgtgaaggtacaggtgatgggcaaggttccaacaatatctatcaataaaaccgacgggtgtcatgcgtacctgagcaagaattctctagattgtgagattgttagcgccaaaagctccgagatgaatgtgcttattcctactgaaggcggtgacttcaacgagtttcccgttcctgagcaatttaagactctgtggaatggtcagaaactggtgaccacagtgacagagattgccggatag

SEQ ID NO: 336727 - DNA, 438 bp, Artificial Sequence
  derived and/or modified sequence
atggccgatatgcagaatctagtcgagcgcttggaacgggctgtcgggcgtctggaggccgtctcacacactagtgatatgcaccgcggttacgctgattctccatccaaagctggcgcagccccttacgtgcaagcctatataaaggaattccataccaccggactagcctggagcaaaacaggacctgtcgccaaggaactctctggtcttccttcaggcccttcagctggatcttgtccccctccaccacccccttgccccccacccccacccgtatctaccattagttgctcttacgagtcagcgtctagatcttcgctgtttgcacagatcaatcagggcgaatctatcacccacgctttaaagcatgtcagtgatgatatgaaaacccacaaaaatccggcattgaaggcccagagcgggcctgttcggtag

SEQ ID NO: 336728 - DNA, 792 bp, Artificial Sequence
  derived and/or modified sequence
atggcggacatgcagaacctggttgaacgtctcgagagggctgttggcagactggaggccgttagccatacatccgatatgcacagagggtatgccgactctcctagcaaaggtgctgctccttacgttcaggcatttgatagtttgctagcagggccagtggcagagtatctcaaaatttcgaaggaaataggtggagatgtgcagaagcacgctgagatggtacatactggcttaaaactcgaacgagccctgttagtgacagctagccagtgtcaacagcctgcagaaaataagctgtcagatctgctcgctcccatctcagagcaaatcaaggaagtgataacgtttcgtgagaagaatcgcggatctaagctgttcaatcacctctcagcagtctctgaaagtatacaggccctgggctgggttgcgatggcacccaaacctggcccttacgtgaaggaaatgaacgacgcagccatgttttacaccaatagagtgctgaaagaatacaaggacgtggacaagaagcatgtggactgggtgaaagcgtatctgagcatttggacggagttgcaggcctatattaaggaatttcatacaacagggctcgcgtggagcaagaccgggccagtggctaaggagctgtcagggttaccttctggtcctagcgccggaagctgccccccacctccaccaccttgccccccaccgcctcccgtaagcacaataagttgctcctatgagtctgcctcaaggtcctctctgttcgcgcagataaatcaggggtag

SEQ ID NO: 336729 - DNA, 528 bp, Artificial Sequence
  derived and/or modified sequence
ggtcgcgcggagattgctgggcggttcttgccggaagcggagagcggctgatcgcagtccggaggtgaggcggaactctgaggtggtccattatggctgacatgcaaaatctggtagaaagattggagagggcagtgggccgcctggaggcagtatctcatacctctgacatgcaccgtgggtatgcagacagtccttcaaaagcaggagcagctccatatgtgcaggcttacattaaggagttccataccaccggactggcctggagcaaaacggggcctgtggcaaaagaactgagcggactgccatctggaccctctgccggatcatgtcctcctccccctccaccatgcccccctcctcccccagtctctaccatttcatgctcatatgagtctgcttcccgctcatcactgttcgcgcagattaatcagggggagagcattacacatgccctgaaacatgtatctgatgacatgaagactcacaagaaccctgccctgaaggctcagagtggtccagtacgca

SEQ ID NO: 336730 - DNA, 1425 bp, Artificial Sequence
  derived and/or modified sequence
atggccgatatgcagaacctcgtggaacgacttgagagagccgtcgggagactagaagccgtcagccacacatcagatatgcatagaggttatgccgatagtcctagtaaaggggccgctccatacgtccaggcattcgactctttgctggccggccctgtggccgaataccttaagatctccaaagagattgggggggacgtacagaaacatgccgagatggtgcacaccgggctgaagctcgagcgggcgctcctggtaaccgcttctcagtgtcagcaacccgccgaaaacaaactaagtgacttgctggcccccatctccgaacaaattaaagaggttataacctttagagagaagaatagaggctcaaaactgttcaaccacctgtccgccgttagcgaatccattcaggccttaggatgggtggcaatggctcctaaaccaggcccatacgtgaaggaaatgaacgatgcagccatgttttacacaaacagggtcctgaaggaatacaaagacgtggacaaaaagcacgtagactgggtgaaggcctacctgagtatttggacagaactgcaggcgtatatcaaagaatttcatactacggggctggcgtggagcaagacaggccctgttgccaaagagctttccggcctcccgtctggcccatctgctggctcctgccccccaccaccaccgccatgtccaccgccaccgccagttagcactatttcgtgctcatacgagtccgcatcgcgctctagccttttcgcccaaattaatcagggtgaatccattactcacgcgctgaaacacgtctctgatgatatgaaaacccataagaatccagcacttaaggcacagtcaggccccgtacgctctggtccgaagccattctccgctccaaaaccgcagacatcaccctcgcctaagcgcgcaactaagaaagaacccgctgtactggaactggaaggcaagaagtggagggtcgaaaatcaagagaatgtgtcaaatttggtgatcgaggacaccgagctgaaacaagtagcttacatctacaaatgtgttaatacaacgctccagatcaagggcaagatcaatagcattactgtcgataattgcaaaaagctgggccttgtatttgacgatgtagtcggcattgtagaaatcatcaatagtaaagatgtgaaggttcaggtgatgggaaaagtgcccacaatctcaataaataagacggacgggtgccacgcctacctctcaaaaaactcgctggattgtgaaattgtgagcgcaaagtcttctgagatgaatgtactaatccccacagagggcggagattttaacgaattccccgtgcccgaacagtttaagactctctggaacggacagaaacttgtaactaccgtcacagagatcgcagggtag

SEQ ID NO: 336731 - DNA, 438 bp, Artificial Sequence
  derived and/or modified sequence
atggcagatatgcagaacctcgtggaacgcctggagagagccgtcggcagactggaagccgtgtcccatacttcagatatgcaccgaggttacgctgactccccctctaaggccggcgccgccccttatgtgcaagcttatatcaaggaattccataccacaggcctggcctggagcaaaactggccctgtggccaaagaactcagtgggctacctagcgggccaagcgcaggatcatgcccaccacctcctcccccttgtcccccaccccctccagtatcaactatatcatgctcctacgagagcgcttcccgcagcagcttattcgctcagattaaccaaggtgaaagcatcacacatgccttgaaacatgtatccgatgacatgaaaacacataaaaatccagcactcaaagcacaaagtggacccgtccggtag

SEQ ID NO: 336732 - DNA, 1425 bp, Artificial Sequence
  derived and/or modified sequence
atggcggacatgcagaacctggtcgaacgcctcgaaagagcagtgggccggctcgaggccgtgtcacataccagcgatatgcacaggggatatgccgatagcccttcgaagggagcagcaccttacgttcaggcttttgacagtctgctggccgggccagtcgcggagtacctaaagatctcgaaagagattggcggagacgtccagaaacacgctgaaatggtgcacacaggcttgaagctcgagagggcccttctcgtgaccgccagtcagtgtcagcagccggcagagaacaagctaagtgatctccttgcccccatttctgagcagatcaaagaagtaattacattcagggagaagaaccgaggaagcaaattgttcaaccatctaagcgcagtctccgaatcaatccaggccctcgggtgggttgcaatggcccctaagcccggcccatatgtcaaagagatgaacgatgcggccatgttctataccaatcgagtgctcaaggaatacaaggacgtagacaagaagcacgtggactgggttaaggcttatctgtctatttggactgagctccaagcttatattaaagaattccacactacgggactggcttggtccaagactggccccgtcgcaaaagaactttctgggctccctagtggtccatcagccgggtcctgtccacccccccccccaccatgccccccccctccacctgttagcactattagctgcagttatgagtcagcctcgcgatcctcattattcgcgcaaatcaatcagggtgaatctatcactcacgcgctgaaacacgtcagtgacgacatgaaaacacataagaatccagcactgaaggctcagtctggacctgtgagaagcggcccaaagcctttttctgcgccaaaacctcagacatccccttcgccaaagcgtgctaccaagaaagaaccggcagtcctagagttagaggggaaaaagtggcgcgtggagaaccaggagaatgtgtctaacctcgttattgaggataccgagcttaaacaagttgcatatatctataagtgcgttaacaccaccttgcaaatcaagggtaagataaatagcataactgtggataattgcaagaagctcggtctggtctttgatgacgtcgttggcatcgttgagatcataaatagcaaggatgtgaaagtacaggtcatgggcaaagtccctaccattagtatcaacaaaaccgacggctgccacgcatacctgagcaaaaattccctcgattgcgagatcgtttcagccaagtccagtgaaatgaatgtgcttattcctaccgaaggtggcgactttaacgaattccccgtgccagaacaatttaaaactctatggaatggtcagaagttagttaccacggttacagagatagccggctag

SEQ ID NO: 336733 - DNA, 1425 bp, Artificial Sequence
  derived and/or modified sequence
atggctgacatgcagaaccttgtggaaagattagagcgcgccgttgggcgtctcgaggccgtgtcgcacacaagcgacatgcacagaggatacgccgacagtccctccaagggagcagcaccgtatgtgcaggcattcgactccctgcttgctggccctgtggcggagtatctcaaaatttcaaaggaaatcggaggagacgtgcagaaacacgcagaaatggtccatacggggctcaaactggagagagcactgcttgtcactgcatcccaatgccagcagccagccgagaacaaactttcagatctgctcgcgcctatttctgaacagattaaggaagttatcacattccgtgaaaagaacaggggttcaaagttattcaatcacctaagcgccgtcagcgaatcaatccaggccctgggatgggtcgccatggcccctaaacccggaccctatgtgaaggaaatgaatgacgccgctatgttttataccaatagggttctcaaggaatacaaggacgtcgataaaaagcacgtcgattgggtgaaagcctatttgagtatttggaccgagttacaagcctacattaaggagtttcacacgacaggactggcttggagcaaaactggtcccgttgcaaaggagctgagcggcctgccctccggcccatcagctggctcatgcccacccccgccgcccccttgcccaccaccaccgccagtgtcaactatctcttgcagttacgagagtgcaagccggagttccttgttcgcacagattaatcagggggaaagcatcactcatgctctaaaacacgtatccgacgacatgaagactcacaagaacccggcccttaaggctcaaagcgggcctgtcagatctggtcctaagcctttttccgcacctaaacctcagacttcccctagtccgaagagggctactaagaaagaaccagctgtcctagaactggaaggaaaaaagtggcgagtcgaaaaccaagagaatgtgtccaatctcgttatcgaagacacagaactgaagcaggtagcgtacatctacaagtgcgttaacactaccctccaaatcaaaggaaagattaattccatcacagtggataactgtaaaaagctgggtctcgtctttgacgatgtggtgggcattgtcgagatcattaactccaaggatgtcaaggtgcaggtcatgggcaaagtcccaactatttcaatcaataaaactgatggctgtcacgcctatctatctaagaattccttggactgcgagattgtatctgcgaagagctctgaaatgaatgtattaattcccactgaaggtggcgacttcaacgagttcccagtccccgaacagttcaaaacgctgtggaatggacagaagttggttactacggttactgagatcgcaggatag

SEQ ID NO: 336734 - DNA, 438 bp, Artificial Sequence
  derived and/or modified sequence
atggctgacatgcagaatctggtagagagactggagcgcgcagtgggcagactggaggctgtatcccataccagcgacatgcaccgagggtacgccgattccccctctaaagctggcgcagctccatatgtccaggcctatataaaggaatttcacactacaggattagcttggtccaagacaggtcccgtagctaaagagctgagcgggctgccatccggaccttcagcgggaagttgccctcctcccccccctccgtgtccacctccacccccagtgagtactatttcttgcagctatgagtctgcgagccggagcagtttattcgcccaaataaatcagggagagtctattacacacgctctaaagcacgtctcggacgatatgaaaacccacaaaaatccagcattaaaggcgcaaagcggacctgtcagatag

SEQ ID NO: 336735 - DNA, 817 bp, Artificial Sequence
  derived and/or modified sequence
ggctgatcgcagtccggaggtggtccattatggctgacatgcaaaatctggtagaaagattggagagggcagtgggccgcctggaggcagtatctcatacctctgacatgcaccgtgggtatgcagacagtccttcaaaaggagcagctccatatgtgcaggcatttgactcgctgcttgctggtcctgtggcagagtacttgaagatcagtaaagagattgggggagacgtgcagaaacatgcggagatggtccacacaggtttgaagttggagcgagctctgttggttacagcttctcagtgtcaacagccagcagaaaataagctttccgatttgttggcacccatctcagagcagatcaaagaagtgataacctttcgggagaagaaccgaggcagcaagttgtttaatcacctgtcagctgtcagcgaaagtatccaggccctgggctgggtggctatggctcccaagcctggcccttatgtgaaagaaatgaatgatgccgccatgttttatacaaaccgagtcctcaaagagtacaaagatgtggataagaagcatgtagactgggtcaaagcttatttaagtatatggacagagctgcaggcttacattaaggagttccataccaccggactggcctggagcaaaacggggcctgtggcaaaagaactgagcggactgccatctggaccctctgccggatcatgtcctcctccccctccaccatgcccccctcctcccccagtctctaccatttcatgctcatatgagtctgcttcccgctcatcactgttcgcgcagattaatcaggg

SEQ ID NO: 336736 - DNA, 792 bp, Artificial Sequence
  derived and/or modified sequence
atggcagatatgcagaacctcgtggaaagacttgagagagccgttggccgactagaagccgtgagtcacacgtccgacatgcaccggggatacgcagacagtccttccaaaggagccgccccatacgtacaggcattcgacagtctgcttgctggtcctgtagccgagtacctaaaaattagcaaagaaataggaggcgacgtgcagaagcatgctgaaatggtgcacacgggtctcaagctcgagagagcactgctggtaacagcctctcaatgccagcaacctgccgaaaataaattgtctgaccttctggctcccatatccgaacagatcaaagaggtgattacttttcgggagaagaatcggggttcaaagctattcaaccatctcagtgctgtgagcgaatcaatccaggctctaggctgggtcgccatggcccccaaacccggcccctatgttaaggagatgaatgatgctgccatgttttacactaacagggtgctaaaagagtacaaagacgtcgacaaaaaacatgttgattgggttaaagcgtacctctcgatttggacggaattgcaggcgtacatcaaagagttccatactactggactggcttggagtaaaaccggcccagttgccaaagagctgagcggtctgcccagtggaccatccgctggcagttgccctccacctcccccaccttgcccaccacccccacccgtcagcacaatttcttgttcctacgagagcgcatcccgctcttcactcttcgcgcagatcaaccagggttag

SEQ ID NO: 336737 - DNA, 1425 bp, Artificial Sequence
  derived and/or modified sequence
atggccgacatgcaaaacttggtagagaggctggaacgggcagtaggacgcttagaagctgtctcacataccagcgacatgcatagaggctatgctgactccccctcgaaaggtgcagccccatatgtgcaggcctttgactcactattagccggaccagtcgcagagtatctgaaaatctctaaggaaattgggggcgacgtgcaaaaacatgcggagatggtgcacacaggattaaaactggaacgggcactcctcgtgactgcatcacagtgccagcagcctgccgaaaacaagctttctgatttgttagcgcccatttcagaacagataaaggaggtgattacgtttcgcgaaaaaaaccggggaagcaagctattcaaccatctgagcgccgtgagcgagagtattcaagctcttggatgggtcgccatggccccaaagcccggtccctacgtgaaagagatgaatgatgccgcaatgttttacacaaatagagtgttaaaagagtataaagacgtggacaagaaacatgtggactgggtgaaagcctacctcagcatttggacagaactgcaagcttatataaaagagttccatacaactggccttgcctggtcaaaaactggacctgtagctaaggaactctccggcctcccttctggcccctctgccgggtcttgtccgcccccccccccgccatgccccccgccaccccccgtctccactattagttgcagctacgagtccgcctctcgatccagcctcttcgcccaaattaaccaaggagagtccattacgcacgctcttaagcacgtcagtgatgacatgaagacccataaaaatccagccttgaaagctcaatcaggccctgtgaggtctgggccaaagcctttctcagcccctaagcctcaaacctctcctagccccaaacgcgccactaagaaagagccggccgtcctcgaactggaaggaaagaaatggagagtggagaatcaagaaaatgtatcaaatctcgtcatcgaagatactgagctgaagcaggtggcatatatatacaaatgcgtcaatacaaccttgcagattaaggggaaaataaattcgatcactgtagacaattgtaagaaactgggactggtattcgacgatgttgtcggcatcgtggaaataattaactccaaagatgttaaagtgcaggtgatgggaaaagtacctactatatctataaataaaaccgatggatgccacgcctaccttagcaagaacagcctggattgtgaaattgtctcagccaagagtagtgagatgaatgtgttaattccgaccgaaggtggcgacttcaacgagtttcctgtaccagagcaattcaaaaccctttggaacggccagaagttagttactacagtcaccgaaatagccggatag

SEQ ID NO: 336738 - DNA, 438 bp, Artificial Sequence
  derived and/or modified sequence
atggctgacatgcagaatctggtcgagcgactagaacgcgctgttggccgccttgaggctgtatctcacacttctgacatgcacagaggatatgccgactccccctccaaggccggagccgccccatacgtccaagcctacattaaggaattccatacaacaggcttagcttggagtaagaccggtcccgtagccaaggaactttctggactaccttcaggcccctcagcaggttcatgtccccctcccccgcccccttgcccccctccccccccagtttctacgatcagctgcagctacgagagcgcttcccgcagcagcttattcgctcagattaaccaaggtgaaagcatcacacatgccttgaaacatgtatccgatgacatgaaaacacataaaaatccagcactcaaagcacaaagtggacccgtccggtag

SEQ ID NO: 336739 - DNA, 1425 bp, Artificial Sequence
  derived and/or modified sequence
atggcggatatgcagaaccttgtcgaacgtttagagcgcgctgtgggtagattagaagcagtgtcccacacctctgacatgcaccgtggctatgccgattcccccagtaaaggcgcagctccatacgtacaggcatttgactctcttctggccggaccggtggcagagtacctaaaaattagtaaagaaatcggtggagacgtgcagaagcacgccgagatggtacacactgggctcaaactggaaagggcactgcttgtaaccgccagtcaatgccagcaaccagctgagaataagctctccgatctcttggctcccattagtgaacagatcaaagaagtgattacctttcgtgaaaagaacagaggaagcaaacttttcaaccatttatcagcagtctccgagtccatacaagcccttggatgggtggccatggcacctaaaccaggaccttacgtcaaggaaatgaacgacgcagctatgttctacactaatagggtactaaaggagtacaaagatgtggacaagaagcacgtagattgggtcaaagcttatttgagcatctggaccgaacttcaggcctatattaaggagttccacactactggactcgcctggtctaaaaccggcccagtggctaaagaactgtctggcttaccatccggtccaagcgcaggttcatgtcctcccccacctcctccctgccccccccccccccccgtctccaccatcagttgctcatatgaaagtgcaagtcggagctccttatttgcccagattaaccaaggagagtccattacccacgctttgaagcatgtttctgacgatatgaaaacacataaaaaccctgcactaaaggctcagtctggccccgttagaagtgggcctaaaccatttagcgcccctaaaccccagacatcaccttcccccaaacgcgcgacaaagaaggaacccgcagtgctggaacttgagggcaagaagtggcgagtcgagaaccaggagaacgttagcaacctagtgatcgaagatacggaactcaaacaagtagcctacatttataaatgcgtgaacacgacgcttcagataaagggaaagatcaacagcataacagtcgataattgcaaaaagcttggtttagtgtttgatgacgtcgttggtattgtggaaatcatcaactctaaggacgttaaagtgcaggtaatgggaaaagtgccgactatctctatcaataaaacagacgggtgtcatgcctacctttccaaaaatagtctggattgtgaaattgtgagcgccaagtcttccgaaatgaatgttctaattccaactgaagggggagatttcaatgagttcccggtgccagaacaatttaaaacgctgtggaatggtcagaaactagtcactactgtcacggagattgcagggtag

SEQ ID NO: 336740 - DNA, 1425 bp, Artificial Sequence
  derived and/or modified sequence
atggctgacatgcaaaatttggtggaacgactggagagagccgtaggcaggttggaagccgtttcccacacttccgacatgcacaggggatatgctgattccccctctaagggtgccgccccttacgtacaagcttttgactccctcctggcaggaccagttgcagagtacttgaagatctccaaagaaatcggcggtgatgtgcagaaacatgccgagatggtgcatacaggccttaagctagagcgcgccttgctggtgactgcaagccaatgccagcaacccgcagagaacaaactctctgacttgttagctcccatctctgaacagatcaaggaggttataacctttagagagaagaaccgcggttccaagctgtttaaccacctgtctgccgtttctgagtccatccaagccttgggttgggtcgctatggcaccaaaacccggaccatacgtaaaggagatgaatgacgccgcaatgttttataccaatagagtcctcaaggaatacaaggatgtggacaaaaagcacgtggactgggtgaaagcatatctatcgatctggactgaactccaggcctatattaaggaattccacaccacaggcctagcttggtctaaaaccggaccagtcgcaaaagagttgtcgggactccccagcggcccttccgccggaagctgcccaccgcccccaccaccgtgccctccaccaccacccgtgtctacaatctcttgttcttatgaaagtgcctccaggtcctccctgtttgcccagattaaccagggcgagtcaatcactcacgctcttaaacatgtgtcagacgatatgaagacccacaagaaccccgcactgaaggcccagtccggccccgtgcggtctggcccaaaacccttctcggcacctaagccccagacttcaccttctcccaagcgtgccaccaagaaagaacctgccgtcctggagcttgaaggaaagaaatggcgcgtggaaaaccaagaaaacgtctcaaacctcgtgatcgaagacactgaactgaaacaagttgcctatatttataaatgcgtaaacaccacgcttcaaattaagggcaagatcaactccatcacagtcgataactgcaagaagcttggactggtgtttgacgacgtggtaggcatcgtggaaatcataaattcaaaagacgtgaaagtacaagttatgggaaaggtccccactatcagcattaacaagactgacggatgccacgcatacctttctaagaactccctcgactgtgaaatcgtgagtgcaaaatcttctgagatgaatgtcctgattccgaccgaaggtggcgacttcaatgagttccccgtgcccgagcagttcaagactctgtggaacggacagaaactggtaacgactgtgacggagatcgctggctag

SEQ ID NO: 336741 - DNA, 438 bp, Artificial Sequence
  derived and/or modified sequence
atggccgacatgcaaaacctggtcgaacgcctggagcgtgcagttggtagactcgaagctgtttcgcacacatcagatatgcacagaggatacgctgattcaccatcaaaggcgggagcagctccatacgtccaagcctatattaaagaatttcataccaccgggctagcttggtctaaaacaggcccagtagccaaggaactgagcggactccccagcggaccatccgcaggaagttgtcctccgccgcccccgccatgccctccgcctccccctgtgtctacaattagctgctcttatgaatccgcatcccgcagctccctgtttgcccagattaatcaaggtgagagtataacacatgcgttgaagcacgtgtccgatgacatgaaaacacacaaaaatcccgcattgaaggcacagtcaggaccggtgagatag

SEQ ID NO: 336742 - DNA, 792 bp, Artificial Sequence
  derived and/or modified sequence
atggccgacatgcagaatctagtggagaggctggaacgagcagtaggaagattggaggcagtgtcacacactagtgatatgcaccgcggctatgcagactctccatcaaagggcgccgcaccatatgttcaggcatttgattctttgctcgcgggcccagtagctgaatacctcaaaatcagtaaggaaatcggaggcgacgtacagaaacacgcagaaatggtgcacactggcttgaaattggaaagagccctgcttgtgactgcatcacaatgccagcagccagcagagaataaactctcagacctcctcgctccaatctctgaacagattaaagaagtcataacatttcgagaaaaaaataggggttcaaagcttttcaaccatctttccgccgtgtcagaaagcattcaggcgctgggttgggttgccatggcaccgaagccaggaccgtatgtgaaagaaatgaacgacgccgccatgttctatactaatagagtcctgaaggagtataaagatgtggataaaaaacacgtagactgggtcaaggcttacctgtcgatctggacagagttgcaggcctatattaaagaatttcatacaacaggcctcgcgtggtctaagacagggccggttgcaaaagaactcagcggattaccctctgggccaagtgcgggctcttgtcctcctccccctcccccttgtcctccaccacctcccgtcagtacaatctcctgtagttatgaatccgcctcccgctcaagtttattcgctcagatcaaccaaggttag

SEQ ID NO: 336743 - DNA, 1425 bp, Artificial Sequence
  derived and/or modified sequence
atggccgacatgcagaacctggtggagagactggagagagccgtgggcagactggaggccgtgagccacaccagcgacatgcacagaggctacgccgacagccccagcaagggcgccgccccctacgtgcaggccttcgacagcctgctggccggccccgtggccgagtacctgaagatcagcaaggagatcggcggcgacgtgcagaagcacgccgagatggtgcacaccggcctgaagctggagagagccctgctggtgaccgccagccagtgccagcagcccgccgagaacaagctgagcgacctgctggcccccatcagcgagcagatcaaggaggtgatcaccttcagagagaagaacagaggcagcaagctgttcaaccacctgagcgccgtgagcgagagcatccaggccctgggctgggtggccatggcccccaagcccggcccctacgtgaaggagatgaacgacgccgccatgttctacaccaacagagtgctgaaggagtacaaggacgtggacaagaagcacgtggactgggtgaaggcctacctgagcatctggaccgagctgcaggcctacatcaaggagttccacaccaccggcctggcctggagcaagaccggccccgtggccaaggagctgagcggcctgcccagcggccccagcgccggcagctgccccccccccccccccccctgccccccccccccccccgtgagcaccatcagctgcagctacgagagcgccagcagaagcagcctgttcgcccagatcaaccagggcgagagcatcacccacgccctgaagcacgtgagcgacgacatgaagacccacaagaaccccgccctgaaggcccagagcggccccgtgagaagcggccccaagcccttcagcgcccccaagccccagaccagccccagccccaagagagccaccaagaaggagcccgccgtgctggagctggagggcaagaagtggagagtggagaaccaggagaacgtgagcaacctggtgatcgaggacaccgagctgaagcaggtggcctacatctacaagtgcgtgaacaccaccctgcagatcaagggcaagatcaacagcatcaccgtggacaactgcaagaagctgggcctggtgttcgacgacgtggtgggcatcgtggagatcatcaacagcaaggacgtgaaggtgcaggtgatgggcaaggtgcccaccatcagcatcaacaagaccgacggctgccacgcctacctgagcaagaacagcctggactgcgagatcgtgagcgccaagagcagcgagatgaacgtgctgatccccaccgagggcggcgacttcaacgagttccccgtgcccgagcagttcaagaccctgtggaacggccagaagctggtgaccaccgtgaccgagatcgccggctag

SEQ ID NO: 336744 - DNA, 438 bp, Artificial Sequence
  derived and/or modified sequence
atggccgacatgcagaacctggtggagagactggagagagccgtgggcagactggaggccgtgagccacaccagcgacatgcacagaggctacgccgacagccccagcaaggccggcgccgccccctacgtgcaggcctacatcaaggagttccacaccaccggcctggcctggagcaagaccggccccgtggccaaggagctgagcggcctgcccagcggccccagcgccggcagctgccccccccccccccccccctgccccccccccccccccgtgagcaccatcagctgcagctacgagagcgccagcagaagcagcctgttcgcccagatcaaccagggcgagagcatcacccacgccctgaagcacgtgagcgacgacatgaagacccacaagaaccccgccctgaaggcccagagcggccccgtgagatag

SEQ ID NO: 336745 - DNA, 792 bp, Artificial Sequence
  derived and/or modified sequence
atggccgacatgcagaacctggtggagagactggagagagccgtgggcagactggaggccgtgagccacaccagcgacatgcacagaggctacgccgacagccccagcaagggcgccgccccctacgtgcaggccttcgacagcctgctggccggccccgtggccgagtacctgaagatcagcaaggagatcggcggcgacgtgcagaagcacgccgagatggtgcacaccggcctgaagctggagagagccctgctggtgaccgccagccagtgccagcagcccgccgagaacaagctgagcgacctgctggcccccatcagcgagcagatcaaggaggtgatcaccttcagagagaagaacagaggcagcaagctgttcaaccacctgagcgccgtgagcgagagcatccaggccctgggctgggtggccatggcccccaagcccggcccctacgtgaaggagatgaacgacgccgccatgttctacaccaacagagtgctgaaggagtacaaggacgtggacaagaagcacgtggactgggtgaaggcctacctgagcatctggaccgagctgcaggcctacatcaaggagttccacaccaccggcctggcctggagcaagaccggccccgtggccaaggagctgagcggcctgcccagcggccccagcgccggcagctgccccccccccccccccccctgccccccccccccccccgtgagcaccatcagctgcagctacgagagcgccagcagaagcagcctgttcgcccagatcaaccagggctag

SEQ ID NO: 336746 - DNA, 1425 bp, Artificial Sequence
  derived and/or modified sequence
atggccgacatgcagaatttagtcgagcggctggagcgcgcggttggtaggctggaggctgttagccacacttcggatatgcaccgaggatacgcagatagtcctagcaaaggcgctgcgccatatgttcaagcttttgatagtcttctcgccggaccagtcgccgaatatctgaagatcagtaaagaaatcggaggtgatgtgcagaagcacgcagagatggtccacactggactcaagctcgagcgcgcattactcgtcacggcctcacagtgtcagcagcccgcagagaacaagctctcagatctgctggcccccatctctgaacagattaaggaagtcataacattcagggagaaaaacaggggatctaaactgtttaaccatctcagtgcggtgtccgagtccattcaggcactgggctgggttgcaatggcccctaagcctgggccctatgtgaaagaaatgaacgacgcagcgatgttctacactaatagagtgttgaaagaatacaaggacgtggacaaaaaacacgttgactgggtgaaggcctaccttagcatctggaccgaactgcaggcatacattaaggaatttcacacaacgggcttagcctggtcaaagaccggccccgtggccaaagaactgtctggcctgcctagtggcccatcagctggctcttgcccacccccacctcccccttgcccgccacccccgcctgtctcgacaatctcctgctcctacgaaagtgctagcagatcttctctttttgcacagatcaaccagggagagtccataacacacgccttgaagcatgtctcagatgacatgaaaacccacaaaaatcctgccctcaaagcccaaagtgggcctgtccgctctggccctaaacccttctccgctcctaagccgcagactagtccttcccccaagagggctactaaaaaggagcccgcagttctagagttggaagggaaaaaatggcgagtggagaaccaggagaatgtatccaacctcgtgatcgaggacacagagctgaagcaagtcgcatatatctacaagtgtgtgaacacaaccctacagattaaaggaaaaattaatagcatcacagtcgataactgcaagaagcttggcctggtttttgacgacgttgtggggattgtggagataatcaactcaaaggacgtgaaggttcaggttatgggaaaagtgcctacgatctccattaacaagacagacgggtgccacgcatatctcagtaaaaattctctggactgcgagattgtgagtgccaagtcaagcgaaatgaacgtactgataccaacagaaggaggtgacttcaatgagttcccagtacctgaacaattcaagactctctggaacggccagaagctggttaccactgttaccgaaattgcagggtag

SEQ ID NO: 336747 - DNA, 2592 bp, Artificial Sequence
  derived and/or modified sequence
gaagcggagagcggctgatcgcagtccggaggtgaggcggaactctgaggtggtccattatggctgacatgcaaaatctggtagaaagattggagagggcagtgggccgcctggaggcagtatctcatacctctgacatgcaccgtgggtatgcagacagtccttcaaaaggagcagctccatatgtgcaggcatttgactcgctgcttgctggtcctgtggcagagtacttgaagatcagtaaagagattgggggagacgtgcagaaacatgcggagatggtccacacaggtttgaagttggagcgagctctgttggttacagcttctcagtgtcaacagccagcagaaaataagctttccgatttgttggcacccatctcagagcagatcaaagaagtgataacctttcgggagaagaaccgaggcagcaagttgtttaatcacctgtcagctgtcagcgaaagtatccaggccctgggctgggtggctatggctcccaagcctggcccttatgtgaaagaaatgaatgatgccgccatgttttatacaaaccgagtcctcaaagagtacaaagatgtggataagaagcatgtagactgggtcaaagcttatttaagtatatggacagagctgcaggcttacattaaggagttccataccaccggactggcctggagcaaaacggggcctgtggcaaaagaactgagcggactgccatctggaccctctgccggatcatgtcctcctccccctccaccatgcccccctcctcccccagtctctaccatttcatgctcatatgagtctgcttcccgctcatcactgttcgcgcagattaatcagggggagagcattacacatgccctgaaacatgtatctgatgacatgaagactcacaagaaccctgccctgaaggctcagagtggtccagtacgcagtggccccaaaccattctctgcacctaaaccccaaaccagcccatcccccaaacgagccacaaagaaggagccagctgtacttgaactggagggcaagaagtggagagtggaaaatcaggaaaatgtttccaacctggtgattgaggacacagagctgaaacaggtggcttacatatacaagtgtgtcaacacgacattgcaaatcaagggcaaaattaactccattacagtagataactgtaagaaacttggcctggtattcgatgacgtggtgggcattgtggagataatcaacagtaaggatgtcaaagttcaggtaatgggtaaagtgccaaccatatccatcaacaaaacagatggctgccatgcttacctgagcaagaattccctggattgtgaaatagtcagtgccaaatcttccgagatgaatgtcctcattcctacagaaggcggtgactttaatgaattcccagttcctgagcagttcaagaccctatggaacgggcagaagttggtcaccacagtgacagaaattgctggataagcgaagtgccactgggttctttgccctcccttcacaccatgggataaatctgtatcaagacggttcttttctagatttcctctacctttttgctcttaaaactgcttctctgctctgagaagcacagctacctgccttcactgaaatatacctcaggctgaaatttggggtgggatagcaggtcagttgatcttctgcaggaaggtgcagcttttccatatcagctcaaccacgccgccagtccattcttaaggaactgccgactaggactgatgatgcattttagctttgagcttttgggggttattctaccaacaaacagtccattggaaagaaaacagtccctggaattaacagatcagaatgttcacactggttaatctttttttaacaatgagcatgaaggtagcagaagctggtgtgtttccagatggttcttctaaccaaactaatttttcactgttgacaagcgaggcaagggttgcactggaccaaaggctgaggcttggccatctagcattccatacaaaattgtttcctataagcattccttttattctctattctatcctgggtctgcctcaaccgtgagataggagagtctctggtactagctgctgtagcagtgcccttcatccagggcagttaatggagtcttggaccctttctttctctgggatccctgcccagcaccttcctatagagatgactttaaaaggaaaaaaaaaaaaaaaaaaacccacatgatttcaaggagtctggcattcctgaatccttcttccctgccaggtgcctgtcacctgtcttcactgcctccttttccctgtcatgctcatcagcttatggcttctgtctaagcacctgaacagaggactgaaacctccactgcaggctggttttaggtcttgaattatgtaagaatcttgcacagcactgctaatgtaaatttcagttgtttttccctctaggacaaacacttaccaaaatatgcaacttttttttggtgggaagagagattgtcctgtgatttctacccatttcctgaggcctgtggaaataaacctttatgtacttaaagttatacagaaaatagaataaagttaatacc

SEQ ID NO: 336748 - DNA, 438 bp, Artificial Sequence
  derived and/or modified sequence
atggcggatatgcagaatctcgtggagagactggaacgcgccgtcggacgcttggaggcagtttcccatacatcagacatgcaccgcggctacgcagatagcccctctaaagcaggggccgccccatacgtccaggcctacattaaagaattccataccacagggctggcctggtctaagaccggtcccgttgcgaaagagctgagcggactacctagcgggccgtcagccggctcctgtcccccgcccccgcctccatgcccgccccctccgcccgtctcaactatctcttgctcttacgagagtgcaagccggtcaagcctttttgcccagatcaaccagggagagtcaatcacgcacgcgcttaaacatgtgtctgacgatatgaagacacataagaatccagccctcaaggcacagtctggtcccgtccggtag

SEQ ID NO: 336749 - DNA, 1425 bp, Artificial Sequence
  derived and/or modified sequence
atggccgatatgcagaatctggtggagaggcttgaaagagctgtcggacgacttgaagccgtgtcccacacaagtgatatgcacaggggctatgcagatagcccctccaagggagccgctccttacgtgcaggcattcgactctctgctggctgggcctgtggccgagtacctcaagatcagcaaagagatcggcggcgatgtgcagaaacatgcggagatggtccatacaggcctgaaactggaacgcgctttgcttgtaaccgcctcgcaatgtcagcagcccgccgaaaataaattatctgaccttttggccccaattagcgagcagattaaggaagtcatcaccttcagagagaagaatcggggttctaagctgttcaaccacctgagcgctgtctcggaatccattcaggcgctgggatgggtggcaatggcaccaaagccaggcccttacgtgaaggagatgaacgacgcggccatgttctacacaaatcgcgtcctgaaggagtacaaggacgttgataaaaagcatgttgactgggtcaaggcctatctttcgatctggaccgaactccaggcgtacataaaggagttccacaccacaggtctggcatggtccaagactgggcctgtggccaaagaattgagtggcctgccaagtgggcccagcgccggctcctgtccgcctccgcctcctccctgtccaccaccccctcccgtttctactatctcctgctcatacgagagcgcatctcgcagttccctatttgcgcagataaaccagggcgagtcaatcacgcatgctttaaagcacgtgtcagatgacatgaagacacacaaaaaccccgcactcaaggctcagtcgggtcccgtacgctcagggcccaagccctttagcgcccctaagccccagacgtcccctagccccaagagggcaaccaagaaggaacctgcagttttggagctcgagggcaaaaaatggcgcgttgagaatcaggagaatgtgagcaacctggttatagaggacacagaacttaagcaggtcgcgtacatctataagtgcgtcaatactaccctccaaataaaaggaaaaatcaatagcatcacagtcgataactgcaagaaactgggtttagtgtttgacgatgtcgtgggcattgtcgagatcattaactccaaggatgtcaaggtacaagtcatgggtaaagttcctactatatctatcaataagacagacggatgtcacgcctatctgtcaaagaacagtctggactgcgagatcgttagcgctaaatccagtgaaatgaatgtgttaatccctacagaaggaggcgactttaatgaattccccgttccggagcagtttaagactttatggaacggtcagaagctagtgacgacagtcactgaaattgcaggttag

SEQ ID NO: 336750 - DNA, 1425 bp, Artificial Sequence
  derived and/or modified sequence
atggcggacatgcaaaatctggttgaaagactcgagagggctgttgggcgcctggaagccgtatcacacactagcgacatgcatcggggctatgctgatagcccaagcaagggtgccgctccttacgtccaggcattcgatagcctcctcgccgggcccgtggctgaatatctgaaaattagcaaggaaatcgggggcgacgtgcagaagcacgctgagatggtccatacaggactgaagttggagagggcgttgctggtcaccgctagccagtgccagcagcccgctgagaataaactcagtgacttgctggctccaatttcagagcaaatcaaagaggtgattacctttagggaaaaaaatagaggctcaaagctgttcaaccatttatccgctgtatctgaaagcatccaggccttgggctgggtggcaatggctccaaaacctgggccctacgttaaagagatgaacgacgcagccatgttctataccaaccgagtgctaaaggaatataaggatgtggataaaaaacacgtcgattgggtgaaggcctacctaagtatctggacggagttgcaggcctacattaaagagtttcacactacagggctggcttggtccaagacgggaccggttgccaaggagctgtccggcctccccagcggaccatctgccggttcttgtcctccgcccccacctccctgcccgcctcccccacccgtgagcacgatcagctgctcgtatgaatcagcttccaggtcaagcctatttgcacagatcaatcagggcgaatcaatcacccatgccctgaagcatgttagcgatgatatgaagacacataaaaacccggctttaaaggcacagtctggacctgtgcgatccgggccaaaacccttttctgccccaaaaccccagacttcccccagccccaaacgcgcaaccaaaaaggaaccagctgtgttagagctcgaagggaagaaatggcgtgtggagaatcaggagaatgtgagtaatttagtgatcgaggatacagaactgaagcaggtggcctacatttataaatgcgtaaacactacgctccagatcaaaggaaaaattaattccatcactgtggacaactgcaaaaaactcggcctcgtgttcgacgacgtggtcgggattgtggagataatcaatagcaaggacgtgaaggttcaggttatggggaaggtgcctacaatctcaattaacaagacagatggctgccacgcttacctcagcaagaacagtctggattgtgagatcgtatcagccaagtcctccgaaatgaacgtccttatcccgacagaaggtggtgactttaacgagttccctgtgcccgaacaatttaagacattgtggaacggacaaaagttagtaacaacagtgactgaaattgcaggatag

SEQ ID NO: 336751 - DNA, 438 bp, Artificial Sequence
  derived and/or modified sequence
atggctgatatgcagaacctggtggagcgcctggaaagggccgtaggccggctcgaggccgtaagccacaccagtgatatgcaccgcgggtacgcggacagcccaagtaaggccggcgcggctccatacgtgcaggcctatatcaaggagttccatacgacaggccttgcctggtccaagaccgggcctgtggctaaagagctaagtggtcttccttccggaccctcagccgggtcatgtcccccgccacccccgccatgtccacctccacctcccgtctctacgatttcgtgctcttatgaatctgcatccaggagctcacttttcgcccagatcaatcaaggtgagagcatcacacacgcccttaagcatgtgtcggatgatatgaaaacacacaaaaaccctgccctgaaggcccagagcggccctgtgcgctag

SEQ ID NO: 336752 - DNA, 792 bp, Artificial Sequence
  derived and/or modified sequence
atggccgacatgcagaacctggtggagcggctggagagagcagtgggtagactggaagcggtgtctcatacatcagacatgcatcgaggttatgcagactccccatccaaaggagccgcaccctacgtgcaggcgtttgatagcctgcttgctgggcccgtcgcagagtatcttaaaatcagtaaggagatcggtggcgacgtgcagaaacatgccgaaatggttcatacaggcctcaagttggaacgtgcactgctggtcaccgcctcccagtgtcagcagccagcggagaacaagctctcagacttattggcacctatctcagagcagatcaaagaggtgatcacttttcgagaaaagaaccgtggaagtaagctctttaaccacctgagtgccgtaagtgagtctattcaggcactgggctgggtagctatggccccaaaaccaggtccatacgttaaggagatgaatgacgccgcaatgttttatacaaatagagtgcttaaagaatacaaggacgtcgataagaaacacgtagattgggtcaaggcctacctgtccatctggacagagctgcaggcatatatcaaagaattccataccacgggactggcctggagcaagactgggcctgttgcgaaagaactgagcggcttgccttccgggccgagcgcaggcagttgcccaccaccccccccgccctgcccaccccccccgccagtgtccacaatcagttgttcttacgagagcgcctcccggtcctcactgtttgcccagataaatcagggttag

SEQ ID NO: 336753 - DNA, 1425 bp, Artificial Sequence
  derived and/or modified sequence
atggctgacatgcagaacctggtggagcggctggagagagctgtgggccgcctggaggccgtgagccacaccagtgacatgcaccggggctacgccgacagccccagcaaaggagctgccccctacgtgcaggcctttgacagcctgctggccggccctgtggccgagtacctgaagatcagcaaggagattggaggagatgtgcagaagcacgccgagatggtgcacacaggcctgaagctggagcgggccctgctggtgacagccagccagtgccagcagcctgctgagaacaagctgagtgacctgctggcccccatcagcgagcagatcaaggaggtgatcaccttccgggagaagaacagaggcagcaagctgttcaaccacctgtctgctgtgtctgagagcatccaggccctgggctgggtggccatggcccccaagccaggcccctacgtgaaggagatgaatgatgctgccatgttctacaccaacagagtgctgaaggagtacaaggatgtggacaagaagcacgtggactgggtgaaggcctacctgagcatctggacagagctgcaggcctacatcaaggagttccacaccaccggcctggcctggagcaagacaggccctgtggccaaggagctgagcggcctgcccagcggccccagcgctggcagctgccccccacctcctccaccctgccccccacctcctcctgtgtccaccatcagctgcagctatgagagcgccagccgcagcagcctgtttgcccagatcaaccagggcgagagcatcacccacgccctgaagcacgtgtctgatgacatgaagacccacaagaacccagccctgaaggcccagagcggccctgtgcgcagcggccccaagcccttcagcgcccccaagccccagaccagccccagccccaagagggccaccaagaaggagcctgctgtgctggagctggagggcaagaagtggagggtggagaaccaggagaatgtgagcaacctggtgattgaggacacagagctgaagcaggtggcctacatctacaagtgtgtgaacaccaccctgcagatcaagggcaagatcaacagcatcaccgtggacaactgcaagaagctgggcctggtgtttgatgatgtggtgggcatcgtggagatcatcaacagcaaggatgtgaaggtgcaggtgatgggcaaggtgcccaccatcagcatcaacaagacagatggctgccacgcctacctgagcaagaacagcctggactgtgagatcgtgtctgccaagagcagcgagatgaatgtgctgatccccacagagggcggggacttcaatgagttccctgtgcctgagcagttcaagaccctgtggaatggccagaagctggtgaccaccgtgacagaaattgctggatag

SEQ ID NO: 336754 - DNA, 438 bp, Artificial Sequence
  derived and/or modified sequence
atggctgacatgcagaacctggtggagcggctggagagagctgtgggccgcctggaggccgtgagccacaccagtgacatgcaccggggctacgccgacagccccagcaaggccggggccgccccctacgtgcaggcctacatcaaggagttccacaccaccggcctggcctggagcaagacaggccctgtggccaaggagctgagcggcctgcccagcggccccagcgctggcagctgccccccacctcctccaccctgccccccacctcctcctgtgtccaccatcagctgcagctatgagagcgccagccgcagcagcctgtttgcccagatcaaccagggcgagagcatcacccacgccctgaagcacgtgtctgatgacatgaagacccacaagaacccagccctgaaggcccagagcggccctgtgaggtag

SEQ ID NO: 336755 - DNA, 1746 bp, Artificial Sequence
  derived and/or modified sequence
gctgatcgcagtccggaggtgaggcggaactctgaggtggtccattatggctgacatgcaaaatctggtagaaagattggagagggcagtgggccgcctggaggcagtatctcatacctctgacatgcaccgtgggtatgcagacagtccttcaaaagcaggagcagctccatatgtgcaggcttacattaaggagttccataccaccggactggcctggagcaaaacggggcctgtggcaaaagaactgagcggactgccatctggaccctctgccggatcatgtcctcctccccctccaccatgcccccctcctcccccagtctctaccatttcatgctcatatgagtctgcttcccgctcatcactgttcgcgcagattaatcagggggagagcattacacatgccctgaaacatgtatctgatgacatgaagactcacaagaaccctgccctgaaggctcagagtggtccagtacgcagtggccccaaaccattctctgcacctaaaccccaaaccagcccatcccccaaacgagccacaaagaaggagccagctgtacttgaactggagggcaagaagtggagagtggaaaatcaggaaaatgtttccaacctggtgattgaggacacagagctgaaacaggtggcttacatatacaagtgtgtcaacacgacattgcaaatcaagggcaaaattaactccattacagtagataactgtaagaaacttggcctggtattcgatgacgtggtgggcattgtggagataatcaacagtaaggatgtcaaagttcaggtaatgggtaaagtgccaaccatatccatcaacaaaacagatggctgccatgcttacctgagcaagaattccctggattgtgaaatagtcagtgccaaatcttccgagatgaatgtcctcattcctacagaaggcggtgactttaatgaattcccagttcctgagcagttcaagaccctatggaacgggcagaagttggtcaccacagtgacagaaattgctggataagcgaagtgccactgggttctttgccctcccttcacaccatgggataaatctgtatcaagacggttcttttctagatttcctctacctttttgctcttaaaactgcttctctgctctgagaagcacagctacctgccttcactgaaatatacctcaggctgaaatttggggtgggatagcaggtcagttgatcttctgcaggaaggtgcagcttttccatatcagctcaaccacgccgccagtccattcttaaggaactgccgactaggactgatgatgcattttagctttgagcttttgggggttattctaccaacaaacagtccattggaaagaaaacagtccctggaattaacagatcagaatgttcacactggttaatctttttttaacaatgagcatgaaggtagcagaagctggtgtgtttccagatggttcttctaaccaaactaatttttcactgttgacaagcgaggcaagggttgcactggaccaaaggctgaggcttggccatctagcattccatacaaaattgtttcctataagcattccttttattctctattctatcctgggtctgcctcaaccgtgagataggagagtctctggtactagctgctgtagcagtgcccttcatccagggcagttaatggagtcttggaccctttctttctctgggatccctgcccagcaccttcctatagagatgactttaaaagg

SEQ ID NO: 336756 - DNA, 1563 bp, Artificial Sequence
  derived and/or modified sequence
ggaagcggagagcggctgatcgcagtccggaggtgaggcggaactctgagcaggtggtccattatggctgacatgcaaaatctggtagaaagattggagagggcagtgggccgcctggaggcagtatctcatacctctgacatgcaccgtgggtatgcagacagtccttcaaaaggagcagctccatatgtgcaggcatttgactcgctgcttgctggtcctgtggcagagtacttgaagatcagtaaagagattgggggagacgtgcagaaacatgcggagatggtccacacaggtttgaagttggagcgagctctgttggttacagcttctcagtgtcaacagccagcagaaaataagctttccgatttgttggcacccatctcagagcagatcaaagaagtgataacctttcgggagaagaaccgaggcagcaagttgtttaatcacctgtcagctgtcagcgaaagtatccaggccctgggctgggtggctatggctcccaagcctggcccttatgtgaaagaaatgaatgatgccgccatgttttatacaaaccgagtcctcaaagagtacaaagatgtggataagaagcatgtagactgggtcaaagcttatttaagtatatggacagagctgcaggcttacattaaggagttccataccaccggactggcctggagcaaaacggggcctgtggcaaaagaactgagcggactgccatctggaccctctgccggatcatgtcctcctccccctccaccatgcccccctcctcccccagtctctaccatttcatgctcatatgagtctgcttcccgctcatcactgttcgcgcagattaatcagggggagagcattacacatgccctgaaacatgtatctgatgacatgaagactcacaagaaccctgccctgaaggctcagagtggtccagtacgcagtggccccaaaccattctctgcacctaaaccccaaaccagcccatcccccaaacgagccacaaagaaggagccagctgtacttgaactggagggcaagaagtggagagtggaaaatcaggaaaatgtttccaacctggtgattgaggacacagagctgaaacaggtggcttacatatacaagtgtgtcaacacgacattgcaaatcaagggcaaaattaactccattacagtagataactgtaagaaacttggcctggtattcgatgacgtggtgggcattgtggagataatcaacagtaaggatgtcaaagttcaggtaatgggtaaagtgccaaccatatccatcaacaaaacagatggctgccatgcttacctgagcaagaattccctggattgtgaaatagtcagtgccaaatcttccgagatgaatgtcctcattcctacagaaggcggtgactttaatgaattcccagttcctgagcagttcaagaccctatggaacgggcagaagttggtcaccacagtgacagaaattgctggataagcgaagtgccactgggttctttgccctcccttcacaccatgggataaatctgtatcaagacggttcttttctaga

SEQ ID NO: 336757 - DNA, 2964 bp, Artificial Sequence
  derived and/or modified sequence
gtggcctcgatcaccaccgagagctgacggccgcccggattcccgccctcagagaatcctggcccccagtcgttccaagaccctttacggactgcagcttaaaggaaccggcctctgccattgagaccaaactgacagaggaactggtcactcttctgttctttccagagaggagcttagccagggacttctgcccttcctgggcccgggcctcgggggcgattccgggtaggtaaagcggaacgagggcgtggcctctcttgtgagcccgccctccccgtgtcgctcccgccttgagggcggggctctttcccaagtgccctctgtgagagccgggccgctctctccggggcgtggcgaagaggggcggagtcacgagcggggcggtgagacttcctgcccagtcgcgggccagcctagcgcttcagccggcggctcatttccggtgggggcgccgcgcccagtgagggcccggaagtgggtcgcgcggagattgctgggcggttcttgccggaagcggagagcggctgatcgcagtccggagcaggtggtccattatggctgacatgcaaaatctggtagaaagattggagagggcagtgggccgcctggaggcagtatctcatacctctgacatgcaccgtgggtatgcagacagtccttcaaaaggagcagctccatatgtgcaggcatttgactcgctgcttgctggtcctgtggcagagtacttgaagatcagtaaagagattgggggagacgtgcagaaacatgcggagatggtccacacaggtttgaagttggagcgagctctgttggttacagcttctcagtgtcaacagccagcagaaaataagctttccgatttgttggcacccatctcagagcagatcaaagaagtgataacctttcgggagaagaaccgaggcagcaagttgtttaatcacctgtcagctgtcagcgaaagtatccaggccctgggctgggtggctatggctcccaagcctggcccttatgtgaaagaaatgaatgatgccgccatgttttatacaaaccgagtcctcaaagagtacaaagatgtggataagaagcatgtagactgggtcaaagcttatttaagtatatggacagagctgcaggcttacattaaggagttccataccaccggactggcctggagcaaaacggggcctgtggcaaaagaactgagcggactgccatctggaccctctgccggatcatgtcctcctccccctccaccatgcccccctcctcccccagtctctaccatttcatgctcatatgagtctgcttcccgctcatcactgttcgcgcagattaatcagggggagagcattacacatgccctgaaacatgtatctgatgacatgaagactcacaagaaccctgccctgaaggctcagagtggtccagtacgcagtggccccaaaccattctctgcacctaaaccccaaaccagcccatcccccaaacgagccacaaagaaggagccagctgtacttgaactggagggcaagaagtggagagtggaaaatcaggaaaatgtttccaacctggtgattgaggacacagagctgaaacaggtggcttacatatacaagtgtgtcaacacgacattgcaaatcaagggcaaaattaactccattacagtagataactgtaagaaacttggcctggtattcgatgacgtggtgggcattgtggagataatcaacagtaaggatgtcaaagttcaggtaatgggtaaagtgccaaccatatccatcaacaaaacagatggctgccatgcttacctgagcaagaattccctggattgtgaaatagtcagtgccaaatcttccgagatgaatgtcctcattcctacagaaggcggtgactttaatgaattcccagttcctgagcagttcaagaccctatggaacgggcagaagttggtcaccacagtgacagaaattgctggataagcgaagtgccactgggttctttgccctcccttcacaccatgggataaatctgtatcaagacggttcttttctagatttcctctacctttttgctcttaaaactgcttctctgctctgagaagcacagctacctgccttcactgaaatatacctcaggctgaaatttggggtgggatagcaggtcagttgatcttctgcaggaaggtgcagcttttccatatcagctcaaccacgccgccagtccattcttaaggaactgccgactaggactgatgatgcattttagctttgagcttttgggggttattctaccaacaaacagtccattggaaagaaaacagtccctggaattaacagatcagaatgttcacactggttaatctttttttaacaatgagcatgaaggtagcagaagctggtgtgtttccagatggttcttctaaccaaactaatttttcactgttgacaagcgaggcaagggttgcactggaccaaaggctgaggcttggccatctagcattccatacaaaattgtttcctataagcattccttttattctctattctatcctgggtctgcctcaaccgtgagataggagagtctctggtactagctgctgtagcagtgcccttcatccagggcagttaatggagtcttggaccctttctttctctgggatccctgcccagcaccttcctatagagatgactttaaaaggaaaaaaaaaaaaaaaaaaacccacatgatttcaaggagtctggcattcctgaatccttcttccctgccaggtgcctgtcacctgtcttcactgcctccttttccctgtcatgctcatcagcttatggcttctgtctaagcacctgaacagaggactgaaacctccactgcaggctggttttaggtcttgaattatgtaagaatcttgcacagcactgctaatgtaaatttcagttgtttttccctctaggacaaacacttacc

SEQ ID NO: 336758 - DNA, 792 bp, Artificial Sequence
  derived and/or modified sequence
atggctgacatgcagaacctggtggagcggctggagagagctgtgggccgcctggaggccgtgagccacaccagtgacatgcaccggggctacgccgacagccccagcaaaggagctgccccctacgtgcaggcctttgacagcctgctggccggccctgtggccgagtacctgaagatcagcaaggagattggaggagatgtgcagaagcacgccgagatggtgcacacaggcctgaagctggagcgggccctgctggtgacagccagccagtgccagcagcctgctgagaacaagctgagtgacctgctggcccccatcagcgagcagatcaaggaggtgatcaccttccgggagaagaacagaggcagcaagctgttcaaccacctgtctgctgtgtctgagagcatccaggccctgggctgggtggccatggcccccaagccaggcccctacgtgaaggagatgaatgatgctgccatgttctacaccaacagagtgctgaaggagtacaaggatgtggacaagaagcacgtggactgggtgaaggcctacctgagcatctggacagagctgcaggcctacatcaaggagttccacaccaccggcctggcctggagcaagacaggccctgtggccaaggagctgagcggcctgcccagcggccccagcgctggcagctgccccccacctcctccaccctgccccccacctcctcctgtgtccaccatcagctgcagctatgagagcgccagccgcagcagcctgtttgcccagatcaaccagggctag

SEQ ID NO: 336759 - DNA, 1425 bp, Artificial Sequence
  derived and/or modified sequence
atggccgacatgcagaacctggtggagcggctggagcgggccgtggggaggctggaagctgtatcccatacttcagatatgcatcgcggctatgcggattccccctctaagggcgctgcaccttacgtgcaggcctttgactcattgttagccggacccgtagccgagtacctgaagatctctaaggagattgggggagatgttcagaagcatgctgagatggtccataccggcctgaagttggagagagctctcctggtcactgcctcccaatgtcagcaacctgcagaaaacaaactgtctgacctattggccccaatcagcgagcagatcaaagaggtcattacattcagggagaaaaatcgaggctctaaactttttaaccacctgtcagcagttagtgaaagtatacaggccttgggctgggttgctatggcaccaaaaccgggaccctacgtaaaagagatgaacgacgctgccatgttttacacaaaccgtgtactcaaagaatataaagacgtggacaagaagcacgtcgactgggtgaaagcgtacctgtctatctggaccgagctccaagcctacattaaagagttccacacaacaggcctcgcctggtccaagaccggacccgtagccaaggagctgtcaggccttcctagtggcccctctgctggctcatgtccgcccccaccgccaccctgcccccccccacctccggtgtccacaattagctgcagctatgaaagcgcatccagatccagcctgttcgcacagattaatcagggggaaagcataacacacgctctaaagcatgtgtcagacgacatgaagacacacaagaaccccgctttaaaagctcagagcggccctgtgcgtagtggcccaaagccattttcagcccccaaaccccagacctctccttctccaaaaagggcaaccaaaaaggagcctgccgtgttagaacttgagggaaagaaatggcgcgtcgagaatcaggagaatgtctcaaacctcgtcattgaagatactgaattgaagcaggtggcatacatttacaagtgcgtcaataccacactgcagattaagggtaagattaactcaattactgtggacaattgcaaaaagttggggctggtgtttgacgatgttgtgggcattgtggaaattataaactctaaggatgtcaaggtgcaagtcatgggaaaggtacctacaatttcaataaacaagaccgatggttgtcacgcctatttgtctaaaaattcactagattgcgagattgtctctgccaaatcgtccgagatgaacgttctgatcccaacagagggaggcgattttaacgaatttcccgtccctgaacagtttaagaccctgtggaatggccagaagcttgtcaccaccgtcaccgagatcgccggatag

SEQ ID NO: 336760 - DNA, 438 bp, Artificial Sequence
  derived and/or modified sequence
atggccgacatgcagaacctggtggagcggctggagcgggccgtgggcagactcgaagcggttagtcacaccagcgatatgcaccgtggctacgccgacagcccgtctaaggctggcgccgccccatatgtgcaggcttacattaaagaattccacactaccggtttggcctggagcaaaactggacctgtagctaaggagctctcaggattaccatctggcccatccgcaggctcctgtcctcctcctccgcctccctgtccccctccaccccccgtaagcacaatctcttgcagctatgagtcggcttctaggtcttctctgtttgcacagatcaaccagggagagagcatcacccacgcactcaagcacgtgtctgacgatatgaaaactcacaagaatcccgccctgaaggctcagtccgggccagtgagatag

SEQ ID NO: 336761 - DNA, 1425 bp, Artificial Sequence
  derived and/or modified sequence
atggccgacatgcagaacctggtggagcggctggagcgggccgtgggacggcttgaagcggttagccatacaagtgatatgcacaggggatatgccgattcaccatccaagggggccgccccctatgtccaagcattcgattccctccttgcagggcctgtcgcagagtacctcaagatctctaaagagataggcggcgacgtacaaaagcatgccgagatggtccataccggactaaaactggagagggcgttgctggtaaccgctagccagtgccagcaacctgcggaaaacaaactgagtgatttactagccccaatctctgagcagatcaaagaagtcatcaccttccgagaaaagaatcggggctcaaaactctttaatcacttatccgccgtttctgaaagtattcaggccctggggtgggtggctatggcccccaagcctggcccttacgtgaaagaaatgaatgacgcagcaatgttttatacaaatagagtccttaaggagtataaggatgtggataagaaacatgtggactgggttaaggcatacctgtctatctggaccgagcttcaggcttacattaaagagttccacaccactggccttgcatggagcaaaactgggcccgtagctaaggagttgtctgggctgcccagcggtccatccgcaggcagttgcccaccaccgcctcccccatgtccacctccaccacctgtatccaccatctcatgttcttacgaaagtgcttcacggagttctctctttgcccagattaaccagggcgagtctatcacgcacgcactcaagcacgtgtcagacgacatgaaaacccacaagaatccagctctaaaggcccagtcagggcccgtcagatctggacctaagcccttcagcgcccccaaaccacagacatcccctagtccaaaacgagcgacaaaaaaggagccagccgtgctggagctcgaggggaagaaatggcgggtcgaaaatcaggagaatgtgtcaaatcttgttatcgaggacaccgagctcaaacaggtcgcctatatttacaagtgtgtgaacaccactctccaaataaaggggaaaattaattctattactgtggataactgcaagaagctcgggttggtgttcgacgatgtggtcgggattgtcgagattattaacagtaaagacgtgaaagtccaagtcatggggaaggtgcctacaatttcaatcaacaaaacggatggatgtcatgcctatctcagtaagaattctctggactgcgagatagtttcggcgaaatccagcgaaatgaatgttctaatcccaacagaaggaggggactttaatgagtttccagtgccagaacagtttaagacgctttggaacggccagaagctggtgactacagttacggagatagccggctag

SEQ ID NO: 336762 - DNA, 1425 bp, Artificial Sequence
  derived and/or modified sequence
atggccgacatgcagaacctggtggagcggctggagcgggccgtggggaggttggaggcggtgtcccacacaagtgacatgcacagaggttacgccgacagtccatctaaaggcgccgccccctacgtgcaagcattcgactctctgctggccggaccagtggccgagtacctgaaaatttccaaggagatcgggggtgatgtgcaaaagcacgcagagatggttcataccggtcttaagctagaacgggcattactcgttaccgcatctcagtgtcagcagccggccgagaataaactgtcagatctcttagcccccatcagtgagcagataaaggaggtgatcacattcagagaaaagaatagaggatctaaattgtttaatcatctgtcagccgtgagcgaaagcatacaggcactgggttgggtcgctatggcccccaagcctggcccttacgtaaaggaaatgaatgatgccgccatgttttataccaacagggtcctgaaagagtacaaagatgttgataaaaagcatgtggactgggtgaaggcatatttgagcatctggaccgagctccaggcgtacatcaaagagttccatactactggcctggcatggtcaaaaaccggaccagtggcaaaggaattaagcggcctgccatcagggcccagtgctggatcatgtccaccaccaccgccgccatgcccaccacctccaccagtgtccaccatctcttgtagctatgaaagcgccagccggtcgtctctgtttgcccagattaatcagggcgagagcattacacatgccctgaaacacgtctccgacgacatgaagacccacaaaaacccagctctgaaagcccagagtggtcccgtgcgctctggccctaagccattttcagcacctaagcctcagacatctccgtcccctaaacgggctaccaagaaggaacccgccgtcctggaactagagggaaagaaatggcgcgtggagaatcaggagaatgtgtcaaacctggtcatcgaagacaccgagctgaagcaggtggcctacatttataaatgtgtgaatacgaccttgcaaataaaggggaaaatcaactcaattacagtggacaactgcaagaaattgggactggtatttgacgatgtggtcgggattgtggaaattataaatagcaaggacgtaaaggtgcaagtcatgggcaaagttcccacaattagcatcaacaagacagacggatgccacgcatatctgtcgaagaattctttagactgcgagatcgtttccgccaagagtagtgaaatgaatgtgcttatccctaccgagggaggcgatttcaatgaattcccagtgcccgagcagtttaagacgctttggaatgggcagaagcttgttaccacggtaacagaaatagctggatag

SEQ ID NO: 336763 - DNA, 438 bp, Artificial Sequence
  derived and/or modified sequence
atggccgacatgcagaacctggtggagcggctggagcgggccgtggggagactggaagccgtctcacataccagtgatatgcaccgaggctacgcggacagcccaagcaaagccggcgcagcaccttacgtgcaagcttacattaaggagttccacacaaccggcctcgcttggtccaaaaccggacctgtagcaaaagagcttagcggtctgccatcaggtccaagcgccggaagttgccctccccctccgccaccatgcccacctccccctcccgtgtctactatctcttgttcttatgaatctgcttcccgcagcagcttattcgcgcagattaatcagggagagagtataacacatgctttaaagcatgtcagcgatgatatgaagacccacaagaacccagcactcaaagcgcagtccggccccgttagatag

SEQ ID NO: 336764 - DNA, 792 bp, Artificial Sequence
  derived and/or modified sequence
atggccgacatgcagaacctggtggagcggctggagcgggccgtggggcgcctagaggcggtgtctcatacaagcgacatgcaccggggctacgcagatagtcccagtaaaggtgctgctccctatgttcaagcatttgacagcctgctcgccggccccgtggccgagtatctgaagattagcaaagagattggtggcgatgtccagaagcacgcagagatggtgcatacagggctaaaactcgagagggcgttgctcgttacagcaagtcagtgtcaacagcctgctgaaaacaaactttctgacttactggcccccataagtgagcagataaaggaagtgatcacgttcagggagaaaaaccgcggtagcaagctgttcaaccacctcagtgccgtgtccgaatcaattcaggccctcgggtgggtggccatggcaccaaaaccaggaccatatgtgaaggagatgaacgacgctgccatgttttatactaacagggtgctcaaagagtacaaagacgtggacaagaaacatgttgattgggtgaaggcatatttgtcaatttggacagaactccaggcctacatcaaagagttccatacaactggcctcgcatggagcaagactggtccagtagctaaggagctgtcaggactgccctcaggacccagcgccggctcttgtccgcccccacctcccccctgccccccccccccgccagtgagtactatcagctgctcatatgagtcagcttcacgtagtagcctcttcgcccagattaatcagggatag

SEQ ID NO: 336765 - RNA, 1425 nt, Artificial Sequence
  derived and/or modified sequence
auggccgauaugcagaaccucguggaacgacuugagagagccgucgggagacuagaagccgucagccacacaucagauaugcauagagguuaugccgauaguccuaguaaaggggccgcuccauacguccaggcauucgacucuuugcuggccggcccuguggccgaauaccuuaagaucuccaaagagauugggggggacguacagaaacaugccgagauggugcacaccgggcugaagcucgagcgggcgcuccugguaaccgcuucucagugucagcaacccgccgaaaacaaacuaagugacuugcuggcccccaucuccgaacaaauuaaagagguuauaaccuuuagagagaagaauagaggcucaaaacuguucaaccaccuguccgccguuagcgaauccauucaggccuuaggauggguggcaauggcuccuaaaccaggcccauacgugaaggaaaugaacgaugcagccauguuuuacacaaacaggguccugaaggaauacaaagacguggacaaaaagcacguagacugggugaaggccuaccugaguauuuggacagaacugcaggcguauaucaaagaauuucauacuacggggcuggcguggagcaagacaggcccuguugccaaagagcuuuccggccucccgucuggcccaucugcuggcuccugccccccaccaccaccgccauguccaccgccaccgccaguuagcacuauuucgugcucauacgaguccgcaucgcgcucuagccuuuucgcccaaauuaaucagggugaauccauuacucacgcgcugaaacacgucucugaugauaugaaaacccauaagaauccagcacuuaaggcacagucaggccccguacgcucugguccgaagccauucuccgcuccaaaaccgcagacaucacccucgccuaagcgcgcaacuaagaaagaacccgcuguacuggaacuggaaggcaagaaguggagggucgaaaaucaagagaaugugucaaauuuggugaucgaggacaccgagcugaaacaaguagcuuacaucuacaaauguguuaauacaacgcuccagaucaagggcaagaucaauagcauuacugucgauaauugcaaaaagcugggccuuguauuugacgauguagucggcauuguagaaaucaucaauaguaaagaugugaagguucaggugaugggaaaagugcccacaaucucaauaaauaagacggacgggugccacgccuaccucucaaaaaacucgcuggauugugaaauugugagcgcaaagucuucugagaugaauguacuaauccccacagagggcggagauuuuaacgaauuccccgugcccgaacaguuuaagacucucuggaacggacagaaacuuguaacuaccgucacagagaucgcaggguag

SEQ ID NO: 336766 - RNA, 438 nt, Artificial Sequence
  derived and/or modified sequence
auggcagauaugcagaaccucguggaacgccuggagagagccgucggcagacuggaagccgugucccauacuucagauaugcaccgagguuacgcugacucccccucuaaggccggcgccgccccuuaugugcaagcuuauaucaaggaauuccauaccacaggccuggccuggagcaaaacuggcccuguggccaaagaacucagugggcuaccuagcgggccaagcgcaggaucaugcccaccaccuccucccccuugucccccacccccuccaguaucaacuauaucaugcuccuacgagagcgcuucccgcagcagcuuauucgcucagauuaaccaaggugaaagcaucacacaugccuugaaacauguauccgaugacaugaaaacacauaaaaauccagcacucaaagcacaaaguggacccguccgguag

SEQ ID NO: 336767 - RNA, 1425 nt, Artificial Sequence
  derived and/or modified sequence
auggcggacaugcagaaccuggucgaacgccucgaaagagcagugggccggcucgaggccgugucacauaccagcgauaugcacaggggauaugccgauagcccuucgaagggagcagcaccuuacguucaggcuuuugacagucugcuggccgggccagucgcggaguaccuaaagaucucgaaagagauuggcggagacguccagaaacacgcugaaauggugcacacaggcuugaagcucgagagggcccuucucgugaccgccagucagugucagcagccggcagagaacaagcuaagugaucuccuugcccccauuucugagcagaucaaagaaguaauuacauucagggagaagaaccgaggaagcaaauuguucaaccaucuaagcgcagucuccgaaucaauccaggcccucggguggguugcaauggccccuaagcccggcccauaugucaaagagaugaacgaugcggccauguucuauaccaaucgagugcucaaggaauacaaggacguagacaagaagcacguggacuggguuaaggcuuaucugucuauuuggacugagcuccaagcuuauauuaaagaauuccacacuacgggacuggcuugguccaagacuggccccgucgcaaaagaacuuucugggcucccuagugguccaucagccggguccuguccacccccccccccaccaugcccccccccuccaccuguuagcacuauuagcugcaguuaugagucagccucgcgauccucauuauucgcgcaaaucaaucagggugaaucuaucacucacgcgcugaaacacgucagugacgacaugaaaacacauaagaauccagcacugaaggcucagucuggaccugugagaagcggcccaaagccuuuuucugcgccaaaaccucagacauccccuucgccaaagcgugcuaccaagaaagaaccggcaguccuagaguuagaggggaaaaaguggcgcguggagaaccaggagaaugugucuaaccucguuauugaggauaccgagcuuaaacaaguugcauauaucuauaagugcguuaacaccaccuugcaaaucaaggguaagauaaauagcauaacuguggauaauugcaagaagcucggucuggucuuugaugacgucguuggcaucguugagaucauaaauagcaaggaugugaaaguacaggucaugggcaaagucccuaccauuaguaucaacaaaaccgacggcugccacgcauaccugagcaaaaauucccucgauugcgagaucguuucagccaaguccagugaaaugaaugugcuuauuccuaccgaagguggcgacuuuaacgaauuccccgugccagaacaauuuaaaacucuauggaauggucagaaguuaguuaccacgguuacagagauagccggcuag

SEQ ID NO: 336768 - RNA, 1425 nt, Artificial Sequence
  derived and/or modified sequence
auggcugacaugcagaaccuuguggaaagauuagagcgcgccguugggcgucucgaggccgugucgcacacaagcgacaugcacagaggauacgccgacagucccuccaagggagcagcaccguaugugcaggcauucgacucccugcuugcuggcccuguggcggaguaucucaaaauuucaaaggaaaucggaggagacgugcagaaacacgcagaaaugguccauacggggcucaaacuggagagagcacugcuugucacugcaucccaaugccagcagccagccgagaacaaacuuucagaucugcucgcgccuauuucugaacagauuaaggaaguuaucacauuccgugaaaagaacagggguucaaaguuauucaaucaccuaagcgccgucagcgaaucaauccaggcccugggaugggucgccauggccccuaaacccggacccuaugugaaggaaaugaaugacgccgcuauguuuuauaccaauaggguucucaaggaauacaaggacgucgauaaaaagcacgucgauugggugaaagccuauuugaguauuuggaccgaguuacaagccuacauuaaggaguuucacacgacaggacuggcuuggagcaaaacuggucccguugcaaaggagcugagcggccugcccuccggcccaucagcuggcucaugcccacccccgccgcccccuugcccaccaccaccgccagugucaacuaucucuugcaguuacgagagugcaagccggaguuccuuguucgcacagauuaaucagggggaaagcaucacucaugcucuaaaacacguauccgacgacaugaagacucacaagaacccggcccuuaaggcucaaagcgggccugucagaucugguccuaagccuuuuuccgcaccuaaaccucagacuuccccuaguccgaagagggcuacuaagaaagaaccagcuguccuagaacuggaaggaaaaaaguggcgagucgaaaaccaagagaauguguccaaucucguuaucgaagacacagaacugaagcagguagcguacaucuacaagugcguuaacacuacccuccaaaucaaaggaaagauuaauuccaucacaguggauaacuguaaaaagcugggucucgucuuugacgauguggugggcauugucgagaucauuaacuccaaggaugucaaggugcaggucaugggcaaagucccaacuauuucaaucaauaaaacugauggcugucacgccuaucuaucuaagaauuccuuggacugcgagauuguaucugcgaagagcucugaaaugaauguauuaauucccacugaagguggcgacuucaacgaguucccaguccccgaacaguucaaaacgcuguggaauggacagaaguugguuacuacgguuacugagaucgcaggauag

SEQ ID NO: 336769 - RNA, 438 nt, Artificial Sequence
  derived and/or modified sequence
auggcugacaugcagaaucugguagagagacuggagcgcgcagugggcagacuggaggcuguaucccauaccagcgacaugcaccgaggguacgccgauucccccucuaaagcuggcgcagcuccauauguccaggccuauauaaaggaauuucacacuacaggauuagcuugguccaagacaggucccguagcuaaagagcugagcgggcugccauccggaccuucagcgggaaguugcccuccuccccccccuccguguccaccuccacccccagugaguacuauuucuugcagcuaugagucugcgagccggagcaguuuauucgcccaaauaaaucagggagagucuauuacacacgcucuaaagcacgucucggacgauaugaaaacccacaaaaauccagcauuaaaggcgcaaagcggaccugucagauag

SEQ ID NO: 336770 - RNA, 792 nt, Artificial Sequence
  derived and/or modified sequence
auggcagauaugcagaaccucguggaaagacuugagagagccguuggccgacuagaagccgugagucacacguccgacaugcaccggggauacgcagacaguccuuccaaaggagccgccccauacguacaggcauucgacagucugcuugcugguccuguagccgaguaccuaaaaauuagcaaagaaauaggaggcgacgugcagaagcaugcugaaauggugcacacgggucucaagcucgagagagcacugcugguaacagccucucaaugccagcaaccugccgaaaauaaauugucugaccuucuggcucccauauccgaacagaucaaagaggugauuacuuuucgggagaagaaucgggguucaaagcuauucaaccaucucagugcugugagcgaaucaauccaggcucuaggcugggucgccauggcccccaaacccggccccuauguuaaggagaugaaugaugcugccauguuuuacacuaacagggugcuaaaagaguacaaagacgucgacaaaaaacauguugauuggguuaaagcguaccucucgauuuggacggaauugcaggcguacaucaaagaguuccauacuacuggacuggcuuggaguaaaaccggcccaguugccaaagagcugagcggucugcccaguggaccauccgcuggcaguugcccuccaccucccccaccuugcccaccacccccacccgucagcacaauuucuuguuccuacgagagcgcaucccgcucuucacucuucgcgcagaucaaccaggguuag

SEQ ID NO: 336771 - RNA, 1425 nt, Artificial Sequence
  derived and/or modified sequence
auggccgacaugcaaaacuugguagagaggcuggaacgggcaguaggacgcuuagaagcugucucacauaccagcgacaugcauagaggcuaugcugacucccccucgaaaggugcagccccauaugugcaggccuuugacucacuauuagccggaccagucgcagaguaucugaaaaucucuaaggaaauugggggcgacgugcaaaaacaugcggagauggugcacacaggauuaaaacuggaacgggcacuccucgugacugcaucacagugccagcagccugccgaaaacaagcuuucugauuuguuagcgcccauuucagaacagauaaaggaggugauuacguuucgcgaaaaaaaccggggaagcaagcuauucaaccaucugagcgccgugagcgagaguauucaagcucuuggaugggucgccauggccccaaagcccggucccuacgugaaagagaugaaugaugccgcaauguuuuacacaaauagaguguuaaaagaguauaaagacguggacaagaaacauguggacugggugaaagccuaccucagcauuuggacagaacugcaagcuuauauaaaagaguuccauacaacuggccuugccuggucaaaaacuggaccuguagcuaaggaacucuccggccucccuucuggccccucugccgggucuuguccgcccccccccccgccaugccccccgccaccccccgucuccacuauuaguugcagcuacgaguccgccucucgauccagccucuucgcccaaauuaaccaaggagaguccauuacgcacgcucuuaagcacgucagugaugacaugaagacccauaaaaauccagccuugaaagcucaaucaggcccugugaggucugggccaaagccuuucucagccccuaagccucaaaccucuccuagccccaaacgcgccacuaagaaagagccggccguccucgaacuggaaggaaagaaauggagaguggagaaucaagaaaauguaucaaaucucgucaucgaagauacugagcugaagcagguggcauauauauacaaaugcgucaauacaaccuugcagauuaaggggaaaauaaauucgaucacuguagacaauuguaagaaacugggacugguauucgacgauguugucggcaucguggaaauaauuaacuccaaagauguuaaagugcaggugaugggaaaaguaccuacuauaucuauaaauaaaaccgauggaugccacgccuaccuuagcaagaacagccuggauugugaaauugucucagccaagaguagugagaugaauguguuaauuccgaccgaagguggcgacuucaacgaguuuccuguaccagagcaauucaaaacccuuuggaacggccagaaguuaguuacuacagucaccgaaauagccggauag

SEQ ID NO: 336772 - RNA, 438 nt, Artificial Sequence
  derived and/or modified sequence
auggcugacaugcagaaucuggucgagcgacuagaacgcgcuguuggccgccuugaggcuguaucucacacuucugacaugcacagaggauaugccgacucccccuccaaggccggagccgccccauacguccaagccuacauuaaggaauuccauacaacaggcuuagcuuggaguaagaccggucccguagccaaggaacuuucuggacuaccuucaggccccucagcagguucaugucccccucccccgcccccuugccccccuccccccccaguuucuacgaucagcugcagcuacgagagcgcuucccgcagcagcuuauucgcucagauuaaccaaggugaaagcaucacacaugccuugaaacauguauccgaugacaugaaaacacauaaaaauccagcacucaaagcacaaaguggacccguccgguag

SEQ ID NO: 336773 - RNA, 1425 nt, Artificial Sequence
  derived and/or modified sequence
auggcggauaugcagaaccuugucgaacguuuagagcgcgcuguggguagauuagaagcagugucccacaccucugacaugcaccguggcuaugccgauucccccaguaaaggcgcagcuccauacguacaggcauuugacucucuucuggccggaccgguggcagaguaccuaaaaauuaguaaagaaaucgguggagacgugcagaagcacgccgagaugguacacacugggcucaaacuggaaagggcacugcuuguaaccgccagucaaugccagcaaccagcugagaauaagcucuccgaucucuuggcucccauuagugaacagaucaaagaagugauuaccuuucgugaaaagaacagaggaagcaaacuuuucaaccauuuaucagcagucuccgaguccauacaagcccuuggauggguggccauggcaccuaaaccaggaccuuacgucaaggaaaugaacgacgcagcuauguucuacacuaauaggguacuaaaggaguacaaagauguggacaagaagcacguagauugggucaaagcuuauuugagcaucuggaccgaacuucaggccuauauuaaggaguuccacacuacuggacucgccuggucuaaaaccggcccaguggcuaaagaacugucuggcuuaccauccgguccaagcgcagguucauguccucccccaccuccucccugccccccccccccccccgucuccaccaucaguugcucauaugaaagugcaagucggagcuccuuauuugcccagauuaaccaaggagaguccauuacccacgcuuugaagcauguuucugacgauaugaaaacacauaaaaacccugcacuaaaggcucagucuggccccguuagaagugggccuaaaccauuuagcgccccuaaaccccagacaucaccuucccccaaacgcgcgacaaagaaggaacccgcagugcuggaacuugagggcaagaaguggcgagucgagaaccaggagaacguuagcaaccuagugaucgaagauacggaacucaaacaaguagccuacauuuauaaaugcgugaacacgacgcuucagauaaagggaaagaucaacagcauaacagucgauaauugcaaaaagcuugguuuaguguuugaugacgucguugguauuguggaaaucaucaacucuaaggacguuaaagugcagguaaugggaaaagugccgacuaucucuaucaauaaaacagacgggugucaugccuaccuuuccaaaaauagucuggauugugaaauugugagcgccaagucuuccgaaaugaauguucuaauuccaacugaagggggagauuucaaugaguucccggugccagaacaauuuaaaacgcuguggaauggucagaaacuagucacuacugucacggagauugcaggguag

SEQ ID NO: 336774 - RNA, 1425 nt, Artificial Sequence
  derived and/or modified sequence
auggcugacaugcaaaauuugguggaacgacuggagagagccguaggcagguuggaagccguuucccacacuuccgacaugcacaggggauaugcugauucccccucuaagggugccgccccuuacguacaagcuuuugacucccuccuggcaggaccaguugcagaguacuugaagaucuccaaagaaaucggcggugaugugcagaaacaugccgagauggugcauacaggccuuaagcuagagcgcgccuugcuggugacugcaagccaaugccagcaacccgcagagaacaaacucucugacuuguuagcucccaucucugaacagaucaaggagguuauaaccuuuagagagaagaaccgcgguuccaagcuguuuaaccaccugucugccguuucugaguccauccaagccuuggguugggucgcuauggcaccaaaacccggaccauacguaaaggagaugaaugacgccgcaauguuuuauaccaauagaguccucaaggaauacaaggauguggacaaaaagcacguggacugggugaaagcauaucuaucgaucuggacugaacuccaggccuauauuaaggaauuccacaccacaggccuagcuuggucuaaaaccggaccagucgcaaaagaguugucgggacuccccagcggcccuuccgccggaagcugcccaccgcccccaccaccgugcccuccaccaccacccgugucuacaaucucuuguucuuaugaaagugccuccagguccucccuguuugcccagauuaaccagggcgagucaaucacucacgcucuuaaacaugugucagacgauaugaagacccacaagaaccccgcacugaaggcccaguccggccccgugcggucuggcccaaaacccuucucggcaccuaagccccagacuucaccuucucccaagcgugccaccaagaaagaaccugccguccuggagcuugaaggaaagaaauggcgcguggaaaaccaagaaaacgucucaaaccucgugaucgaagacacugaacugaaacaaguugccuauauuuauaaaugcguaaacaccacgcuucaaauuaagggcaagaucaacuccaucacagucgauaacugcaagaagcuuggacugguguuugacgacgugguaggcaucguggaaaucauaaauucaaaagacgugaaaguacaaguuaugggaaagguccccacuaucagcauuaacaagacugacggaugccacgcauaccuuucuaagaacucccucgacugugaaaucgugagugcaaaaucuucugagaugaauguccugauuccgaccgaagguggcgacuucaaugaguuccccgugcccgagcaguucaagacucuguggaacggacagaaacugguaacgacugugacggagaucgcuggcuag

SEQ ID NO: 336775 - RNA, 438 nt, Artificial Sequence
  derived and/or modified sequence
auggccgacaugcaaaaccuggucgaacgccuggagcgugcaguugguagacucgaagcuguuucgcacacaucagauaugcacagaggauacgcugauucaccaucaaaggcgggagcagcuccauacguccaagccuauauuaaagaauuucauaccaccgggcuagcuuggucuaaaacaggcccaguagccaaggaacugagcggacuccccagcggaccauccgcaggaaguuguccuccgccgcccccgccaugcccuccgccucccccugugucuacaauuagcugcucuuaugaauccgcaucccgcagcucccuguuugcccagauuaaucaaggugagaguauaacacaugcguugaagcacguguccgaugacaugaaaacacacaaaaaucccgcauugaaggcacagucaggaccggugagauag

SEQ ID NO: 336776 - RNA, 792 nt, Artificial Sequence
  derived and/or modified sequence
auggccgacaugcagaaucuaguggagaggcuggaacgagcaguaggaagauuggaggcagugucacacacuagugauaugcaccgcggcuaugcagacucuccaucaaagggcgccgcaccauauguucaggcauuugauucuuugcucgcgggcccaguagcugaauaccucaaaaucaguaaggaaaucggaggcgacguacagaaacacgcagaaauggugcacacuggcuugaaauuggaaagagcccugcuugugacugcaucacaaugccagcagccagcagagaauaaacucucagaccuccucgcuccaaucucugaacagauuaaagaagucauaacauuucgagaaaaaaauagggguucaaagcuuuucaaccaucuuuccgccgugucagaaagcauucaggcgcuggguuggguugccauggcaccgaagccaggaccguaugugaaagaaaugaacgacgccgccauguucuauacuaauagaguccugaaggaguauaaagauguggauaaaaaacacguagacugggucaaggcuuaccugucgaucuggacagaguugcaggccuauauuaaagaauuucauacaacaggccucgcguggucuaagacagggccgguugcaaaagaacucagcggauuacccucugggccaagugcgggcucuuguccuccucccccucccccuuguccuccaccaccucccgucaguacaaucuccuguaguuaugaauccgccucccgcucaaguuuauucgcucagaucaaccaagguuag

SEQ ID NO: 336777 - protein, 195 aa, Artificial Sequence
  derived and/or modified sequence
MDLKTMENLGLAQNCTISIQDYEVFRCEDSLDERKIKGVIELRKSLLSALRTYEPYGSLVQQIRILLLGPIGAGKSSFFNSVRSVFQGHVTHQALVGTNTTGISEKYRTYSIRDGKDGKYLPFILCDSLGLSEKEGGLCRDDIFYILNGNIRDRYQFNPMESIKLNHHDYIDSPSLKDRIHCVAFVFDASSIQYF

SEQ ID NO: 336778 - protein, 76 aa, Artificial Sequence
  derived and/or modified sequence
  misc_feature (1)..(1): Xaa can be any naturally occurring amino acid
XLSDISVVSNYSSEWELDPVKDVLILSALRRMLWAADDFLEDLPFEQIGRWFGGVEAWKRSGNLREEIINCAQGKK

SEQ ID NO: 336779 - protein, 129 aa, Artificial Sequence
  derived and/or modified sequence
MESIKLNHHDYIDSPSLKDRIHCVAFVFDASSIQYFSSQMIVKIKRIRRELVNAGVVHVALLTHVDSMDLITKGDLIEIERCEPVRSKVMNDALRKHIFWGMLLQSHTSVYKNKNKQLLGLRRITKLLK

SEQ ID NO: 336780 - DNA, 231 bp, Artificial Sequence
  derived and/or modified sequence
tgactatccgatatttcggtggtttccaattattcctctgagtgggagttggatcccgtcaaggacgtgttgatcctttccgccctaagaaggatgttgtgggccgccgacgatttcctggaagacctccctttcgagcagattggacgttggtttggcggggttgaagcgtggaagcgtagcggcaaccttagggaagaaatcattaattgcgcgcagggaaagaaatag

SEQ ID NO: 336781 - DNA, 497 bp, Artificial Sequence
  derived and/or modified sequence
ctctttctgacatctcggtggttagcaattattcctctgagtgggagctggaccctgtaaaggatgttctaattctttctgctctgagacgaatgctatgggctgcagatgacttcttagaggatttgccttttgagcaaataggtagatggtttggtggtgtggaagcttggaagcggtcagggaatctaagggaggaaattatcaactgtgcacaaggaaaaaaatagatatgtgaaaggttcacgtaaatttcctcacatcacagaagattaaaattcagaaaggagaaaacacagaccaaagagaagtatctaagaccaaagggatgtgttttattaatgtctaggatgaagaaatgcatagaacattgtagtacttgtaaataactagaaataacatgatttagtcataattgtgaaaaataataataatttttcttggatttatgttctgtatctgtgaaaaaataaatttcttataaaactcgggtctaa

SEQ ID NO: 336782 - DNA, 231 bp, Artificial Sequence
  derived and/or modified sequence
tgactgagtgacatctctgtggtgagcaactacagcagcgagtgggagctggaccctgtgaaggatgtgctgatcctgagcgccctgcggaggatgctgtgggccgcagatgacttcctggaggacctgccctttgagcagatcggccgctggtttggaggagtggaggcctggaagaggagcggcaacctgcgggaggagatcatcaactgtgcccagggcaagaagtag

SEQ ID NO: 336783 - DNA, 231 bp, Artificial Sequence
  derived and/or modified sequence
tgactgagcgacatcagcgtggtgagcaactacagcagcgagtgggaacttgacccggtcaaagacgttctgattctttccgccctgcgcaggatgttgtgggcggccgatgacttcttagaggacctaccatttgaacagatcggccgttggttcggcggggtggaggcctggaagcgctctggaaatctccgagaggaaattataaattgcgcccaggggaagaaatag

SEQ ID NO: 336784 - DNA, 231 bp, Artificial Sequence
  derived and/or modified sequence
taactcagtgatatttccgtggtctctaactactctagcgaatgggagctggatcctgtcaaagatgtacttatcctctccgcactgcggagaatgctgtgggcagccgatgattttctggaggacctgccctttgaacagattgggcgttggttcggcggtgtggaggcctggaaacgttctggcaatctaagagaggaaattatcaattgcgcccaggggaagaagtag

SEQ ID NO: 336785 - DNA, 231 bp, Artificial Sequence
  derived and/or modified sequence
tgactgagcgacatcagcgtggtgagcaactacagcagcgagtgggagctggaccccgtgaaggacgtgctgatcctgagcgccctgagaagaatgctgtgggccgccgacgacttcctggaggacctgcccttcgagcagatcggcagatggttcggcggcgtggaggcctggaagagaagcggcaacctgagagaggagatcatcaactgcgcccagggcaagaagtag

SEQ ID NO: 336786 - DNA, 390 bp, Artificial Sequence
  derived and/or modified sequence
atggagtcaatcaaacttaatcatcacgactacatcgactctccttctctcaaggaccgtattcactgtgtggcatttgtgtttgacgcttctagtatccaatatttttcgtctcagatgattgtcaagataaagagaatccgaagggagcttgtgaacgctggcgttgtacatgttgctctactgacccatgtggacagtatggacctgatcacgaaaggagacctgattgaaattgagaggtgcgagccagtgcgatctaaggtgatgaacgacgctctgcgtaagcacatcttctggggtatgctgctccagtcacacactagcgtctacaaaaataaaaacaaacaactgctggggctccgacgcattacaaaactgttaaagtag

SEQ ID NO: 336787 - DNA, 1530 bp, Artificial Sequence
  derived and/or modified sequence
attttgtgcctgcctagctatccagacagagcagctaccctcagctctagctgatactacagacagtacaacagattcactggatgaaagaaagataaaaggggtcattgagctcaggaagagcttactgtctgccttgagaacttatgaaccatatggatccctggttcaacaaatacgaattctgctgctgggtccaattggagctgggaagtccagctttttcaactcagtgaggtctgttttccaagggcatgtaacgcatcaggctttggtgggcactaatacaactgggatatctgagaagtataggacatactctattagagacgggaaagatggcaaatacctgccgtttattctgtgtgactcactggggctgagtgagaaagaaggcggcctgtgcagggatgacatattctatatcttgaacggtaacattcgtgatagataccagtttaatcccatggaatcaatcaaattaaatcatcatgactacattgattccccatcgctgaaggacagaattcattgtgtggcatttgtatttgatgccagctctattcaatacttctcctctcagatgatagtaaagatcaaaagaattcgaagggagttggtaaacgctggtgtggtacatgtggctttgctcactcatgtggatagcatggatttgattacaaaaggtgaccttatagaaatagagagatgtgagcctgtgaggtccaaggtaatgaatgatgcccttcgtaaacacattttctggggtatgttactacaatcacatactagtgtgtataaaaataaaaacaagcagctactgggtttaagaagaattacaaaattacttaaatagggcccgtttcccaagatttaaaaattaaatacagttgttccttggtatttgcaggggattagttccaggactttgcattgttaccaaaatctgtggatgcttaatggcatagtatttgtatttgcatataacctatgcacatcctttggtatactttaaataatatctagattacttataatacctaacccaaattaaatgctttgtaaatagttgttctactctatttttcattattaatgacaagaaaataacctgtacatgttcagtacagatgaaatattttttcaaaatttatttttttgagatgaagtttctgttgcccaggctggagtgcagtggcatgatttcggctcactgcaacctccgcctcctgggttcaagtgattctcctgcctctgtctctcagcagctgggattacaggcacatgccaccatgcctggctaatcttttctgtatttttgtagagattaggtttcaccatgttggccaggctggtctcaaactcctgacctcaggtgatctgctcatctcggtcccccaaagttctgggattaaggcatgagtccctatacccagccattttttttcaattttttttgagccttagttgaactcacagatgcagaacccatggatacagaaggctaactgtctatctttacactgacat

SEQ ID NO: 336788 - DNA, 390 bp, Artificial Sequence
  derived and/or modified sequence
atggagagcatcaagctgaaccaccacgactacatcgacagccccagcctgaaggaccgcatccactgtgtggcctttgtgtttgatgccagcagcatccagtacttcagcagccagatgattgtgaagatcaagaggatccggcgggagctggtgaatgctggggtggtgcacgtggccctgctgacccacgtggacagcatggacctgatcaccaagggggacctgattgaaattgagcgctgtgagcctgtgcgcagcaaggtgatgaatgatgccctgaggaagcacatcttctggggcatgctgctgcagagccacacctctgtgtacaagaacaagaacaagcagctgctgggcctgcggcgcatcaccaagctgctgaagtag

SEQ ID NO: 336789 - DNA, 390 bp, Artificial Sequence
  derived and/or modified sequence
atggagagcatcaagctgaaccaccacgactacatcgacagcccctccctaaaggacaggatccattgtgtggccttcgtcttcgacgcatccagcatccagtacttcagcagtcaaatgatcgtcaaaatcaagcggataagaagagagctggtgaacgcaggcgtggtgcatgtggccctcttgacccacgtcgactccatggacctgatcactaaaggagatctgattgagattgagcggtgtgaaccagttaggagtaaagtcatgaatgatgcgctgcgtaaacatatcttttgggggatgttgcttcagtctcataccagtgtctacaagaataaaaacaaacaactgctgggcctgagacgcataacgaaattattgaaatag

SEQ ID NO: 336790 - DNA, 390 bp, Artificial Sequence
  derived and/or modified sequence
atggaatctatcaagctgaaccaccatgactacattgactcccctagtctgaaggaccgaatacattgtgttgcgtttgtctttgacgctagctctatccagtactttagttctcagatgatcgttaaaatcaagagaataaggcgcgagcttgtaaatgcaggggtagtgcatgtggcactgctgacacacgttgactccatggatctgataaccaaaggtgatctgattgagattgagagatgtgagcctgtcagatctaaagtcatgaacgatgcccttaggaagcatattttctggggaatgcttctgcaatcccatacatctgtgtataaaaacaaaaacaagcagctgctgggattgcgcaggattactaaattactaaagtag

SEQ ID NO: 336791 - DNA, 390 bp, Artificial Sequence
  derived and/or modified sequence
atggagagcatcaagctgaaccaccacgactacatcgacagccccagcctgaaggacagaatccactgcgtggccttcgtgttcgacgccagcagcatccagtacttcagcagccagatgatcgtgaagatcaagagaatcagaagagagctggtgaacgccggcgtggtgcacgtggccctgctgacccacgtggacagcatggacctgatcaccaagggcgacctgatcgagatcgagagatgcgagcccgtgagaagcaaggtgatgaacgacgccctgagaaagcacatcttctggggcatgctgctgcagagccacaccagcgtgtacaagaacaagaacaagcagctgctgggcctgagaagaatcaccaagctgctgaagtag

SEQ ID NO: 336792 - protein, 296 aa, Artificial Sequence
  derived and/or modified sequence
MPYLGSEDVVKELKKALCNPHIQADRLRYRNVIQRVIRMPGVQEYIQQPILNGLRDKASYVRRVAVLGCAKMHNLHGDSEVDGALVNELYSLLRDQDPIVVVNCLRSLEEILKQEGGVVINKPIAHHLLNRMSKLDQWGQAEVLNFLLRYQPRSEEELFDILNLLDSFLKSSSPGVVMGATKLFLILAKMFPHVQTDVLVRVKGPLLAACSSESRELCFVALCHVRQILHSLPGHFSSHYKKFFCSYSEPHYIKLQKVEVLCELVNDENVQQVLEELRGYCTDVSADFAQAAIFAI

SEQ ID NO: 336793 - DNA, 891 bp, Artificial Sequence
  derived and/or modified sequence
atgccatatctcgggtcagaagatgtggtgaaggaactgaaaaaagcactgtgtaacccacacatacaggcggataggctccggtataggaatgtgattcaacgcgtgattagaatgccaggtgtccaggagtatattcagcaaccgatccttaacggtctgcgcgacaaagcttcatatgttagacgagtggctgttttaggatgcgcaaagatgcacaatctgcacggagactccgaagtggacggggcgctggtgaatgagctgtattcgctcctgagggatcaggacccaatcgtggttgtaaactgtctccgctccctggaggagatactcaagcaggaagggggcgtcgtcattaataaacccattgcccaccatctgttgaatcgaatgtccaagttagatcagtggggtcaggccgaggttctgaacttcttgctgcggtatcagccacggtccgaggaagagctgttcgacattctcaacctcctcgacagttttcttaaatctagttccccaggggtggtaatgggcgccacgaaactattcctcatcttagccaagatgttcccccatgtgcagaccgacgttctggtgcgggtcaaggggcccttgctggctgcttgctctagcgaaagccgcgaactttgtttcgtggcactgtgtcacgtgcggcagatcctccactccctgccggggcatttctcctctcattacaagaagttcttttgcagctacagcgagccccactatattaagctccaaaaggtagaggtattatgcgagctggttaacgacgagaatgtacaacaggtcctcgaggaactgaggggatactgcaccgacgtgtcagccgactttgctcaagccgcgatcttcgcaatttag

SEQ ID NO: 336794 - DNA, 1225 bp, Artificial Sequence
  derived and/or modified sequence
ggagtcgggactacgcttagcgctcgctcgcggggagaccggcagcggtcttctgtttggtctcttgacaagggggcgggacttccgcagaaagcaagattgggcctatccgcgatgagaacggcgtggagggggaattaaggctggaactggagagggaggggtctgcggtcagtcggacgcggcgctggaaatccggcggaggacctagaagtagcgggagcgatctgtgggcggggcgaacggcctgccggccgacggctcccacatcaggacgagaaggagccctcgagttaccgtgggagctgtgggagctgccctgtgactcttaggaagatgccgtaccttggctccgaggacgtggtgaaggagctgaagaaggctctgtgcaatcctcacattcaagctgataggctgcgctaccggaatgtcatccagcgagtgattaggatgcctggtgtgcaggagtatatacaacagcctattctcaatggtctgcgggataaggcttcatatgtcaggagagtggcagtccttggatgtgccaagatgcataatcttcatggagactctgaagtagatggtgccctggtaaatgaattatacagtttgctgcgtgaccaggatccaattgtagttgtgaactgcttgaggtctctagaggaaattctgaaacaggaaggaggcgttgtcatcaataagcccattgctcaccatctcttaaatcgaatgtcaaaactggaccaatggggccaggctgaagtattgaactttctgctacgctaccaaccccgcagtgaggaagaactatttgacattctcaatctgttggatagtttcctcaagagcagtagcccaggtgtggtgatgggagctaccaaactttttctgatcttggcaaaaatgtttccccacgtacaaactgatgtccttgtgcgggtcaagggacctttgctagctgcctgttcttcagagagccgtgagctctgttttgttgctctttgtcatgtacgccagatcttgcatagtttaccaggtcactttagcagccactacaaaaagtttttttgctcctactcggagccccactacatcaaactacagaaagtggaggtgctgtgtgaactggtgaacgatgagaatgtgcagcaggtgctagaggagcttcgagggtactgcacggatgtgtctgcggactttgcacaggctgccatctttgccatag

SEQ ID NO: 336795 - DNA, 891 bp, Artificial Sequence
  derived and/or modified sequence
atgccctacctgggctctgaagatgtggtgaaggagctgaagaaggccctgtgcaacccccacatccaggccgaccggctgcgctacagaaatgtcatccagagggtcatccgcatgcctggggtgcaggagtacatccagcagcccatcctgaatggcctgcgggacaaggccagctatgtgcggcgggtggccgtgctgggctgtgccaagatgcacaacctgcacggggacagcgaggtggatggagccctggtgaatgagctgtacagcctgctgcgggaccaggaccccatcgtggtggtgaactgcctgcggagcctggaggagatcctgaagcaggagggcggcgtggtgatcaacaagcccatcgcccaccacctgctgaacaggatgagcaagctggaccagtggggccaggccgaggtgctgaacttcctgctgcgctaccagcccaggtctgaggaggagctgtttgacatcctgaacctgctggacagcttcctgaagagcagcagccctggggtggtgatgggcgccaccaagctgttcctgatcctggccaagatgttcccccacgtgcagacagatgtgctggtgcgggtgaagggccccctgctggccgcctgcagcagcgagagccgggagctgtgctttgtggccctgtgccacgtgcggcagatcctgcacagcctgcccggccacttcagcagccactacaagaagttcttctgcagctacagcgagccccactacatcaagctgcagaaggtggaggtgctgtgtgagctggtgaatgatgaaaatgtgcagcaggtgctggaggagctgcggggctactgcacagatgtgtctgctgactttgcccaggccgccatctttgccatctag

SEQ ID NO: 336796 - DNA, 891 bp, Artificial Sequence
  derived and/or modified sequence
atgccctacctgggcagcgaggacgtggtgaaggagctgaagaaggctctgtgcaaccctcacattcaggctgatcgcctgagatacagaaatgtgattcaaagggtaatcaggatgccaggcgtgcaagaatacatccaacaaccaatcctaaacggccttcgggacaaagcatcttacgtgcgtcgcgtagccgttctgggctgcgccaagatgcacaatctccacggcgatagcgaggtggatggagctctggtcaatgaactatacagcctgctccgggatcaggaccccatcgtggtggtgaattgcctccgttctctggaggaaattctgaaacaggagggtggggtggtgatcaacaagccaattgcccaccacttactgaaccgcatgagtaagttggaccaatggggtcaggccgaggtgcttaattttctgctccgataccaacctaggagtgaagaggagctgttcgatattctgaatctcctagattcgtttctgaagagcagcagtccaggggtggttatgggggccactaagcttttcctcatactcgccaaaatgtttccccatgtacagaccgacgtgctggttagagttaaaggtcctctactagcggcttgctccagtgaatctcgggagctgtgtttcgtggccctgtgtcatgtaaggcagatcttgcatagtctacctggccatttttccagtcattacaagaaattcttctgcagctattccgaaccccactacataaaattgcagaaagtggaagtgctgtgtgaactcgttaatgacgagaacgtgcagcaagtgctggaggagctccgggggtattgcaccgacgtgagcgctgacttcgcccaggccgctatatttgccatatag

SEQ ID NO: 336797 - DNA, 891 bp, Artificial Sequence
  derived and/or modified sequence
atgccctatctggggagcgaggacgtagtgaaagaacttaaaaaggctctgtgcaacccccacatacaagccgaccgtttacgatacagaaacgttatccaaagagtgatacgtatgcccggagtgcaggaatacatacagcagccaattctgaacggtttgagagataaggcctcttacgtgcgccgtgtagcagtgctcgggtgtgcgaaaatgcacaatctccacggtgactctgaggtcgatggagctttagtaaacgagctgtacagcctgctccgcgaccaagaccccatcgtcgtggtgaattgccttaggtctttagaggagattcttaaacaggaggggggtgtggtgatcaataagccaatcgcccaccacctgctgaaccggatgtctaaattagaccagtgggggcaggcagaggtactgaactttttattacgctaccagcccaggagtgaggaggaactctttgatattttgaatctcctggactccttccttaagtctagcagcccaggggtggtgatgggtgctacaaagttgtttttgatcttggctaagatgttcccccacgttcagaccgacgtgttggtcagagtgaaggggccactgcttgcagcctgcagtagcgagagcagggagctgtgttttgtggctctctgtcacgtccgacaaatcttgcatagcctccccggtcacttctcaagtcactacaaaaaatttttctgtagctacagtgaaccacactatatcaagcttcagaaagttgaggtgctgtgcgagctcgtgaatgacgaaaacgttcaacaggtcctggaggagctgcggggatactgtaccgacgtgagtgcagactttgctcaggccgcaattttcgcaatatag

SEQ ID NO: 336798 - DNA, 891 bp, Artificial Sequence
  derived and/or modified sequence
atgccctacctgggcagcgaggacgtggtgaaggagctgaagaaggccctgtgcaacccccacatccaggccgacagactgagatacagaaacgtgatccagagagtgatcagaatgcccggcgtgcaggagtacatccagcagcccatcctgaacggcctgagagacaaggccagctacgtgagaagagtggccgtgctgggctgcgccaagatgcacaacctgcacggcgacagcgaggtggacggcgccctggtgaacgagctgtacagcctgctgagagaccaggaccccatcgtggtggtgaactgcctgagaagcctggaggagatcctgaagcaggagggcggcgtggtgatcaacaagcccatcgcccaccacctgctgaacagaatgagcaagctggaccagtggggccaggccgaggtgctgaacttcctgctgagataccagcccagaagcgaggaggagctgttcgacatcctgaacctgctggacagcttcctgaagagcagcagccccggcgtggtgatgggcgccaccaagctgttcctgatcctggccaagatgttcccccacgtgcagaccgacgtgctggtgagagtgaagggccccctgctggccgcctgcagcagcgagagcagagagctgtgcttcgtggccctgtgccacgtgagacagatcctgcacagcctgcccggccacttcagcagccactacaagaagttcttctgcagctacagcgagccccactacatcaagctgcagaaggtggaggtgctgtgcgagctggtgaacgacgagaacgtgcagcaggtgctggaggagctgagaggctactgcaccgacgtgagcgccgacttcgcccaggccgccatcttcgccatctag

SEQ ID NO: 336799 - protein, 302 aa, Artificial Sequence
  derived and/or modified sequence
MPYLGSEDVVKELKKALCNPHIQADRLRYRNVIQRVIRYMTQGLDMSGVFMEMVKASATVDIVQKKLVYLYMCTYAPLKPDLALLAINTLCKDCSDPNPMVRGLALRSMCSLRMSKLDQWGQAEVLNFLLRYQPRSEEELFDILNLLDSFLKSSSPGVVMGATKLFLILAKMFPHVQTDVLVRVKGPLLAACSSESRELCFVALCHVRQILHSLPGHFSSHYKKFFCSYSEPHYIKLQKVEVLCELVNDENVQQVLEELRGYCTDVSADFAQAAIFAIGRCLLLFLLENLDQPARKLWLEEP

SEQ ID NO: 336800 - DNA, 909 bp, Artificial Sequence
  derived and/or modified sequence
atgccttatctgggtagcgaagacgtagttaaagaacttaagaaagccctctgtaacccacacatccaggcagacaggctgcgctaccgtaatgtgatccagcgagttatccgttatatgacccagggacttgacatgagcggagtattcatggagatggtcaaagcctccgccaccgtggatatcgtgcagaaaaagctggtgtatctgtatatgtgcacatacgctccacttaaacccgacctcgccctcctggccatcaataccttatgtaaggattgctcggatcctaacccgatggtgcgagggcttgccttgcgatctatgtgctccctgcgcatgagtaagctcgaccagtgggggcaggcagaggtgcttaacttcctactgagataccagcctcgctctgaggaggaactgttcgacatcttaaacctcctggattcctttctgaaatcaagtagtcccggggttgtgatgggggccacaaaactgttcctgatcctggcgaagatgttcccccacgtgcaaactgacgtgctcgtaagagtgaaaggccctttactggctgcgtgttcctcagagtccagggagctatgttttgtcgctctctgccatgttagacagatcctccattctctgccaggccacttctcgtctcactataagaaattcttctgttcttactcggagcctcattatataaaactgcagaaagtggaggtgctatgcgagctcgtgaatgatgagaacgtgcaacaagtcctcgaagagcttcgagggtattgtaccgacgtaagcgctgacttcgcacaggcggctattttcgcaattggccggtgtctccttcttttccttctggagaatcttgaccagccagcccgaaagctatggctggaggaaccatag

SEQ ID NO: 336801 - DNA, 1476 bp, Artificial Sequence
  derived and/or modified sequence
ctacggaagccgagcctgaggcgagatctcgccttttgtattttcactgactcatatttcctttactcaggctcccacatcaggacgagaaggagccctcgagttaccgtgggagctgtgggagctgccctgtgactcttaggaagatgccgtaccttggctccgaggacgtggtgaaggagctgaagaaggctctgtgcaatcctcacattcaagctgataggctgcgctaccggaatgtcatccagcgagtgattaggtacatgactcaaggcttggacatgtctggtgtttttatggaaatggtgaaggccagtgccactgtagatattgtccagaagaagttggtttatctgtacatgtgcacatatgctcccctgaaaccagatctggctctcctggccatcaatacgctgtgcaaagactgctcagaccccaatccaatggtgcgagggctggcgttacggagcatgtgtagcctcagaatgtcaaaactggaccaatggggccaggctgaagtattgaactttctgctacgctaccaaccccgcagtgaggaagaactatttgacattctcaatctgttggatagtttcctcaagagcagtagcccaggtgtggtgatgggagctaccaaactttttctgatcttggcaaaaatgtttccccacgtacaaactgatgtccttgtgcgggtcaagggacctttgctagctgcctgttcttcagagagccgtgagctctgttttgttgctctttgtcatgtacgccagatcttgcatagtttaccaggtcactttagcagccactacaaaaagtttttttgctcctactcggagccccactacatcaaactacagaaagtggaggtgctgtgtgaactggtgaacgatgagaatgtgcagcaggtgctagaggagcttcgagggtactgcacggatgtgtctgcggactttgcacaggctgccatctttgccataggtaggtgtctgctccttttccttcttgagaacctagaccagccagcaagaaaactgtggttagaggaaccatagagagcaaagggcatgaatcttgcttcagaagcaaagtactatgcactaaataattgggtcagtgactacaaacacgggggaagagagtttttttttgttttttgtttttttttggtcaagattggtgttgctgtatcttccaggatggagaatacaggtaacacaaactacaatacttaaaattgttgttgtcttctatccaaaatgctttcctatacatcatcttaccacagtatcgtgagacagtcaggaaaagtagacaaatgtcattaacttcattttaaagatgaagaaactcaggcacaaaaacagttatcaaattgccaaaagggcacatagttttagaaatgggactgaaatccagctttcctgactcaaagtcctatgttaatccaccagtcatttattgagcttctgctat

SEQ ID NO: 336802 - DNA, 909 bp, Artificial Sequence
  derived and/or modified sequence
atgccctacctgggctctgaagatgtggtgaaggagctgaagaaggccctgtgcaacccccacatccaggccgaccggctgcgctacagaaatgtcatccagagggtcatccgctacatgacccagggcctggacatgtctggagtcttcatggagatggtgaaggccagcgccaccgtggacatcgtgcagaagaagctggtgtacctgtacatgtgcacctacgcccccctgaagccagacctggccctgctggccatcaacaccctgtgcaaggactgcagcgaccccaaccccatggtgcggggcctggccctgcgctccatgtgcagcctgaggatgagcaagctggaccagtggggccaggccgaggtgctgaacttcctgctgcgctaccagcccaggtctgaggaggagctgtttgacatcctgaacctgctggacagcttcctgaagagcagcagccctggggtggtgatgggcgccaccaagctgttcctgatcctggccaagatgttcccccacgtgcagacagatgtgctggtgcgggtgaagggccccctgctggccgcctgcagcagcgagagccgggagctgtgctttgtggccctgtgccacgtgcggcagatcctgcacagcctgcccggccacttcagcagccactacaagaagttcttctgcagctacagcgagccccactacatcaagctgcagaaggtggaggtgctgtgtgagctggtgaatgatgaaaatgtgcagcaggtgctggaggagctgcggggctactgcacagatgtgtctgctgactttgcccaggccgccatctttgccatcggccgctgcctgctgctcttcctgctggagaacctggaccagcctgccaggaagctgtggctggaggagccctag

SEQ ID NO: 336803 - DNA, 909 bp, Artificial Sequence
  derived and/or modified sequence
atgccctacctgggcagcgaggacgtggtgaaggagctgaagaaggcactgtgcaacccacacatccaagccgaccggctcagatatcgcaacgtgatccagcgggtgatacgctacatgactcaaggattggatatgtctggtgtgttcatggagatggtcaaagcttccgctactgtggatatcgttcagaagaagcttgtttatctgtacatgtgcacatatgcgcctcttaaaccagacctggccctcctggctatcaacaccctgtgcaaagattgctctgatcccaaccctatggtccgcggactggcactgcgaagcatgtgtagtcttaggatgtctaaactcgatcaatggggccaggccgaggtactgaatttcctcctgcgctatcagcctcgctctgaggaggaattgttcgatatcctcaatctcctggactcttttctaaagagctcctctccaggggttgtcatgggggctaccaaactcttccttatcctggcgaagatgttcccacatgtccaaaccgatgttctcgtcagagtcaaagggccattgttagcggcatgcagctcagaaagtcgtgaactttgtttcgttgccctgtgccacgtgcgacagattctccacagtttgcctggccacttcagttcccattataaaaaatttttctgtagctacagcgagcctcactatattaagctgcaaaaagtggaggtcctctgtgaactggtaaacgatgaaaatgttcagcaggtgctggaggagctgcgaggctactgcacggacgtctccgccgactttgcccaagctgccatcttcgccattggtcgctgcctacttctcttcctgcttgaaaacctagatcagcccgccagaaagctgtggctggaagagccatag

SEQ ID NO: 336804 - DNA, 909 bp, Artificial Sequence
  derived and/or modified sequence
atgccatacttgggcagcgaggatgtcgtcaaagagctaaaaaaagctctgtgcaatccgcacatacaagccgacagattacgataccgaaacgtcattcaacgcgtcatccgttacatgacacaagggctggacatgagcggcgtgttcatggagatggtaaaggcatctgccacagtggacattgtgcagaagaagcttgtgtatctgtatatgtgtacctacgcacccctaaagcccgatttggcgctgctggcgattaacaccttgtgcaaggattgttctgatcccaaccccatggtacgtgggctggccttgcgctctatgtgcagtctgcggatgagtaaactcgaccagtgggggcaggccgaagtgcttaattttctcctgagataccagccaagatctgaggaggagctcttcgacatactgaacctactcgactctttccttaaaagtagttctccaggggtcgtcatgggagccacaaaactcttcctgattcttgcaaaaatgtttcctcacgtgcagaccgacgttctggttagggtcaaaggccctttgctcgccgcatgctcatctgagagtcgagaattatgttttgtggccttatgccacgtccggcagatccttcatagcctccccggacattttagtagccattataagaagttcttctgcagctatagcgaacctcactacataaagctgcagaaagtcgaggtgctttgcgaactagtgaacgatgaaaatgtacaacaggttttggaggagctgcgtggctactgtaccgacgtgtcagcagatttcgcacaggctgccatctttgcaattggcaggtgcttgctgctgttccttctcgaaaacctggatcagcccgcacggaaattatggctcgaagagccctag

SEQ ID NO: 336805 - DNA, 909 bp, Artificial Sequence
  derived and/or modified sequence
atgccctacctgggcagcgaggacgtggtgaaggagctgaagaaggccctgtgcaacccccacatccaggccgacagactgagatacagaaacgtgatccagagagtgatcagatacatgacccagggcctggacatgagcggcgtgttcatggagatggtgaaggccagcgccaccgtggacatcgtgcagaagaagctggtgtacctgtacatgtgcacctacgcccccctgaagcccgacctggccctgctggccatcaacaccctgtgcaaggactgcagcgaccccaaccccatggtgagaggcctggccctgagaagcatgtgcagcctgagaatgagcaagctggaccagtggggccaggccgaggtgctgaacttcctgctgagataccagcccagaagcgaggaggagctgttcgacatcctgaacctgctggacagcttcctgaagagcagcagccccggcgtggtgatgggcgccaccaagctgttcctgatcctggccaagatgttcccccacgtgcagaccgacgtgctggtgagagtgaagggccccctgctggccgcctgcagcagcgagagcagagagctgtgcttcgtggccctgtgccacgtgagacagatcctgcacagcctgcccggccacttcagcagccactacaagaagttcttctgcagctacagcgagccccactacatcaagctgcagaaggtggaggtgctgtgcgagctggtgaacgacgagaacgtgcagcaggtgctggaggagctgagaggctactgcaccgacgtgagcgccgacttcgcccaggccgccatcttcgccatcggcagatgcctgctgctgttcctgctggagaacctggaccagcccgccagaaagctgtggctggaggagccctag

SEQ ID NO: 336806 - protein, 209 aa, Artificial Sequence
  derived and/or modified sequence
MISNYRNGSELVCFNSGVGCFLIGCDWAFTVLVNTFFSFLRRKTDFFIGGEEGMAEKLITQTFSHHNQLAQKTRREKRARQEAERREKAERAARLAKEAKSETSGPQIKELTDEEAERLQLEIDQKKDAENHEAQLKNGSLDSPGKQDTEEDEEEDEKDKGKLKPNLGNGADLPNYRWTQTLSELDLAVPFCVNFRLKGKDMVVDIQRR

SEQ ID NO: 336807 - protein, 133 aa, Artificial Sequence
  derived and/or modified sequence
MAEKLITQTFSHHNQLAQKTRREKRARQEAERREKAERAARLAKEAKSETSGPQIKELTDEEAERLQLEIDQKKDAENHEAQLKNGSLDSPGKQDTEEDEEEDEKDKGKLKPNLGNGADLPNYRWTQTLSELD

SEQ ID NO: 336808 - DNA, 630 bp, Artificial Sequence
  derived and/or modified sequence
atgatcagcaactacagaaacggcagcgagctggtgtgcttcaacagcggcgtgggctgcttcctgatcggctgcgactgggccttcaccgtgctggtgaacaccttcttcagcttcctgagaagaaagaccgacttcttcatcggcggcgaggagggcatggccgagaagctgatcacccagaccttcagccaccacaaccagctggcccagaagaccagaagagagaagagagccagacaggaggccgagagaagagagaaggccgagagagccgccagactggccaaggaggccaagagcgagaccagcggcccccagatcaaggagctgaccgacgaggaggccgagagactgcagctggagatcgaccagaagaaggacgccgagaaccacgaggcccagctgaagaacggcagcctggacagccccggcaagcaggacaccgaggaggacgaggaggaggacgagaaggacaagggcaagctgaagcccaacctgggcaacggcgccgacctgcccaactacagatggacccagaccctgagcgagctggacctggccgtgcccttctgcgtgaacttcagactgaagggcaaggacatggtggtggacatccagagaagatag

SEQ ID NO: 336809 - DNA, 630 bp, Artificial Sequence
  derived and/or modified sequence
atgattagcaattaccgcaatggatctgaactggtttgcttcaactctggcgtgggatgtttcctgataggttgcgattgggctttcaccgtactggtaaatacctttttttcctttctgagacggaaaacagacttctttatcggaggagaagaggggatggctgagaagttaatcacgcagacattcagtcatcacaaccagcttgcccagaaaactcggcgagagaaaagggcacgccaggaagcagagcgacgagagaaagctgaacgcgctgctcggttagccaaagaagctaagtccgagaccagtgggccccagattaaggaactgacggacgaggaagccgagagattgcaactcgaaattgatcagaaaaaggatgcggagaaccatgaggcccagctgaagaatggttctttagacagtcccggaaaacaagacacagaagaggatgaggaggaggacgagaaagataaaggcaaactgaagccaaacctcggaaacggggccgatctcccgaactacagatggacacagacattgtctgaactggaccttgctgtgccgttctgtgtgaactttaggctgaagggcaaggatatggtcgtggatattcagaggcgttag

SEQ ID NO: 336810 - DNA, 630 bp, Artificial Sequence
  derived and/or modified sequence
atgatcagcaactacagaaatggaagtgagctggtgtgcttcaacagcggcgtgggctgcttcctgattggctgtgactgggccttcaccgtgctggtgaacaccttcttctccttcctgcggaggaagacagacttcttcatcggcggggaggagggcatggccgagaagctgatcacccagaccttcagccaccacaaccagctggcccagaagacccggcgggagaagagggcccggcaggaggccgagcggcgggagaaggccgagcgggccgcccggctggccaaggaggccaagtctgagaccagcggcccccagatcaaggagctgacagatgaggaggccgagcggctgcagctggagattgaccagaagaaggatgctgagaaccacgaggcccagctgaagaatggcagcctggacagccctgggaagcaggacacagaagaagatgaggaggaggatgagaaggacaagggcaagctgaagcccaacctgggcaatggagctgacctgcccaactaccgctggacccagaccctgtctgagctggacctggccgtgcccttctgtgtgaacttccggctgaagggcaaggacatggtggtggacatccagaggaggtag

SEQ ID NO: 336811 - DNA, 630 bp, Artificial Sequence
  derived and/or modified sequence
atgatcagcaactaccggaacggcagcgagctggtgtgcttcaactcaggcgtaggctgctttcttatcggatgcgattgggcatttacagttctggtgaatacattcttcagttttctcagaagaaaaaccgacttcttcatcggtggtgaagaagggatggccgagaagctgattacccagacattcagccatcacaatcaacttgctcaaaaaacacgcagggaaaagagggctcggcaagaggctgaacgcagagaaaaagctgagcgcgcagccaggctggcaaaggaggccaaatctgagaccagcggaccccagatcaaggagttgacagatgaggaggcagagcggctacaactggagatcgaccaaaagaaagacgctgagaaccacgaggctcagttgaaaaatggatctctggatagccccggcaagcaagacactgaagaggacgaggaggaagatgagaaagacaagggaaaactgaaaccgaatctgggcaacggggccgatctccccaactaccgttggacccagacgctgagcgaacttgacctggctgtcccattctgcgtgaacttcagactcaagggaaaggacatggttgtcgacatccaaagacggtag

SEQ ID NO: 336812 - DNA, 630 bp, Artificial Sequence
  derived and/or modified sequence
atgatctccaactacagaaatgggtcagaactggtttgtttcaactctggggtcggatgctttctgattggttgcgattgggccttcaccgttcttgtaaatacctttttttcctttttgcgcagaaaaacggactttttcatcggcggtgaggaaggaatggcagagaagctgatcacccaaaccttctcccaccataatcagttagcccagaaaacaaggcgagagaagagggcgaggcaggaggctgaacggagagaaaaagcagaacgggctgccaggttagccaaggaagccaaaagcgagacttcgggcccacagattaaggagttgacagatgaagaagcagaacgcctgcagctagagatcgatcagaaaaaggacgccgagaaccacgaagcccagttgaagaacgggtcacttgactcgccgggtaaacaagatacggaagaggatgaggaggaagacgagaaggacaagggcaagctgaagcccaatctcggcaacggagccgatctgcccaactacaggtggactcagactctgagcgagctggatctggccgtgcccttctgcgtgaacttcaggctcaaaggaaaggatatggtcgtagacattcagagacgctag

SEQ ID NO: 336813 - DNA, 890 bp, Artificial Sequence
  derived and/or modified sequence
taggaattagggcagagttaggagcggcctgcggaggggcccgctcaggccgatgccggtagtggaaacagaggaagccaccgccgcgctcttctcggaactggctaaaatagctccgtaaatgggccgagcgcaacacggaggggataccgctcactaccaggttcccgaactttggcttaccctcagcttgagccagcgcacatctcctccttaacagcctctcctgagaataggctggcttcaagggaatgggggaagtgaatgatctcaaactacagaaatggcagtgaacttgtctgtttcaattcgggagtgggctgcttcctgattggctgtgattgggctttcactgtgcttgtgaacaccttcttcagcttccttcgacgcaaaacagactttttcattggaggagaagaagggatggcagagaagcttatcacacagactttcagccaccacaatcagctggcacagaagacccggcgggagaagagagcccggcaggaggccgagcggcgggagaaggcggagcgggcggccagactggccaaggaagccaagtcagagacctcagggccccagatcaaggagctaactgatgaagaggcagagaggctgcagctagagattgaccagaaaaaggatgcagagaatcatgaggcccagctcaagaacggcagccttgactccccagggaagcaggatactgaggaagatgaggaggaagatgagaaggacaaaggaaaactgaagcccaacctaggcaacggggcagacctgcccaattaccgctggacccagaccctgtcggagctggacctggcggtccctttctgtgtgaacttccggctgaaagggaaggacatggtggtggacatccagcggcg

SEQ ID NO: 336814 - DNA, 402 bp, Artificial Sequence
  derived and/or modified sequence
atggccgagaagctgatcacccagaccttcagccaccacaaccagctggcccagaagaccagaagagagaagagagccagacaggaggccgagagaagagagaaggccgagagagccgccagactggccaaggaggccaagagcgagaccagcggcccccagatcaaggagctgaccgacgaggaggccgagagactgcagctggagatcgaccagaagaaggacgccgagaaccacgaggcccagctgaagaacggcagcctggacagccccggcaagcaggacaccgaggaggacgaggaggaggacgagaaggacaagggcaagctgaagcccaacctgggcaacggcgccgacctgcccaactacagatggacccagaccctgagcgagctggactag

SEQ ID NO: 336815 - DNA, 402 bp, Artificial Sequence
  derived and/or modified sequence
atggctgaaaagttgataacccagacgtttagccaccataaccagctggcccagaaaacgcgtcgggagaagagggcacgacaagaggccgagaggcgtgaaaaagctgaacgggccgcccggctcgctaaagaggccaagagtgagactagtggtcctcaaataaaggaactaaccgacgaggaggctgagagattacagctcgagatcgatcagaaaaaggacgccgaaaaccacgaggcacagctgaagaatgggtccctggattcccctgggaaacaggacaccgaagaagatgaggaggaagatgaaaaggataagggtaagctgaaacctaatttggggaacggcgctgatctcccaaactatagatggacccagacgctgtccgaattggattag

SEQ ID NO: 336816 - DNA, 402 bp, Artificial Sequence
  derived and/or modified sequence
atggccgagaagctgatcacccagaccttcagccaccacaaccagctggcccagaagacccggcgggagaagagggcccggcaggaggccgagcggcgggagaaggccgagagagctgcccggctggccaaggaggccaagtctgagaccagcggcccccagatcaaggagctgacagatgaggaggccgagcggctgcagctggagattgaccagaagaaggatgctgaaaatcatgaggcccagctgaagaatggcagcctggacagccctgggaagcaggacacagaggaggatgaggaggaggatgagaaggacaagggcaagctgaagcccaacctgggcaatggagctgacctgcccaactaccgctggacccagaccctgtctgagctggactag

SEQ ID NO: 336817 - DNA, 402 bp, Artificial Sequence
  derived and/or modified sequence
atggccgagaagctgatcacccagaccttcagccaccacaaccagctggctcagaaaacgagaagagagaagcgggcacgccaggaagcagagagacgggaaaaggctgaaagggctgctcggctcgctaaagaggctaaatcagagacgtccggcccccagatcaaagaactgaccgatgaggaagcggagagactgcagttggagattgaccagaagaaagatgccgaaaatcatgaggcacaacttaaaaatggtagcctggacagtccagggaaacaggatacagaggaagatgaggaagaagacgaaaaggataagggaaagctgaagccaaatctcggtaacggagcggatctgccaaattaccgttggacccagacactttccgagctggactag

SEQ ID NO: 336818 - DNA, 402 bp, Artificial Sequence
  derived and/or modified sequence
atggctgagaaacttattacacaaaccttcagtcaccataatcagctcgcccaaaagacccgccgagaaaagcgcgctcgacaggaagccgagagaagggagaaggccgaaagagccgctcgcctcgcaaaggaagcaaaaagcgaaactagtggacctcaaattaaagagctgactgatgaagaggcagagcggctacagctggagatcgaccagaaaaaggacgcagagaaccatgaggctcagctgaagaatgggtcactggactcaccgggaaagcaagatactgaggaagatgaggaggaggacgaaaaggataaaggtaaacttaagccaaatttaggcaacggagccgacctccccaattatcggtggacacagaccctgtccgagctggactag

SEQ ID NO: 336819 - protein, 637 aa, Artificial Sequence
  derived and/or modified sequence
MASNERDAISWYQKKIGAYDQQIWEKSIEQTQIKGLKNKPKKMGHIKPDLIDVDLIRGSTFAKAKPEIPWTSLTRKGLVRVVFFPLFSNWWIQVTSLRIFVWLLLLYFMQVIAIVLYLMMPIVNISEVLGPLCLMLLMGTVHCQIVSTQITRPSGNNGNRRRRKLRKTVNGDGSRENGNNSSDKVRGIETLESVPIIGGFWETIFGNRIKRVKLISNKGTETDNDPSCVHPIIKRRQCRPEIRMWQTREKAKFSDGEKCRREAFRRLGNGVSDDLSSEEDGEARTQMILLRRSVEGASSDNGCEVKNRKSILSRHLNSQVKKTTTRWCHIVRDSDSLAESEFESAAFSQGSRSGVSGGSRSLNMSRRDSESTRHDSETEDMLWDDLLHGPECRSSVTSDSEGAHVNTLHSGTKRDPKEDVFQQNHLFWLQNSSPSSDRVSAIIWEGNECKKMDMSVLEISGIIMSRVNAYQQGVGYQMLGNVVTIGLAFFPFLHRLFREKSLDQLKSISAEEILTLFCGAPPVTPIIVLSIINFFERLCLTWMFFFMMCVAERTYKQRFLFAKLFSHITSARKARKYEIPHFRLKKVENIKIWLSLRSYLKRRGPQRSVDVVVSSVFLLTLSIAFICCAQVKVSHLL

SEQ ID NO: 336820 - protein, 709 aa, Artificial Sequence
  derived and/or modified sequence
MASNERDAISWYQKKIGAYDQQIWEKSIEQTQIKGLKNKPKKMGHIKPDLIDVDLIRVIAIVLYLMMPIVNISEVLGPLCLMLLMGTVHCQIVSTQITRPSGNNGNRRRRKLRKTVNGDGSRENGNNSSDKVRGIETLESVPIIGGFWETIFGNRIKRVKLISNKGTETDNDPSCVHPIIKRRQCRPEIRMWQTREKAKFSDGEKCRREAFRRLGNGVSDDLSSEEDGEARTQMILLRRSVEGASSDNGCEVKNRKSILSRHLNSQVKKTTTRWCHIVRDSDSLAESEFESAAFSQGSRSGVSGGSRSLNMSRRDSESTRHDSETEDMLWDDLLHGPECRSSVTSDSEGAHVNTLHSGTKRDPKEDVFQQNHLFWLQNSSPSSDRVSAIIWEGNECKKMDMSVLEISGIIMSRVNAYQQGVGYQMLGNVVTIGLAFFPFLHRLFREKSLDQLKSISAEEILTLFCGAPPVTPIIVLSIINFFERLCLTWMFFFMMCVAERTYKQRFLFAKLFSHITSARKARKYEIPHFRLKKVENIKIWLSLRSYLKRRGPQRSVDVVVSSVFLLTLSIAFICCAQVLQGHKTFLNDAYNWEFLIWETALLLFLLRLASLGSETNKKYSNVSILLTEQINLYLKMEKKPNKKEQLTLVNNVLKLSTKLLKELDTPFRLYGLTMNPLIYNITRVVILSAVSGVISDLLGFNIRLWKIKS

SEQ ID NO: 336821 - protein, 762 aa, Artificial Sequence
  derived and/or modified sequence
MASNERDAISWYQKKIGAYDQQIWEKSIEQTQIKGLKNKPKKMGHIKPDLIDVDLIRGSTFAKAKPEIPWTSLTRKGLVRVVFFPLFSNWWIQVTSLRIFVWLLLLYFMQVIAIVLYLMMPIVNISEVLGPLCLMLLMGTVHCQIVSTQITRPSGNNGNRRRRKLRKTVNGDGSRENGNNSSDKVRGIETLESVPIIGGFWETIFGNRIKRVKLISNKGTETDNDPSCVHPIIKRRQCRPEIRMWQTREKAKFSDGEKCRREAFRRLGNGVSDDLSSEEDGEARTQMILLRRSVEGASSDNGCEVKNRKSILSRHLNSQVKKTTTRWCHIVRDSDSLAESEFESAAFSQGSRSGVSGGSRSLNMSRRDSESTRHDSETEDMLWDDLLHGPECRSSVTSDSEGAHVNTLHSGTKRDPKEDVFQQNHLFWLQNSSPSSDRVSAIIWEGNECKKMDMSVLEISGIIMSRVNAYQQGVGYQMLGNVVTIGLAFFPFLHRLFREKSLDQLKSISAEEILTLFCGAPPVTPIIVLSIINFFERLCLTWMFFFMMCVAERTYKQRFLFAKLFSHITSARKARKYEIPHFRLKKVENIKIWLSLRSYLKRRGPQRSVDVVVSSVFLLTLSIAFICCAQVLQGHKTFLNDAYNWEFLIWETALLLFLLRLASLGSETNKKYSNVSILLTEQINLYLKMEKKPNKKEQLTLVNNVLKLSTKLLKELDTPFRLYGLTMNPLIYNITRVVILSAVSGVISDLLGFNIRLWKIKS

SEQ ID NO: 336822 - protein, 233 aa, Artificial Sequence
  derived and/or modified sequence
MASNERDAISWYQKKIGAYDQQIWEKSIEQTQIKGLKNKPKKMGHIKPDLIDVDLIRGSTFAKAKPEIPWTSLTRKGLVRVVFFPLFSNWWIQVTSLRIFVWLLLLYFMQVIAIVLYLMMPIVNISEVLGPLCLMLLMGTVHCQIVSTQITRPSGNNGNRRRRKLRKTVNGDGSRENGNNSSDKVRGIETLESVPIIGGFWETIFGNRRLLGVWVMGCLMTCQVKKMVKHGHR

SEQ ID NO: 336823 - DNA, 3244 bp, Artificial Sequence
  derived and/or modified sequence
ctctccggcgtctccgcctggaggggaagatgcggcctgcctggcccgccgcctcgcccccggcctcacggtgggaccccgggcactgaggacggaggtcccgggcgccggcccgcggggcaacgggcactaggtgagagccggacgcgggcgagcgaaggaggcgggtgccgggcgactccagcggcggcccctgcccctcccccgcacccacgaacacgctcgcccgatatattgcagaggcttctccggtcgccgctgcgccagtttttttttgtttgtttgttgtgttttccctggcaaacagctggagaaagagcagctcatggagaggctgagagaagcggttttcgcgtcctacccaaactgggagagtaaccttcagcagctggactcaccgattggttttccttcattttcagtgaaatcccattctctggctggagacacagatggcctcaaatgagagagatgctatatcgtggtaccaaaagaagattggagcctacgatcagcagatatgggaaaagtcaatcgaacagactcagattaagggtttgaaaaacaaaccgaaaaagatgggccacataaagccagacttgattgacgttgacttaatcagagggtcaacatttgccaaagcaaaacctgaaattccatggacatctctgactcggaaggggcttgttcgagttgtattttttccattgttcagcaattggtggattcaggttacctctttaagaatctttgtttggctgttactactttatttcatgcaagttatagcaattgtcttatatttgatgatgcctattgtgaacataagtgaagtacttggacccttgtgccttatgctactcatgggaactgtccactgtcaaattgtgtctactcagataacaagaccatcaggaaacaatggaaatcgaagaagaagaaaattacgaaaaactgtaaatggtgatgggagccgagaaaatggaaataactcctctgataaagtcagaggaatagaaactttggaatctgtacccattattggtggtttttgggagactatctttggcaacaggattaaaagagtaaaattaatatctaacaaagggactgaaactgacaatgacccaagttgtgtccatcctatcattaagaggagacaatgtcgaccagagattagaatgtggcaaacaagagagaaagcaaaattttcagatggagaaaagtgccgtagggaggcttttaggcgtttgggtaatggggtgtctgatgacctgtcaagtgaagaagatggtgaagcacggacacagatgatattattgcgtaggagtgtggaaggggcctcaagtgacaatggttgtgaagttaagaatagaaaatcaatactttcaaggcacctaaactctcaggtaaagaaaaccactacaaggtggtgtcatattgtgcgggattcagatagtctggctgaatcagaatttgaatcagcagccttcagccagggctctagatcgggtgtgagtggtggctctcgaagcctcaacatgtcaagaagagactcagaaagcacccgccatgactcggagactgaggacatgttatgggacgacctgctacatggcccagagtgccggtcatctgtcaccagtgacagtgagggggcccatgtgaatacccttcactcagggaccaaacgtgaccccaaagaggatgtttttcagcagaatcatttattctggcttcagaattcaagtccttcctctgatcgagttagtgcaataatctgggaggggaatgagtgcaaaaagatggatatgtctgtgttggaaataagtggcatcatcatgagcagggtcaatgcctatcagcaaggagtaggttatcagatgctgggaaatgttgtcactattggattagcattttttccattcttacatcgacttttccgtgagaagagccttgaccaactaaagtccatttcagctgaggagatcttgactctcttttgtggggcaccacctgttacacctattattgttttgtcgataattaatttttttgaaagattgtgtcttacttggatgttttttttcatgatgtgtgtggcagagagaacatataaacagagatttttatttgcaaaactcttcagccatattacttctgccaggaaagctaggaaatatgaaatacctcatttcagacttaagaaggtggagaatattaaaatatggttatcactgcgttcctatctaaagagacgggggccacagcgttcagttgatgtggttgtatcctcggttttcctactgacactttcgattgctttcatttgttgtgctcaggttctccaaggacataaaactttcctgaatgatgcttataactgggagtttttgatctgggaaacagctttactactttttttattgcgtctggcctcactggggtctgaaaccaataagaaatacagcaatgtttcaatattacttacagaacagattaatttatatcttaagatggaaaaaaagccaaataagaaagaacagcttactctagtaaacaatgtattaaagctgtccaccaagttgttgaaagagctggacacaccatttagactctatggactgacaatgaatcccttaatctacaatatcacaagagtagttatcctttctgctgtctcaggtgttataagtgatcttctaggatttaatataagactgtggaaaattaaatcataagctgagtaaatgcctggactctcccctggctggtatcaaaacttacctatcaaggaaagtgatgactgcagaaaccagtgagatacccacctgcttgttcacatgcacaggtgctctcagctctgccaaagcgaatgaatggtgtttccggaggagcaagtccttttccaactgggtgtgcatgctaaaaacctgtattttcatgcttttcaaacaacatgaatagtcagctgactaaagactgtgtgtgttgtggtaacacaaagacaattttgtaagtttgcgcttcagtactgtgacagttatgtttactggacatagtcttttgggcaactatgatagatgcccaaagcatgaagcaaatatcttttattggaaatatgcaaattcaatacttttccattatagtctatagaactggagatttcatttctctatcaaagagagatcaagcgaactattttaggttaaatccgaataaaagaactttactggagactttc

SEQ ID NO: 336824 - DNA, 2130 bp, Artificial Sequence
  derived and/or modified sequence
atggctagcaatgagagagacgccatttcatggtaccaaaaaaaaatcggggcctatgatcagcagatttgggaaaaaagtattgagcagacacagatcaaagggcttaaaaacaagcccaagaaaatgggtcatatcaagccggatcttatcgatgtagacttgatacgcgtcattgccattgtgttgtatctgatgatgccgatagtcaatataagcgaggtcttggggcccctgtgtctcatgctcttgatggggaccgttcattgccaaattgtgagtacccaaattacccgtccttccggcaacaacggtaatcgcagacgtaggaaattgagaaagactgtgaatggcgatgggagcagggagaatggaaacaatagctccgacaaagtgcgaggcatcgagaccctcgagtccgtgccaatcattggtgggttctgggaaaccatctttggtaaccggatcaagcgcgtgaaattgatatctaataaagggactgaaaccgataatgatccaagctgcgtccatcctatcatcaaacggcgccagtgtcgcccggagattagaatgtggcagactagagagaaggctaaatttagcgatggtgagaagtgccggcgagaagctttcagacggttggggaacggagtcagtgacgatctctcaagtgaggaggatggcgaggccaggactcagatgatcttgttgaggcgatcggtggagggtgcatccagcgacaacggctgcgaggtgaaaaacagaaagtccattctgagcaggcacttaaacagccaagtgaagaaaactactacacgatggtgtcatatcgtccgtgactctgactctcttgctgagagcgagttcgagtctgccgcgttttctcaagggagcagaagcggagtttctggaggttcgcggtccctgaatatgtctagacgtgactccgaatcaacccggcacgactcagagactgaagatatgctttgggatgacttactgcacggacccgagtgtcgcagctctgtgacatccgattctgagggtgcccacgtgaataccctgcattctggtaccaaacgcgatcccaaagaggacgttttccagcagaatcacctgttctggctgcagaactcaagcccgtcgagtgatcgtgtatccgcaattatctgggagggtaacgagtgtaagaaaatggacatgagcgtcctagaaatctccggcatcatcatgtcacgcgtgaatgcttaccaacagggcgtgggatatcagatgctgggcaatgtggtgaccatcggactcgcattctttccattcctccatcgattgttccgcgaaaaaagccttgaccagctgaaatcgatcagcgcagaggagatccttacactcttctgtggagctccgcctgtgacgcctattattgtactgtccatcattaacttttttgagagattgtgtcttacctggatgttttttttcatgatgtgtgtggcagaaagaacgtataaacagcgattcttgttcgccaagctgttcagtcatattacgagtgcaagaaaagctcgcaaatatgagatcccacatttccgactcaagaaggtcgaaaatatcaagatttggctttcattacggtcatatttgaagagaaggggtccacaaaggtctgtggacgtggtagtcagctcagtgttcctactaacactgtccattgcatttatttgctgtgcacaggtgctccaggggcataagacctttctgaatgatgcctataattgggagtttttgatatgggaaacggccctgctgctcttcttgctgcgtctcgctagcctcggcagcgagactaataaaaaatacagcaacgtgagcatcctgctcactgagcagatcaatctctatctgaagatggagaaaaaacctaataagaaggaacagctgacactcgtgaataacgtgctgaaactgtccacgaaactgctgaaagagctggacacaccgtttcggctgtacgggctaacaatgaacccgctcatttacaacattacaagggtggtgattttgagcgccgtgagcggagtgatctcagacttgttaggattcaatatccggctctggaagatcaaatcttag

SEQ ID NO: 336825 - DNA, 2130 bp, Artificial Sequence
  derived and/or modified sequence
atggcatcaaacgaacgagacgccatctcttggtatcagaagaagataggcgcgtatgaccagcagatctgggaaaaaagtatagaacagacccagataaaaggtctgaagaataagcctaagaaaatgggtcatattaagccagatctgattgacgtggatctgatccgagtgattgctattgtgctgtatctgatgatgcccattgtgaacatatctgaagttttgggtcccctctgtctgatgcttttgatgggtactgtccattgccagatagtctccacacagattacaaggcccagcggcaataatggcaataggcgccgccggaaactgcgcaagactgtgaacggcgatggctcccgagagaacgggaacaactcaagcgacaaggttagaggtattgagacgctggaatctgtgcccatcattggaggtttctgggagactatttttgggaatagaatcaaacgcgtcaaattgatttccaataaagggaccgaaactgataacgatcccagttgtgtccatccgatcattaagagacgccagtgccgccccgaaattaggatgtggcagacacgagaaaaggcgaagttttctgatggggaaaagtgtagacgggaagcgtttcgcagattgggtaacggcgtttctgatgacctttcctccgaggaagatggtgaagcgagaacccagatgatactgctgcgcagaagcgtggaaggggcctctagcgataatgggtgtgaggtaaaaaacagaaagagtattttgagcagacacttgaactcccaggtgaaaaagaccacaacccgctggtgtcacatcgtgcgcgacagtgacagcctagcagaatccgagtttgaatctgccgcttttagtcaaggcagccggtctggcgtgtccggcggatcaagatccctgaatatgtctcggagggacagcgagtccacacgccatgatagcgaaacggaagatatgctgtgggacgatctcctgcacggccccgaatgtcgatcctccgttacaagcgacagcgaaggagcccacgttaacactctgcacagcggtactaagagggacccaaaagaagacgtgttccagcaaaatcatctgttttggttgcagaacagctcaccttcttccgatagagtttccgcaatcatttgggaagggaacgaatgtaaaaaaatggatatgtctgtactggaaattagcggtattatcatgtctagagtgaacgcataccagcagggcgtgggctaccagatgcttggaaatgtcgtcaccatcggcttagctttctttccctttctgcatcgactctttagagagaagtccctggaccaactgaagtcaattagcgctgaggaaattctcaccctcttctgcggggcccctcctgtcacccccataatcgttttgagcataattaacttcttcgagagactctgtctgacttggatgttcttttttatgatgtgcgtggctgaaaggacctataagcagcggttccttttcgctaagcttttctctcatattacaagcgcacgcaaggcacgtaaatatgagatcccgcacttccgactaaaaaaggtcgagaacattaagatttggcttagcctgagaagctatctgaagcggagaggaccccagaggtccgtggatgtggtcgtatcctcggtattcctcctgaccttgtccattgcttttatttgttgcgctcaggtcctgcagggccataagaccttcttgaacgatgcctataattgggaattcctcatttgggaaaccgctctcctccttttcctgctgagactggccagtttgggaagtgagactaataagaagtacagcaacgtgtccatcctgcttaccgagcaaattaacctttacctgaagatggagaagaagcctaataagaaggagcagttgacactggtgaacaacgtgctcaagctgagtaccaagctgctgaaggagctggatacacccttccgcctctatgggcttacgatgaatccactcatttataatatcacgcgcgtagtaatactcagcgcggtatcaggagttatatccgacctgctgggattcaatatccgcctatggaagatcaagagctag

SEQ ID NO: 336826 - DNA, 2289 bp, Artificial Sequence
  derived and/or modified sequence
atggcctccaacgagcgggatgcaatcagttggtaccagaaaaaaattggcgcatacgatcagcagatatgggaaaaatcgattgaacagactcaaataaaaggactcaagaacaagccaaagaagatgggccacatcaagccagatcttatagatgttgacctcatacgtggaagtaccttcgccaaagcaaaaccagagatcccttggacttctctgacgcgcaagggtctagtgagagttgtattttttccgttgttttcaaactggtggatccaggtgaccagcctacgaattttcgtgtggctgctcttactgtacttcatgcaggtgatcgctattgtcctgtacttaatgatgccaatcgttaatatttcagaggttcttgggcctctctgcctcatgctactgatgggtaccgttcactgccagatagtaagtacacagatcacaagaccatcagggaacaatggcaacaggcgtcgtagaaagttacgtaagactgtgaatggagatggctctagggagaacgggaacaacagttctgataaagtgaggggcattgaaacacttgagtctgtgcccataattggtgggttttgggaaacaatatttgggaatcgcatcaaaagggtgaagctaatttctaacaagggaacggaaaccgataacgatccctcgtgtgtgcaccccatcatcaagagaaggcagtgtagacccgagataaggatgtggcagaccagagagaaggccaagtttagtgatggggagaagtgccgacgagaggccttccggagactggggaacggagttagcgatgatttgagttctgaagaggacggagaagccagaacacaaatgatcctgctaagaaggagcgtcgagggtgcctcctcagacaatgggtgcgaggtgaagaatcgaaaatccattctttcccgccaccttaacagtcaggtgaagaaaacgaccacccgttggtgtcacatcgtcagagattccgactcactcgctgagagtgagtttgagtcagcagccttctcgcaaggaagtcggagtggggtcagcggaggaagccgatcacttaatatgtcccgaagagactctgaatctacgcgtcacgacagcgagacagaggatatgttgtgggatgacttgctgcacggccccgagtgcagaagctctgtcacaagcgactctgaaggcgcgcacgtgaataccttgcacagcgggacaaagcgtgatcctaaggaagatgtgtttcagcaaaatcacctgttttggctgcaaaattcaagtccttcaagtgatcgcgtgagtgccatcatctgggagggaaatgagtgcaaaaagatggacatgtcagtgctagaaattagcgggatcataatgtcgagggtgaacgcctaccagcagggtgtgggttatcagatgctgggaaatgtggtgacaatcggcttggctttctttcctttcttgcacagattgtttagggagaagagcctggatcagctgaagtccatatcagcggaggagattttgacccttttctgcggggctccccctgttactcccattatcgtattaagtatcattaacttcttcgagcgcctttgcctcacctggatgttctttttcatgatgtgcgtggcagaacgaacctataaacagcgatttctgtttgccaaactgttctcacacattacttccgcacggaaagctagaaaatatgaaattccccattttaggctgaaaaaagttgaaaatattaagatctggctgagcctgcgatcatacctgaaaagacgcgggccacaacgctcagtggacgttgtggtgagtagcgtgttcctgctgaccctgtccattgcttttatatgctgcgcccaagtgctccagggccacaaaaccttcctgaatgacgcttacaattgggagttcttgatttgggagacagctctgctgttgtttcttctcagactagcatcattaggctccgagaccaataaaaaatactccaacgtcagtattctgctcacggagcagattaacctttaccttaagatggagaaaaagcccaacaagaaagagcaactgaccctggtcaataacgtgctaaagctgagcacaaaactgcttaaagaactcgataccccctttcgtttatacgggcttacaatgaatccactgatatataatatcacacgcgtcgtaatcttgtcagctgtaagcggcgttattagcgatttgctgggcttcaatatccgcctgtggaaaatcaagtcctag

SEQ ID NO: 336827 - DNA, 2289 bp, Artificial Sequence
  derived and/or modified sequence
atggcaagtaatgagagagacgccatcagttggtaccagaaaaagataggcgcttatgaccagcaaatttgggagaagtccatcgagcaaactcagataaaaggcctgaaaaataagcctaagaaaatgggtcacatcaagccagatttgatagacgtcgacttgattcgtggctcaactttcgctaaagctaagcccgagatcccatggacaagtctcacaagaaaaggactggtcagagtggtcttcttcccccttttctccaattggtggattcaggtaacaagcctacgaatcttcgtctggctccttcttttgtacttcatgcaggtgattgctattgtgctttaccttatgatgcccatcgtcaacatctctgaggttctcgggcctttgtgtttgatgctcctgatggggaccgtgcactgccagatcgtttccacacagattacccgcccgtctggcaacaatggcaatagaagaagacgcaagctgaggaaaactgtgaacggcgacggaagtcgagaaaacgggaataacagctccgataaggttcgcggcattgaaactctggagagcgtgccaatcatcgggggattttgggagaccattttcggcaaccgcataaaaagagttaagctgatctccaataagggaaccgagactgacaacgatccttcttgcgtccatcccattattaagcgcagacagtgtagacctgagatccgcatgtggcagaccagggagaaggctaaattttctgatggggagaaatgcaggagagaagccttccgaaggctgggcaatggcgtttccgacgatctgtcctccgaggaggacggtgaggcgcgaacccagatgatcctcctacgaagaagcgtggagggggcttcttcggacaacggctgtgaggtaaaaaaccggaaaagtatcctgagtcgccatctcaactcgcaggtgaagaaaaccacaactcgctggtgccatatagtgcgggattcggacagcttggccgagtccgagtttgaatcagcagcattcagccaaggatctagaagcggggtcagcggagggtcccgaagcctcaacatgtctagaagagattccgagtctacaaggcacgactccgaaacagaggacatgctttgggatgatctccttcacggacctgagtgtagatctagtgtaacgagcgatagtgagggggctcatgtgaataccctgcacagcgggaccaagagagatccaaaggaggatgtcttccagcaaaatcacctgttttggctccaaaattccagccctagttccgatagagtttctgcaatcatatgggagggcaatgagtgtaaaaaaatggatatgtccgtgctggagataagtggaattataatgtcccgggtaaatgcgtaccaacagggggtgggatatcagatgttgggcaatgtcgtaacaatcggcttggcgttctttccatttctacatcgtctgttcagggagaagagtcttgaccagcttaagtcaatatccgccgaggagattctcacgctgttctgtggagccccaccggtcactcccattatcgtgctgagtatcataaatttcttcgagcgcctttgtcttacctggatgtttttttttatgatgtgcgttgccgaaagaacttacaagcaacgatttttattcgcgaaattattcagccacattacgtccgccagaaaagccagaaaatatgaaattcctcacttccgattgaaaaaggttgagaacatcaagatctggctctccctgagaagctatctgaaacgtagaggtcctcagcgaagcgtagacgtcgtggtatcttctgtctttctcctgaccctgagtatagcattcatatgctgcgctcaggtccttcagggccacaagaccttccttaatgacgcctataactgggagttcctgatctgggagaccgccctgctgttatttttgctccgcctcgcatccctgggttcagagacaaacaagaagtattccaatgtatccatactcctgaccgaacaaattaacctgtacctgaaaatggagaagaagccaaacaagaaagaacagctgacgctggtaaacaatgttctgaaactgtctacgaaattattgaaggaacttgatactccttttcgactctatggcctcaccatgaacccactgatctacaatataactcgcgtggtcatcctgtccgcagtatctggcgttatttctgatctgttggggtttaacattaggctctggaagatcaaatcttag

SEQ ID NO: 336828 - DNA, 2130 bp, Artificial Sequence
  derived and/or modified sequence
atggccagcaatgaaagagatgccatctcctggtaccagaagaagatcggggcctatgaccagcagatctgggagaagagcattgagcagacccagatcaagggcctgaagaacaagcccaagaagatgggccacatcaagccagacctgattgatgtggacctgatccgggtgattgccatcgtgctgtacctgatgatgcccatcgtgaacatcagcgaggtgctgggccccctgtgcctgatgctgctgatgggcaccgtgcactgccagatcgtgtccacccagatcacccggcccagcggcaacaacggcaacagaagaagaaggaagctgaggaagacagtgaatggagatggcagcagagaaaatggaaacaacagcagtgacaaggtgcggggcatcgagaccctggagagcgtgcccatcatcggcggcttctgggagaccatcttcggcaaccgcatcaagagggtgaagctgatcagcaacaagggcacagaaacagacaatgaccccagctgtgtgcaccccatcatcaagaggcggcagtgcaggcctgagatccgcatgtggcagacccgggagaaggccaagttcagtgatggagagaagtgcagaagagaggccttccggcggctgggcaatggagtgtctgatgacctgagcagcgaggaggatggagaggcccggacccagatgatcctgctgcggcgctctgtggagggcgccagcagtgacaatggctgtgaggtgaagaacaggaagagcatcctgagccgccacctgaacagccaggtgaagaagaccaccacccgctggtgccacatcgtgcgggacagcgacagcctggccgagagcgagtttgaatctgctgccttcagccagggcagccgcagcggcgtgtctgggggcagccgcagcctgaacatgagcagaagagacagcgagagcaccaggcatgattctgaaacagaggacatgctgtgggatgacctgctgcacggccctgagtgccgcagctctgtgaccagtgacagcgagggcgcccacgtgaacaccctgcacagcggcaccaagagggaccccaaggaggatgtgttccagcagaaccacctgttctggctgcagaacagcagccccagcagtgacagagtgtctgccatcatctgggagggcaatgaatgcaagaagatggacatgtctgtgctggagatcagcggcatcatcatgagccgggtgaatgcctaccagcagggcgtgggctaccagatgctgggcaatgtggtgaccatcggcctggccttcttccccttcctgcacaggctcttccgggagaagagcctggaccagctgaagagcatctctgctgaggagatcctgaccctcttctgtggggcccctcctgtgacccccatcatcgtgctgagcatcatcaacttctttgagcggctgtgcctgacctggatgttcttcttcatgatgtgtgtggccgagaggacctacaagcagcgcttcctgtttgccaagctgttcagccacatcaccagcgccaggaaggccaggaaatatgagatcccccacttccggctgaagaaggtggagaacatcaagatctggctgagcctgcggagctacctgaagagaagaggcccccagaggtctgtggatgtggtggtgagcagcgtcttcctgctgaccctgagcatcgccttcatctgctgtgcccaggtgctgcagggccacaagaccttcctgaatgatgcctacaactgggagttcctgatctgggagacagccctgctgctcttcctgctgcggctggccagcctgggcagcgagaccaacaagaagtacagcaatgtgtccatcctgctgacagagcagatcaacctgtacctgaagatggagaagaagcccaacaagaaggagcagctgaccctggtgaacaacgtgctgaagctgagcaccaagctgctgaaggagctggacacccccttccggctgtatggcctgaccatgaaccccctcatctacaacatcaccagggtggtgatcctgtctgctgtgtctggagtcatcagtgacctgctgggcttcaacatccggctgtggaagatcaagagctag

SEQ ID NO: 336829 - DNA, 2289 bp, Artificial Sequence
  derived and/or modified sequence
atggccagcaatgaaagagatgccatctcctggtaccagaagaagatcggggcctatgaccagcagatctgggagaagagcattgagcagacccagatcaagggcctgaagaacaagcccaagaagatgggccacatcaagccagacctgattgatgtggacctgatccggggcagcacctttgccaaggccaagccagagatcccctggaccagcctgaccaggaagggcctggtgcgggtggtgttcttccccctcttcagcaactggtggatccaggtgaccagcctgcgcatctttgtgtggctgctgctgctgtacttcatgcaggtgattgccatcgtgctgtacctgatgatgcccatcgtgaacatcagcgaggtgctgggccccctgtgcctgatgctgctgatgggcaccgtgcactgccagatcgtgtccacccagatcacccggcccagcggcaacaatggaaacagaagaagaaggaagctgaggaagacagtgaatggagatggcagccgggagaatggaaacaacagcagtgacaaggtgcggggcatcgagaccctggagagcgtgcccatcattggaggcttctgggagaccatctttggaaaccgcatcaagagggtgaagctgatcagcaacaagggcacagaaacagacaatgaccccagctgtgtgcaccccatcatcaagaggcggcagtgcaggcctgagatccgcatgtggcagacccgggagaaggccaagttcagtgatggagagaagtgccggcgggaggccttccggcggctgggcaatggagtgtctgatgacctgagcagtgaagaagatggagaggcccggacccagatgatcctgctgcggcgctctgtggagggcgccagcagtgacaatggctgtgaggtgaagaacaggaagagcatcctgagccgccacctgaacagccaggtgaagaagaccaccacccgctggtgccacatcgtgcgggacagcgacagcctggccgagagcgagtttgagagcgctgccttcagccagggcagccgctctggagtgtctgggggcagccgcagcctgaacatgagccggcgggacagcgagagcaccaggcatgacagcgagacagaggacatgctgtgggatgacctgctgcacggcccagaatgtcgcagctctgtgaccagtgacagcgagggcgcccacgtgaacaccctgcacagcggcaccaagagggaccccaaggaggatgtgttccagcagaaccacctgttctggctgcagaacagcagccccagcagtgacagagtgtctgccatcatctgggagggcaatgaatgcaagaagatggacatgtctgtgctggagatcagcggcatcatcatgagccgggtgaatgcctaccagcagggcgtgggctaccagatgctgggcaatgtggtgaccatcggcctggccttcttccccttcctgcacaggctcttccgggagaagagcctggaccagctgaagagcatctctgctgaggagatcctgaccctcttctgtggggcccctcctgtgacccccatcatcgtgctgagcatcatcaacttctttgagcggctgtgcctgacctggatgttcttcttcatgatgtgtgtggccgagaggacctacaagcagcgcttcctgtttgccaagctgttcagccacatcaccagcgccaggaaggccaggaaatatgagatcccccacttccggctgaagaaggtggagaacatcaagatctggctgagcctgcggagctacctgaagaggcggggcccccagaggtctgtggatgtggtggtgtcctctgtgttcctgctgaccctgagcatcgccttcatctgctgtgcccaggtgctgcagggccacaagaccttcctgaatgatgcctacaactgggagttcctgatctgggagacagccctgctgctcttcctgctgcggctggccagcctgggcagcgagaccaacaagaagtacagcaatgtgtccatcctgctgacagagcagatcaacctgtacctgaagatggagaagaagcccaacaagaaggagcagctgaccctggtgaacaacgtgctgaagctgagcaccaagctgctgaaggagctggacacccccttccggctgtatggcctgaccatgaaccccctcatctacaacatcaccagggtggtgatcctgtctgctgtgtctggagtcatcagtgacctgctgggcttcaacatccggctgtggaagatcaagagctag

SEQ ID NO: 336830 - DNA, 2130 bp, Artificial Sequence
  derived and/or modified sequence
atggccagcaacgagcgggacgccatcagctggtaccagaagaagatcggggcttacgatcagcaaatttgggagaagtctattgagcagacgcagataaaagggctcaagaacaagcccaaaaagatgggccacattaagccagatctgattgatgtagacctgatcagagtcattgcaatagttctctaccttatgatgccaatcgttaatatctcagaggtgctgggtcctctttgtcttatgctcctaatgggtaccgtccattgccagattgttagtacccagatcactagaccttcaggtaacaacggcaacagacgcaggcggaaacttagaaagacagttaatggagacgggtctagggaaaatggtaataattcgtccgacaaagtcagagggatcgagacactggagtccgtgcctattattggcgggttctgggaaaccatatttggcaatcgaattaaacgcgttaaactaatctctaataagggcacggagacagataacgacccatcctgtgtccacccaatcatcaagcggcggcaatgtagacccgagattagaatgtggcaaactagggagaaggcgaagttcagtgatggtgaaaaatgcagacgtgaagccttcaggcgactgggaaatggcgtgtcagacgatctgtctagcgaggaagacggagaggcccgcacacagatgattctgttaagacggagtgtggagggcgcctccagcgacaatggctgtgaggtcaaaaatcggaaatcgattcttagccgtcacctcaatagtcaggtgaagaaaaccacaactcggtggtgccacattgttagagacagcgacagtcttgctgagtctgagtttgaaagtgcggccttttcacagggatcacggtcaggtgtgagcgggggcagcaggtctttgaatatgagccgacgggattccgagtccacacgtcacgactcagaaacggaggacatgctgtgggacgatctgctgcacggccctgaatgccgatcaagcgtcaccagtgattcagagggcgctcatgtgaacactctccactccggtaccaagagagaccccaaggaggacgtttttcagcagaatcacctcttctggttgcagaattcctcgccgtcctcagatagagtcagtgccattatttgggaaggaaatgagtgcaagaagatggacatgtcagtacttgagatcagcgggatcatcatgtcccgtgtcaacgcctatcaacaaggggtggggtatcagatgctgggtaatgtggtgactattggtctggcatttttcccattcctgcatcggctgtttagagaaaagtccctagaccaattaaaaagtatctcagccgaggaaatactcaccctcttctgtggagccccacccgtgacccccataatcgtgttgtctatcatcaactttttcgagaggttgtgtctcacgtggatgttcttctttatgatgtgcgtggccgagcgaacttacaagcagcgattcctcttcgctaaacttttcagtcacatcacatcagcccgaaaagctcgcaagtacgaaatcccccactttagattgaaaaaggtggagaatatcaagatctggcttagtctgcgttcctatttgaagaggcggggaccccagaggagcgtggatgttgtggtcagttcagttttccttcttaccttaagcatcgcgtttatttgttgcgctcaggtgctgcagggacataaaaccttcctgaatgacgcctacaattgggaatttttaatctgggagacagccttgctgctgtttctgctgcggctcgcctcactggggagtgaaacaaataaaaaatacagtaatgttagcattctgctgaccgagcagataaacttatatctgaagatggaaaagaagccaaataaaaaagagcagctaaccctcgtgaacaacgtgttaaagctgtctacaaagctccttaaggagcttgacactccttttagactgtacggcttgacaatgaacccactcatctataatatcacgagagtggtcatactctctgccgttagtggcgtgataagtgacctgctggggtttaatatccgtttgtggaagatcaaatcctag

SEQ ID NO: 336831 - DNA, 2130 bp, Artificial Sequence
  derived and/or modified sequence
atggccagcaacgagcgggacgccatcagctggtaccagaagaagattggcgcttacgatcagcagatctgggagaaaagcattgaacagacccaaatcaagggtttgaagaacaagccaaaaaaaatgggtcatattaagccagatctcatagacgtcgacctgatacgcgtaatcgccatcgttctgtacctaatgatgcccatcgttaatatatctgaggtgctgggcccactctgcctgatgctgcttatgggcacggtgcactgtcaaattgtctctactcagatcactaggccaagtgggaataacggcaatcggaggaggcgcaaactaaggaaaaccgtgaacggggacggatctagggaaaacggtaataattcgtctgacaaggtgcggggcattgaaaccctcgaatctgtacccatcattgggggattttgggagaccatcttcggcaaccgtattaagcgggtgaaactgatttcgaataagggcacagagaccgacaacgacccctcgtgtgttcatccaataataaagagaaggcagtgccggccagagatccgaatgtggcagacccgggaaaaggccaagttcagcgacggagaaaagtgccgaagggaggccttcaggagactcggtaatggagtctcagacgacctgagtagcgaggaagacggggaagcccgtacacagatgattctgttgcggagatccgtggagggcgctagctcagataatggctgcgaagttaaaaatagaaaaagcatactgtctcgccacctcaacagtcaggtaaaaaagaccacaacacggtggtgccatatcgtcagagatagcgatagtttggctgaaagtgagtttgaatctgcagctttcagccaaggcagccgttccggcgtgagcggagggagccgttcactgaacatgagcaggagagattccgagagtacccggcacgatagcgaaacagaggacatgctctgggacgatcttctgcatgggccagagtgtcgttcttccgtgacatcagactcagaaggggcccacgtgaataccctgcattctggtacaaaacgtgaccctaaagaggacgtatttcagcagaatcacctcttttggctccagaatagcagtccgagctctgacagggtctcagcaataatctgggagggaaacgaatgtaagaagatggatatgtcagtgctcgagattagcggaattataatgtctagagtcaacgcataccagcagggcgtggggtaccagatgctgggcaatgtggtcacaatcgggctggcctttttccccttcctccaccgccttttccgggagaaatccctagatcaattgaagagcatttccgccgaagagattctcacgctgttttgcggggcacccccagtgactccaattattgtgctgagcattattaatttcttcgagagactctgcctgacatggatgtttttcttcatgatgtgcgtggccgaacgcacttataagcagagattcctttttgctaaactattcagccatattacctctgcgaggaaggccaggaagtatgagatcccacatttcagattaaagaaagtggagaacatcaaaatctggctttctctcagatcatatcttaagaggcgggggccccagaggagtgttgatgtggtggtctcttccgtgtttctcctgaccctttcgattgcctttatatgctgtgcccaggtgcttcaaggacataagacattcctgaacgacgcttataattgggagtttctgatctgggaaactgctcttttattgttccttctgcggctcgctagcctggggagcgagaccaacaagaagtatagcaatgtgtccatcttactaactgaacaaattaacctgtacttgaaaatggagaagaaaccgaacaagaaagagcagttgacccttgttaataatgtccttaaactgagcactaagctgctgaaggaactggacacccctttcagactgtatggactcactatgaatcctctcatttataacatcacgcgggtggtgatcctgtcggcagtaagcggtgttattagcgacctcctcggatttaatatccggctttggaaaatcaagagctag

SEQ ID NO: 336832 - DNA, 2289 bp, Artificial Sequence
  derived and/or modified sequence
atggccagcaacgagcgggacgccatcagctggtaccagaagaagatcggcgcttatgatcaacagatatgggagaagtctatagagcagacccagataaagggtcttaagaataagcccaagaaaatgggtcacattaagcctgatctgatcgatgtggatttgatacgcggctccacctttgcaaaagcgaagccagaaatcccctggacttctctcacacgcaaagggttagtgagagtggtttttttccctcttttcagcaattggtggattcaggtcaccagcttgcgcattttcgtgtggttacttttgctgtactttatgcaagtcattgccattgtcctgtaccttatgatgccaatagttaacatctctgaagtgctggggccattatgcctgatgctactgatgggaactgtccattgccaaattgtttctactcagatcactaggccctcagggaataacgggaacagaagacggcgtaaattgaggaaaacagtcaacggtgacggcagcagagaaaacggcaacaattcttctgataaggtgcgtgggatcgaaacccttgagtctgtccctattatcgggggcttttgggaaacgattttcggaaacagaatcaagagagtgaaattgataagtaataaaggcacagaaaccgataacgatccctcctgtgtgcacccaatcatcaagagacgccaatgccgcccagagatccggatgtggcagacacgcgagaaagccaagtttagcgacggcgaaaaatgtcggagggaggctttccgccggttgggcaacggggtcagtgacgatcttagttctgaagaagatggtgaggctaggactcagatgatcctgttgcgtcgctctgtggagggggcatctagcgataacggatgtgaggtgaagaatcggaaatccatcctctcacgacacctgaactctcaggtgaagaagactacgactaggtggtgccatatcgtgcgagactctgacagcttagcggaatctgagttcgagtcagccgctttctcccaaggcagccgcagcggtgtgagcggtggctctaggagtctaaacatgagtcgacgtgattctgagtctacacgtcacgacagcgagaccgaagacatgctatgggacgacctactgcatggaccggaatgccgcagcagtgtaactagtgactccgagggagctcacgtgaacaccttacattcaggaactaagcgtgatcccaaggaagacgtgttccagcagaaccacttgttctggttacaaaattccagcccatccagtgatagagttagtgctataatatgggagggaaacgaatgtaagaaaatggacatgtccgtcttggagatctctggcattattatgagccgcgtcaatgcctaccagcaaggagtgggatatcagatgctgggtaacgttgtcacaatcggtttggcgttttttcctttcctccacaggttgtttagggagaagagccttgatcagttaaaatcaatcagcgctgaagaaatcctcactctgttttgcggtgctcctccggttaccccgattattgtgctcagcattataaacttcttcgaaaggctctgtttaacctggatgttttttttcatgatgtgcgtggctgaaaggacatacaagcagaggttcctattcgccaagctcttcagccatattacgtcagccagaaaggcgagaaaatatgagattccacactttcggctgaaaaaggttgaaaacataaagatctggctgtcactgcgtagctacctgaagaggcgcggcccccagagaagtgttgatgtggtggtcagtagcgtgttcctcctgacactgagcatagcttttatctgctgtgctcaggtcttgcaaggacataagacctttctcaatgacgcttataactgggaattcctgatctgggagacagccttgctgttattcttacttaggttggcctcactgggttccgaaactaataaaaaatactcaaacgtgtctatcctgttgacagagcagatcaacctgtacttaaagatggagaagaaacccaataaaaaggaacagctgacccttgtgaataacgtcctgaaattatcaactaagctgctcaaggaactggataccccattcagattgtatggcctgacaatgaatcctctaatctacaatatcactcgcgtcgttatcttgagcgccgttagcggtgtgatttccgacctgcttgggtttaatataaggctctggaaaattaagtcttag

SEQ ID NO: 336833 - DNA, 2289 bp, Artificial Sequence
  derived and/or modified sequence
atggccagcaacgagcgggacgccatcagctggtaccagaagaagatcggggcctacgatcagcaaatttgggagaagagcatcgaacagacacagatcaagggactcaaaaataagcctaagaaaatggggcatattaagcctgaccttatcgacgtcgatctgatcagggggagcactttcgcaaaggccaagcccgagatcccatggacttctctcactcgcaaagggctggtgcgcgttgtgttctttccattgtttagcaactggtggattcaagtgacatcgctgcgaatcttcgtgtggttactgctgttgtattttatgcaggtgattgcaatagtcctttacctcatgatgcccatcgtcaacatctcagaggtactgggcccactctgccttatgctgctgatgggaacagttcactgtcagattgtctctactcaaataaccagaccgtctggcaataacggaaataggcgtcgtcggaaactgagaaagaccgtaaatggtgatggctcccgcgagaacggcaacaattcctcggataaggtgaggggaatcgagaccctggaatccgtgcctattatcggtggtttctgggaaaccatctttggaaacaggatcaagcgcgtcaagctgatttccaacaaaggtaccgagacagacaatgatccatcttgtgtccatcccatcataaaacggcggcagtgcagaccagaaatacggatgtggcaaactcgagagaaggcaaagttttctgacggagaaaagtgtcgaagagaagctttccggaggttaggtaatggcgtgtcagatgacttaagctctgaggaagatggagaagctcgaacacagatgatactgctaagacgaagcgtcgagggcgcttcttctgacaatggctgtgaggtcaaaaatagaaagtcgatcctgtcccgtcatctgaacagtcaagtgaagaagaccacgacgaggtggtgtcacattgtgagagattcagactctttggctgagagtgagtttgaaagcgctgccttttctcaaggatctaggagtggcgtgtcaggggggtcgcgttccctgaacatgagccggagggattcggagtcaacgaggcatgacagtgagacagaggacatgctttgggacgatttattacatggcccagaatgcaggtcatccgtcaccagcgattccgaaggcgcacacgtgaacacgttgcacagcggtacgaaaagagatccgaaagaagacgttttccagcagaaccaccttttttggctgcaaaattctagcccatcttcagaccgagtcagtgccatcatttgggaagggaatgaatgtaaaaagatggacatgagcgtgttggagatttctggcattattatgtccagagtgaatgcctaccagcaaggagtcgggtatcagatgttgggaaatgtggtaacaatagggctcgctttcttcccatttttgcaccggctctttagagagaaaagcttggatcagctcaagagcatttcagcagaggaaatcttgacactcttctgcggcgctcccccagtgacgcctatcatagttctatccatcataaactttttcgagcgtctttgcctcacctggatgttcttttttatgatgtgtgtggctgaacggacgtacaagcaacggttcctgttcgctaagcttttctcacatattacctctgccaggaaggccaggaagtacgaaatcccgcacttccgactgaagaaggtcgagaatatcaagatctggctcagcctacgttcctacttgaagagaagaggcccccagaggtcagtggatgtcgtggtgtcctcagtgttcctgctcaccctgtcaattgcctttatatgttgcgcacaggtcctccagggccacaaaactttcttaaatgatgcttataactgggagttcctcatttgggaaacagcgctgctgctcttcctgttgcgcctggcatccctgggaagtgaaacaaataagaagtactcgaatgtgtctatattgctgaccgaacagattaatctgtatttaaagatggagaaaaagccaaataaaaaggagcaattaactttagtgaataacgtcctcaagttatcgactaagttactaaaagaattagacacgcctttccgtctgtacggcctcaccatgaaccctctgatttataatattactagggtagtcattctctctgccgtgtccggggtgattagtgacttgctcggtttcaatataaggctctggaagataaagtcctag

SEQ ID NO: 336834 - DNA, 2130 bp, Artificial Sequence
  derived and/or modified sequence
atggcttctaacgagagggacgctatctcttggtatcaaaagaaaataggcgcttatgaccagcagatctgggaaaaatccatcgaacaaacacagataaaaggcctgaaaaacaaaccaaagaaaatgggccacattaagcctgacctgatcgacgtggacttgattagggtgatcgccatcgtgctgtatctgatgatgcctatcgtgaatattagtgaagtcctaggcccactctgcctcatgctcctgatggggacggtgcactgtcaaatcgtttcgacacagatcacgaggccctcgggaaataatggtaatcggaggcgtcgcaagttgcgcaaaactgttaatggggacggttctagggagaacgggaataactcctccgacaaggtgaggggcatcgaaacattggaatctgtgcccatcatcggaggattctgggagaccatctttggcaaccgtatcaagagggtcaagctgatctcaaataaggggacagaaaccgataatgatccctcatgtgtccaccccatcattaagcgacgccaatgtcgaccagaaatccgcatgtggcaaaccagggaaaaggccaaattttcggacggggaaaagtgtcggcgtgaagcttttagaaggcttggaaacggggttagtgacgacctgagtagcgaagaggacggggaggctcgaacacagatgattctgctgcggcgatcagtcgaaggcgctagcagcgacaatgggtgtgaggtaaagaacaggaagtctatactatcccgacacctcaactcacaggtcaaaaagacgaccacaagatggtgccatatagtgcgagacagcgactcactcgccgagagtgagttcgagtccgccgctttctctcaaggctcacgttcaggagttagcggaggtagtcgttcacttaatatgtctaggcgggactctgagagtaccaggcatgattctgagaccgaagacatgctgtgggacgatcttctgcatggtcccgaatgtcggtcaagcgtaactagcgatagcgaaggggctcacgtgaacactctgcactctggaacaaaacgagaccccaaggaagatgtgtttcagcagaatcatttattttggttgcaaaattctagcccgtcaagtgatagagtctcagccatcatttgggagggaaatgaatgcaagaaaatggatatgagtgtccttgaaatttcaggcattattatgtctagggttaacgcctatcagcagggggtgggctatcagatgctgggtaacgtcgtcacaatcggcttggctttcttcccgtttcttcaccggctgtttcgggagaaatccttggatcagctgaagtccatcagtgccgaagaaatccttactctattctgtggagctccccctgtgacaccaatcattgtgcttagcatcatcaacttctttgagaggctctgcctcacgtggatgttttttttcatgatgtgcgtggctgagcgtacctacaaacaaagatttctgtttgctaaactgttctcccacatcacatctgctcgcaaggcaaggaagtatgagataccccacttccggttgaaaaaagtggaaaatatcaagatatggctttccctacggtcctaccttaaacgcaggggcccacaacgatcggtggatgtggtggtgtcttcagtgttcctgctgactctgtcaatagccttcatttgctgcgcgcaagtgctgcaaggccataagaccttcctgaatgacgcgtacaattgggaattcctgatttgggaaaccgctttgctgctgtttttactgcggttggcctccctgggaagtgagactaacaaaaagtacagcaacgtgagcattttgctgacagaacagatcaatctttacctgaagatggaaaagaagcccaacaaaaaagaacaacttacactcgtgaacaacgtgctgaagctatcaacgaagctgcttaaagaactggacacaccatttagactctacggcttaaccatgaatcctctcatctacaatatcacacgcgtggtaatcttgagcgctgtgtcaggtgttatttctgatcttctaggcttcaacataaggctgtggaaaatcaagtcgtag

SEQ ID NO: 336835 - DNA, 2130 bp, Artificial Sequence
  derived and/or modified sequence
atggcatcaaacgagcgtgacgccatatcatggtatcagaagaagatcggggcatacgatcagcagatctgggaaaagagcatcgagcagactcagatcaagggactgaaaaacaagcccaagaaaatgggtcacatcaagcctgatttgatcgacgtggacctcatcagagtgatcgcaatcgtcctgtacttgatgatgcccattgtcaatatttcggaggtcctggggcctttgtgcttgatgcttcttatgggtacagtccactgccaaattgtatcaacgcaaatcacgagacccagcggtaataacggaaatcgacgacgcagaaagttgcggaaaaccgtgaacggggacggttcaagagagaacggaaataatagttccgacaaggtgcgaggcattgaaaccctagagagcgtccccatcattgggggattttgggaaaccatcttcggaaaccgtattaagagggtgaagctaatctcaaacaagggaaccgagactgataatgaccccagctgcgttcacccaatcattaaaaggagacagtgtcgaccagagattagaatgtggcagacaagggaaaaagccaaatttagcgatggcgagaagtgtagacgggaagcattcaggcgcctggggaatggcgtgtccgacgacctgtcctctgaggaggacggggaggcgagaacacagatgatcctcctgcgtcgatctgtggagggagctagtagcgataatggctgtgaggtgaagaatcggaaatcaattttatcgagacacttaaactcacaagttaagaagacaaccaccagatggtgccacatcgtgcgtgacagtgacagtctcgcagagtctgagtttgagtctgccgcattcagccagggctctcggagtggggtatcaggaggctcacggtcactgaacatgtcaaggagggatagcgaatctacgcgacacgactcagagacggaagatatgctctgggatgacctgctgcatggccctgaatgcaggagcagtgtgacctcggattccgaaggggctcacgtgaacaccctgcactcaggaacaaaaagagatccaaaagaggatgttttccaacagaaccatctcttctggcttcagaatagcagtccgtcaagtgatagagtgtctgccatcatctgggaggggaacgaatgtaagaagatggatatgtccgtcctggagatatcagggattattatgtctcgcgtgaatgcatatcagcagggtgtggggtatcagatgctaggtaacgtcgttaccattggcctcgccttttttccattcctgcaccgtttatttagggaaaagtccctagaccaactcaagtcaatctcagccgaagagatactcactttattttgtggggctcccccagttactcccattattgtcctcagcatcatcaatttctttgagcggctttgtctgacttggatgttttttttcatgatgtgtgtggccgaacgcacctacaagcagcgctttctgtttgccaagttgtttagccacatcacctccgctcggaaagctcggaagtatgagatccctcattttaggttgaagaaagtggagaatatcaagatctggctttcactgaggagttatctcaagcgccgaggaccacaacgcagcgtggatgttgtggtcagctcagtgtttctgttgacactgtcaattgccttcatctgctgtgcccaagtattgcaagggcacaagactttcctcaacgacgcctacaactgggaattcctaatatgggaaactgcattgttactgttcctcttacgcctcgccagcctggggtcagagacaaataaaaagtattctaacgtgtccatcctactgactgagcagatcaatctttatctcaaaatggaaaagaagcccaacaaaaaggaacagcttaccctcgtgaacaatgtccttaaactgagcaccaaacttctcaaagagctggacacccctttcagactctacggactgacaatgaaccccctcatctacaacataactcgagtcgtcatactcagcgcggtgtctggcgtgattagcgaccttcttggtttcaacatacgtctgtggaagattaagtcctag

SEQ ID NO: 336836 - DNA, 2289 bp, Artificial Sequence
  derived and/or modified sequence
atggcctccaacgaaagagacgcaatatcatggtaccagaagaagattggtgcatacgaccagcagatttgggagaaatccattgaacaaacacagatcaaaggcctgaagaataagcccaaaaagatggggcatattaagccagatctcattgatgtggacctcatccgtggcagcactttcgcaaaggctaagcccgagattccctggacctcattaacaaggaagggcctggtgagagtggtgttcttccccttattcagcaattggtggattcaggtcacctccctccgcatcttcgtttggctgcttctcctgtatttcatgcaggtgattgctattgtgttgtatctgatgatgcctattgtgaacattagcgaagttctcggtccactttgcctcatgcttctgatgggaaccgtccattgtcagatagtttctacacagatcaccaggcccagcggcaacaatgggaacagaagaagaaggaaacttcgaaagactgtgaacggagatgggagcagagagaatggtaataactcttcagacaaagtgcgcggaatcgagactctcgaatcggtgcccattattggagggttttgggagacgatctttggaaaccggataaaacgggttaagttgatcagcaacaaaggcacagaaacagataacgatccctcatgtgttcacccaatcattaagcgcagacagtgtagaccagagataagaatgtggcagaccagggaaaaggctaaattcagcgacggagaaaaatgccgcagggaggcattccgaagactcggaaatggcgtcagcgatgatctgagctcagaggaagacggagaggccaggacccaaatgattttgctaagacggtccgtggaaggagcgtcatctgacaacggctgcgaggtaaaaaaccgcaagtcaattctctcccgacatctgaactcccaggtgaaaaagacaaccactcgctggtgccatatagtacgtgatagtgactccctggccgagagcgaatttgagtctgcagcattcagtcaggggtcgcgctcaggcgtgtcaggagggtccagatctctgaacatgagcagacgcgactccgagagcacgcgtcacgactcagaaacggaggacatgttatgggacgacttactgcatggccctgagtgccgcagttccgtgacttccgatagcgagggcgctcatgtcaacacgttgcactctggcacgaagcgggatccaaaagaggatgtttttcaacagaaccacctattctggcttcagaatagctcaccttcttccgaccgagtgagtgctatcatttgggaggggaacgaatgcaagaagatggatatgtccgtgctggaaatttccggcattatcatgagccgtgtcaacgcctatcagcaaggagttgggtaccagatgctgggtaatgtggtcactatcggactagcgttttttccgtttctgcatcggctcttccgtgagaagagcctcgaccaactaaagagtatctccgccgaagaaatcctcactttgttctgtggtgctcctcctgttaccccgatcattgtgttgagcattattaattttttcgaaagactgtgcctgacttggatgtttttcttcatgatgtgcgtggcggaacggacctacaaacagcgcttcctctttgccaagttgttttcacatattacgagtgctagaaaagcccgtaagtacgaaattccgcattttcggctgaagaaggtcgaaaatattaaaatttggctatctctgagatcctatcttaaaaggcgcggacctcagagaagtgtcgatgtcgttgtttcatcagtttttctgttaacactatcaatcgccttcatatgctgcgcacaggtgctgcagggccacaagacatttctcaacgacgcctataattgggagttcctcatctgggagactgcgctgctcctgtttctgctccggctggcttctcttggtagcgaaacgaacaagaagtactcaaatgtgtctatcttactcactgagcagatcaatttgtacttgaaaatggaaaagaagcctaataagaaggagcaactcaccctcgtcaacaacgtgcttaagctgtctacaaaattgctcaaagaacttgacacaccatttagactttacggcctcacgatgaaccctctgatttacaatattacacgagtcgttattttgtctgccgtgagtggagtcatctccgacctcctcggattcaatattcggttgtggaaaatcaaatcttag

SEQ ID NO: 336837 - DNA, 2289 bp, Artificial Sequence
  derived and/or modified sequence
atggctagcaatgaacgcgatgcaatttcctggtatcagaagaagataggagcatatgatcagcagatttgggagaagtctattgaacaaacacagatcaagggcttgaagaacaaacccaagaaaatgggtcacatcaagccggacctgattgatgtggacctgatcagggggtctacgttcgccaaagccaagcctgaaatcccatggactagtctgactaggaagggattggtgagggttgtgttctttccactgttcagcaactggtggatccaggttacttcgcttaggatcttcgtgtggttgctgctcctatactttatgcaggtaatagcaattgtcctgtacttgatgatgccaattgtgaacattagcgaggttctcggaccactctgcctcatgctgctcatgggcaccgtgcattgccagattgtgtcgacacagattacacgtccctccgggaacaacggcaatcgcaggaggcggaaactcagaaaaaccgtaaatggagatggcagtcgcgagaacgggaataacagttccgacaaggtccgcggaattgaaacactggagtcggtgccaattataggcggattctgggagacaattttcgggaatcgcatcaagcgcgtgaaattaatttctaacaaaggaaccgagactgataatgacccttcttgtgtgcatcccatcatcaagaggcggcaatgccgacccgagatacgcatgtggcagacgagggagaaagcaaagttctcagacggagaaaagtgtaggagagaggcatttcgacgattaggtaacggggtgagcgacgatctcagctccgaagaagacggggaggccaggacccaaatgattctcctaagaagaagcgttgagggtgcctcgtctgacaacggctgtgaggtgaaaaaccgcaaaagtatcctgagcagacaccttaatagccaagtgaaaaaaactaccaccaggtggtgtcacattgtccgcgattccgattcacttgccgaaagtgagttcgaaagtgctgctttctcacagggcagtagatcgggcgtgagcggcggaagccgctcattgaatatgtcccgcagggatagcgaatcgacaaggcatgactctgagaccgaggacatgctgtgggacgatctcctccatgggcctgagtgtcggtccagtgtgacaagcgattccgagggtgcccacgtcaacaccctgcattcgggaaccaaaagggatcccaaggaagatgtgttccagcagaatcatctcttttggctccagaatagcagcccctcatccgatagggtctctgcaatcatctgggaaggtaacgagtgcaaaaaaatggacatgtctgtgttagaaattagtggaatcattatgagcagggttaacgcctaccagcagggagtaggttatcagatgttgggaaatgtcgtgacgatcggtcttgccttcttcccgttcctgcacaggctttttagagagaagtcgctcgaccagctgaagtcgattagtgcagaggaaatcttgaccctgttctgcggcgcacctccagtaacaccaataatagtgctctccattattaattttttcgaaaggctgtgcttgacctggatgttttttttcatgatgtgtgtagccgagcgcacatataagcagagatttcttttcgcaaaactgtttagtcacatcacatcagcccgtaaggctcggaagtatgagataccgcactttcgtctgaaaaaggttgaaaacattaaaatctggctgtcattgaggtcctatctgaagcgccgaggtcctcaaagatctgtggatgtagttgtaagctcagtatttctgctgacactgtcaatcgcctttatctgttgcgcacaggtactccagggccataagacttttctcaatgatgcatacaattgggaatttctgatttgggaaactgcgttattgctgtttctgctgcgcctggcatccctgggatctgagacaaataaaaaatattctaacgtctccattctgctcaccgagcagattaacctctacctgaagatggagaagaaacctaacaagaaagagcagctgacgctagtgaataacgtgcttaagctgtcaactaagctgctaaaggaattggacacacctttcagactttacggtctaactatgaatcccctcatttacaacattaccagggtggtgatcctgtccgctgtgagcggagtgatttcagatctgctcggctttaatattcggctgtggaagatcaaatcctag

SEQ ID NO: 336838 - DNA, 3085 bp, Artificial Sequence
  derived and/or modified sequence
ctctccggcgtctccgcctggaggggaagatgcggcctgcctggcccgccgcctcgcccccggcctcacggtgggaccccgggcactgaggacggaggtcccgggcgccggcccgcggggcaacgggcactaggtgagagccggacgcgggcgagcgaaggaggcgggtgccgggcgactccagcggcggcccctgcccctcccccgcacccacgaacacgctcgcccgatatattgcagaggcttctccggtcgccgctgcgccagtttttttttgtttgtttgttgtgttttccctggcaaacagctggagaaagagcagctcatggagaggctgagagaagcggttttcgcgtcctacccaaactgggagagtaaccttcagcagctggactcaccgattggttttccttcattttcagtgaaatcccattctctggctggagacacagatggcctcaaatgagagagatgctatatcgtggtaccaaaagaagattggagcctacgatcagcagatatgggaaaagtcaatcgaacagactcagattaagggtttgaaaaacaaaccgaaaaagatgggccacataaagccagacttgattgacgttgacttaatcagagttatagcaattgtcttatatttgatgatgcctattgtgaacataagtgaagtacttggacccttgtgccttatgctactcatgggaactgtccactgtcaaattgtgtctactcagataacaagaccatcaggaaacaatggaaatcgaagaagaagaaaattacgaaaaactgtaaatggtgatgggagccgagaaaatggaaataactcctctgataaagtcagaggaatagaaactttggaatctgtacccattattggtggtttttgggagactatctttggcaacaggattaaaagagtaaaattaatatctaacaaagggactgaaactgacaatgacccaagttgtgtccatcctatcattaagaggagacaatgtcgaccagagattagaatgtggcaaacaagagagaaagcaaaattttcagatggagaaaagtgccgtagggaggcttttaggcgtttgggtaatggggtgtctgatgacctgtcaagtgaagaagatggtgaagcacggacacagatgatattattgcgtaggagtgtggaaggggcctcaagtgacaatggttgtgaagttaagaatagaaaatcaatactttcaaggcacctaaactctcaggtaaagaaaaccactacaaggtggtgtcatattgtgcgggattcagatagtctggctgaatcagaatttgaatcagcagccttcagccagggctctagatcgggtgtgagtggtggctctcgaagcctcaacatgtcaagaagagactcagaaagcacccgccatgactcggagactgaggacatgttatgggacgacctgctacatggcccagagtgccggtcatctgtcaccagtgacagtgagggggcccatgtgaatacccttcactcagggaccaaacgtgaccccaaagaggatgtttttcagcagaatcatttattctggcttcagaattcaagtccttcctctgatcgagttagtgcaataatctgggaggggaatgagtgcaaaaagatggatatgtctgtgttggaaataagtggcatcatcatgagcagggtcaatgcctatcagcaaggagtaggttatcagatgctgggaaatgttgtcactattggattagcattttttccattcttacatcgacttttccgtgagaagagccttgaccaactaaagtccatttcagctgaggagatcttgactctcttttgtggggcaccacctgttacacctattattgttttgtcgataattaatttttttgaaagattgtgtcttacttggatgttttttttcatgatgtgtgtggcagagagaacatataaacagagatttttatttgcaaaactcttcagccatattacttctgccaggaaagctaggaaatatgaaatacctcatttcagacttaagaaggtggagaatattaaaatatggttatcactgcgttcctatctaaagagacgggggccacagcgttcagttgatgtggttgtatcctcggttttcctactgacactttcgattgctttcatttgttgtgctcaggttctccaaggacataaaactttcctgaatgatgcttataactgggagtttttgatctgggaaacagctttactactttttttattgcgtctggcctcactggggtctgaaaccaataagaaatacagcaatgtttcaatattacttacagaacagattaatttatatcttaagatggaaaaaaagccaaataagaaagaacagcttactctagtaaacaatgtattaaagctgtccaccaagttgttgaaagagctggacacaccatttagactctatggactgacaatgaatcccttaatctacaatatcacaagagtagttatcctttctgctgtctcaggtgttataagtgatcttctaggatttaatataagactgtggaaaattaaatcataagctgagtaaatgcctggactctcccctggctggtatcaaaacttacctatcaaggaaagtgatgactgcagaaaccagtgagatacccacctgcttgttcacatgcacaggtgctctcagctctgccaaagcgaatgaatggtgtttccggaggagcaagtccttttccaactgggtgtgcatgctaaaaacctgtattttcatgcttttcaaacaacatgaatagtcagctgactaaagactgtgtgtgttgtggtaacacaaagacaattttgtaagtttgcgcttcagtactgtgacagttatgtttactggacatagtcttttgggcaactatgatagatgcccaaagcatgaagcaaatatcttttattggaaatatgcaaattcaatacttttccattatagtctatagaactggagatttcatttctctatcaaagagagatcaagcgaactattttaggttaaatccgaataaaagaactttactggagactttc

SEQ ID NO: 336839 - DNA, 3075 bp, Artificial Sequence
  derived and/or modified sequence
gctgccgccgcctcctcctcccgggctcccgggctctcggggtccggggcctttgcacctgtcttttccagctgggcacaaagccttttgctgtcgccgtggcgactggaggccttcacttttaatccccctcattttccagttcattctctgcttattttctggtcagtccgtgaccctgtaggcggcctctgaccggcgatcgatttgccgccctcagggcgctgggcggccggctgcctccgaagctggggcggcctccgcggtctccatggtaacggcctctccggcgtctccgcctggaggggaagatgcggcctgcctggcccgccgcctcgcccccggcctcacggtgggaccccgggcactgaggacggaggtcccgggcgccggcccgcggggcaacgggcactagtgaaatcccattctctggctggagacacagatggcctcaaatgagagagatgctatatcgtggtaccaaaagaagattggagcctacgatcagcagatatgggaaaagtcaatcgaacagactcagattaagggtttgaaaaacaaaccgaaaaagatgggccacataaagccagacttgattgacgttgacttaatcagagttatagcaattgtcttatatttgatgatgcctattgtgaacataagtgaagtacttggacccttgtgccttatgctactcatgggaactgtccactgtcaaattgtgtctactcagataacaagaccatcaggaaacaatggaaatcgaagaagaagaaaattacgaaaaactgtaaatggtgatgggagccgagaaaatggaaataactcctctgataaagtcagaggaatagaaactttggaatctgtacccattattggtggtttttgggagactatctttggcaacaggattaaaagagtaaaattaatatctaacaaagggactgaaactgacaatgacccaagttgtgtccatcctatcattaagaggagacaatgtcgaccagagattagaatgtggcaaacaagagagaaagcaaaattttcagatggagaaaagtgccgtagggaggcttttaggcgtttgggtaatggggtgtctgatgacctgtcaagtgaagaagatggtgaagcacggacacagatgatattattgcgtaggagtgtggaaggggcctcaagtgacaatggttgtgaagttaagaatagaaaatcaatactttcaaggcacctaaactctcaggtaaagaaaaccactacaaggtggtgtcatattgtgcgggattcagatagtctggctgaatcagaatttgaatcagcagccttcagccagggctctagatcgggtgtgagtggtggctctcgaagcctcaacatgtcaagaagagactcagaaagcacccgccatgactcggagactgaggacatgttatgggacgacctgctacatggcccagagtgccggtcatctgtcaccagtgacagtgagggggcccatgtgaatacccttcactcagggaccaaacgtgaccccaaagaggatgtttttcagcagaatcatttattctggcttcagaattcaagtccttcctctgatcgagttagtgcaataatctgggaggggaatgagtgcaaaaagatggatatgtctgtgttggaaataagtggcatcatcatgagcagggtcaatgcctatcagcaaggagtaggttatcagatgctgggaaatgttgtcactattggattagcattttttccattcttacatcgacttttccgtgagaagagccttgaccaactaaagtccatttcagctgaggagatcttgactctcttttgtggggcaccacctgttacacctattattgttttgtcgataattaatttttttgaaagattgtgtcttacttggatgttttttttcatgatgtgtgtggcagagagaacatataaacagagatttttatttgcaaaactcttcagccatattacttctgccaggaaagctaggaaatatgaaatacctcatttcagacttaagaaggtggagaatattaaaatatggttatcactgcgttcctatctaaagagacgggggccacagcgttcagttgatgtggttgtatcctcggttttcctactgacactttcgattgctttcatttgttgtgctcaggttctccaaggacataaaactttcctgaatgatgcttataactgggagtttttgatctgggaaacagctttactactttttttattgcgtctggcctcactggggtctgaaaccaataagaaatacagcaatgtttcaatattacttacagaacagattaatttatatcttaagatggaaaaaaagccaaataagaaagaacagcttactctagtaaacaatgtattaaagctgtccaccaagttgttgaaagagctggacacaccatttagactctatggactgacaatgaatcccttaatctacaatatcacaagagtagttatcctttctgctgtctcaggtgttataagtgatcttctaggatttaatataagactgtggaaaattaaatcataagctgagtaaatgcctggactctcccctggctggtatcaaaacttacctatcaaggaaagtgatgactgcagaaaccagtgagatacccacctgcttgttcacatgcacaggtgctctcagctctgccaaagcgaatgaatggtgtttccggaggagcaagtccttttccaactgggtgtgcatgctaaaaacctgtattttcatgcttttcaaacaacatgaatagtcagctgactaaagactgtgtgtgttgtggtaacacaaagacaattttgtaagtttgcgcttcagtactgtgacagttatgtttactggacatagtcttttgggcaactatgatagatgcccaaagcatgaagcaaatatcttttattggaaatatgcaaattcaatacttttccattatagtctatagaactggagatttcatttctctatcaaagagagatcaagcgaactattttaggttaaatccgaataaaagaactttactggagact

SEQ ID NO: 336840 - DNA, 3273 bp, Artificial Sequence
  derived and/or modified sequence
gtcactgcatcccggcgcggcccgcagaagacgagcgccgctgccgccgcctcctcctcccgggctcccgggctctcggggtccggggcctttgcacctgtcttttccagctgggcacaaagccttttgctgtcgccgtggcgactggaggccttcacttttaatccccctcattttccagttcattctctgcttattttctggtcagtccgtgaccctgtaggcggcctctgaccggcgatcgatttgccgccctcagggcgctgggcggccggctgcctccgaagctggggcggcctccgcggtctccatggtaacggcctctccggcgtctccgcctggaggggaagatgcggcctgcctggcccgccgcctcgcccccggcctcacggtgggaccccgggcactgaggacggaggtcccgggcgccggcccgcggggcaacgggcactagtgaaatcccattctctggctggagacacagatggcctcaaatgagagagatgctatatcgtggtaccaaaagaagattggagcctacgatcagcagatatgggaaaagtcaatcgaacagactcagattaagggtttgaaaaacaaaccgaaaaagatgggccacataaagccagacttgattgacgttgacttaatcagagggtcaacatttgccaaagcaaaacctgaaattccatggacatctctgactcggaaggggcttgttcgagttgtattttttccattgttcagcaattggtggattcaggttacctctttaagaatctttgtttggctgttactactttatttcatgcaagttatagcaattgtcttatatttgatgatgcctattgtgaacataagtgaagtacttggacccttgtgccttatgctactcatgggaactgtccactgtcaaattgtgtctactcagataacaagaccatcaggaaacaatggaaatcgaagaagaagaaaattacgaaaaactgtaaatggtgatgggagccgagaaaatggaaataactcctctgataaagtcagaggaatagaaactttggaatctgtacccattattggtggtttttgggagactatctttggcaacaggattaaaagagtaaaattaatatctaacaaagggactgaaactgacaatgacccaagttgtgtccatcctatcattaagaggagacaatgtcgaccagagattagaatgtggcaaacaagagagaaagcaaaattttcagatggagaaaagtgccgtagggaggcttttaggcgtttgggtaatggggtgtctgatgacctgtcaagtgaagaagatggtgaagcacggacacagatgatattattgcgtaggagtgtggaaggggcctcaagtgacaatggttgtgaagttaagaatagaaaatcaatactttcaaggcacctaaactctcaggtaaagaaaaccactacaaggtggtgtcatattgtgcgggattcagatagtctggctgaatcagaatttgaatcagcagccttcagccagggctctagatcgggtgtgagtggtggctctcgaagcctcaacatgtcaagaagagactcagaaagcacccgccatgactcggagactgaggacatgttatgggacgacctgctacatggcccagagtgccggtcatctgtcaccagtgacagtgagggggcccatgtgaatacccttcactcagggaccaaacgtgaccccaaagaggatgtttttcagcagaatcatttattctggcttcagaattcaagtccttcctctgatcgagttagtgcaataatctgggaggggaatgagtgcaaaaagatggatatgtctgtgttggaaataagtggcatcatcatgagcagggtcaatgcctatcagcaaggagtaggttatcagatgctgggaaatgttgtcactattggattagcattttttccattcttacatcgacttttccgtgagaagagccttgaccaactaaagtccatttcagctgaggagatcttgactctcttttgtggggcaccacctgttacacctattattgttttgtcgataattaatttttttgaaagattgtgtcttacttggatgttttttttcatgatgtgtgtggcagagagaacatataaacagagatttttatttgcaaaactcttcagccatattacttctgccaggaaagctaggaaatatgaaatacctcatttcagacttaagaaggtggagaatattaaaatatggttatcactgcgttcctatctaaagagacgggggccacagcgttcagttgatgtggttgtatcctcggttttcctactgacactttcgattgctttcatttgttgtgctcaggttctccaaggacataaaactttcctgaatgatgcttataactgggagtttttgatctgggaaacagctttactactttttttattgcgtctggcctcactggggtctgaaaccaataagaaatacagcaatgtttcaatattacttacagaacagattaatttatatcttaagatggaaaaaaagccaaataagaaagaacagcttactctagtaaacaatgtattaaagctgtccaccaagttgttgaaagagctggacacaccatttagactctatggactgacaatgaatcccttaatctacaatatcacaagagtagttatcctttctgctgtctcaggtgttataagtgatcttctaggatttaatataagactgtggaaaattaaatcataagctgagtaaatgcctggactctcccctggctggtatcaaaacttacctatcaaggaaagtgatgactgcagaaaccagtgagatacccacctgcttgttcacatgcacaggtgctctcagctctgccaaagcgaatgaatggtgtttccggaggagcaagtccttttccaactgggtgtgcatgctaaaaacctgtattttcatgcttttcaaacaacatgaatagtcagctgactaaagactgtgtgtgttgtggtaacacaaagacaattttgtaagtttgcgcttcagtactgtgacagttatgtttactggacatagtcttttgggcaactatgatagatgcccaaagcatgaagcaaatatcttttattggaaatatgcaaattcaatacttttccattatagtctatagaactggagatttcatttctctatcaaagagagatcaagcgaactattttaggttaaatccgaataaaagaactttactggagact

SEQ ID NO: 336841 - DNA, 2130 bp, Artificial Sequence
  derived and/or modified sequence
atggccagcaacgagagagacgccatcagctggtaccagaagaagatcggcgcctacgaccagcagatctgggagaagagcatcgagcagacccagatcaagggcctgaagaacaagcccaagaagatgggccacatcaagcccgacctgatcgacgtggacctgatcagagtgatcgccatcgtgctgtacctgatgatgcccatcgtgaacatcagcgaggtgctgggccccctgtgcctgatgctgctgatgggcaccgtgcactgccagatcgtgagcacccagatcaccagacccagcggcaacaacggcaacagaagaagaagaaagctgagaaagaccgtgaacggcgacggcagcagagagaacggcaacaacagcagcgacaaggtgagaggcatcgagaccctggagagcgtgcccatcatcggcggcttctgggagaccatcttcggcaacagaatcaagagagtgaagctgatcagcaacaagggcaccgagaccgacaacgaccccagctgcgtgcaccccatcatcaagagaagacagtgcagacccgagatcagaatgtggcagaccagagagaaggccaagttcagcgacggcgagaagtgcagaagagaggccttcagaagactgggcaacggcgtgagcgacgacctgagcagcgaggaggacggcgaggccagaacccagatgatcctgctgagaagaagcgtggagggcgccagcagcgacaacggctgcgaggtgaagaacagaaagagcatcctgagcagacacctgaacagccaggtgaagaagaccaccaccagatggtgccacatcgtgagagacagcgacagcctggccgagagcgagttcgagagcgccgccttcagccagggcagcagaagcggcgtgagcggcggcagcagaagcctgaacatgagcagaagagacagcgagagcaccagacacgacagcgagaccgaggacatgctgtgggacgacctgctgcacggccccgagtgcagaagcagcgtgaccagcgacagcgagggcgcccacgtgaacaccctgcacagcggcaccaagagagaccccaaggaggacgtgttccagcagaaccacctgttctggctgcagaacagcagccccagcagcgacagagtgagcgccatcatctgggagggcaacgagtgcaagaagatggacatgagcgtgctggagatcagcggcatcatcatgagcagagtgaacgcctaccagcagggcgtgggctaccagatgctgggcaacgtggtgaccatcggcctggccttcttccccttcctgcacagactgttcagagagaagagcctggaccagctgaagagcatcagcgccgaggagatcctgaccctgttctgcggcgccccccccgtgacccccatcatcgtgctgagcatcatcaacttcttcgagagactgtgcctgacctggatgttcttcttcatgatgtgcgtggccgagagaacctacaagcagagattcctgttcgccaagctgttcagccacatcaccagcgccagaaaggccagaaagtacgagatcccccacttcagactgaagaaggtggagaacatcaagatctggctgagcctgagaagctacctgaagagaagaggcccccagagaagcgtggacgtggtggtgagcagcgtgttcctgctgaccctgagcatcgccttcatctgctgcgcccaggtgctgcagggccacaagaccttcctgaacgacgcctacaactgggagttcctgatctgggagaccgccctgctgctgttcctgctgagactggccagcctgggcagcgagaccaacaagaagtacagcaacgtgagcatcctgctgaccgagcagatcaacctgtacctgaagatggagaagaagcccaacaagaaggagcagctgaccctggtgaacaacgtgctgaagctgagcaccaagctgctgaaggagctggacacccccttcagactgtacggcctgaccatgaaccccctgatctacaacatcaccagagtggtgatcctgagcgccgtgagcggcgtgatcagcgacctgctgggcttcaacatcagactgtggaagatcaagagctag

SEQ ID NO: 336842 - DNA, 2289 bp, Artificial Sequence
  derived and/or modified sequence
atggccagcaacgagagagacgccatcagctggtaccagaagaagatcggcgcctacgaccagcagatctgggagaagagcatcgagcagacccagatcaagggcctgaagaacaagcccaagaagatgggccacatcaagcccgacctgatcgacgtggacctgatcagaggcagcaccttcgccaaggccaagcccgagatcccctggaccagcctgaccagaaagggcctggtgagagtggtgttcttccccctgttcagcaactggtggatccaggtgaccagcctgagaatcttcgtgtggctgctgctgctgtacttcatgcaggtgatcgccatcgtgctgtacctgatgatgcccatcgtgaacatcagcgaggtgctgggccccctgtgcctgatgctgctgatgggcaccgtgcactgccagatcgtgagcacccagatcaccagacccagcggcaacaacggcaacagaagaagaagaaagctgagaaagaccgtgaacggcgacggcagcagagagaacggcaacaacagcagcgacaaggtgagaggcatcgagaccctggagagcgtgcccatcatcggcggcttctgggagaccatcttcggcaacagaatcaagagagtgaagctgatcagcaacaagggcaccgagaccgacaacgaccccagctgcgtgcaccccatcatcaagagaagacagtgcagacccgagatcagaatgtggcagaccagagagaaggccaagttcagcgacggcgagaagtgcagaagagaggccttcagaagactgggcaacggcgtgagcgacgacctgagcagcgaggaggacggcgaggccagaacccagatgatcctgctgagaagaagcgtggagggcgccagcagcgacaacggctgcgaggtgaagaacagaaagagcatcctgagcagacacctgaacagccaggtgaagaagaccaccaccagatggtgccacatcgtgagagacagcgacagcctggccgagagcgagttcgagagcgccgccttcagccagggcagcagaagcggcgtgagcggcggcagcagaagcctgaacatgagcagaagagacagcgagagcaccagacacgacagcgagaccgaggacatgctgtgggacgacctgctgcacggccccgagtgcagaagcagcgtgaccagcgacagcgagggcgcccacgtgaacaccctgcacagcggcaccaagagagaccccaaggaggacgtgttccagcagaaccacctgttctggctgcagaacagcagccccagcagcgacagagtgagcgccatcatctgggagggcaacgagtgcaagaagatggacatgagcgtgctggagatcagcggcatcatcatgagcagagtgaacgcctaccagcagggcgtgggctaccagatgctgggcaacgtggtgaccatcggcctggccttcttccccttcctgcacagactgttcagagagaagagcctggaccagctgaagagcatcagcgccgaggagatcctgaccctgttctgcggcgccccccccgtgacccccatcatcgtgctgagcatcatcaacttcttcgagagactgtgcctgacctggatgttcttcttcatgatgtgcgtggccgagagaacctacaagcagagattcctgttcgccaagctgttcagccacatcaccagcgccagaaaggccagaaagtacgagatcccccacttcagactgaagaaggtggagaacatcaagatctggctgagcctgagaagctacctgaagagaagaggcccccagagaagcgtggacgtggtggtgagcagcgtgttcctgctgaccctgagcatcgccttcatctgctgcgcccaggtgctgcagggccacaagaccttcctgaacgacgcctacaactgggagttcctgatctgggagaccgccctgctgctgttcctgctgagactggccagcctgggcagcgagaccaacaagaagtacagcaacgtgagcatcctgctgaccgagcagatcaacctgtacctgaagatggagaagaagcccaacaagaaggagcagctgaccctggtgaacaacgtgctgaagctgagcaccaagctgctgaaggagctggacacccccttcagactgtacggcctgaccatgaaccccctgatctacaacatcaccagagtggtgatcctgagcgccgtgagcggcgtgatcagcgacctgctgggcttcaacatcagactgtggaagatcaagagctag

SEQ ID NO: 336843 - protein, 717 aa, Artificial Sequence
  derived and/or modified sequence
MASNERDAISWYQKKIGAYDQQIWEKSIEQTQIKGLKNKPKKMGHIKPDLIDVDLIRGSTFAKAKPEIPWTSLTRKGLVRVVFFPLFSNWWIQVTSLRIFVWLLLLYFMQVIAIVLYLMMPIVNISEVLGPLCLMLLMGTVHCQIVSTQITRPSGNNGNRRRRIKRVKLISNKGTETDNDPSCVHPIIKRRQCRPEIRMWQTREKAKFSDGEKCRREAFRRLGNGVSDDLSSEEDGEARTQMILLRRSVEGASSDNGCEVKNRKSILSRHLNSQVKKTTTRWCHIVRDSDSLAESEFESAAFSQGSRSGVSGGSRSLNMSRRDSESTRHDSETEDMLWDDLLHGPECRSSVTSDSEGAHVNTLHSGTKRDPKEDVFQQNHLFWLQNSSPSSDRVSAIIWEGNECKKMDMSVLEISGIIMSRVNAYQQGVGYQMLGNVVTIGLAFFPFLHRLFREKSLDQLKSISAEEILTLFCGAPPVTPIIVLSIINFFERLCLTWMFFFMMCVAERTYKQRFLFAKLFSHITSARKARKYEIPHFRLKKVENIKIWLSLRSYLKRRGPQRSVDVVVSSVFLLTLSIAFICCAQVLQGHKTFLNDAYNWEFLIWETALLLFLLRLASLGSETNKKYSNVSILLTEQINLYLKMEKKPNKKEQLTLVNNVLKLSTKLLKELDTPFRLYGLTMNPLIYNITRVVILSAVSGVISDLLGFNIRIWKHSS

SEQ ID NO: 336844 - protein, 717 aa, Artificial Sequence
  derived and/or modified sequence
MASNERDAISWYQKKIGAYDQQIWEKSIEQTQIKGLKNKPKKMGHIKPDLIDVDLIRGSTFAKAKPEIPWTSLTRKGLVRVVFFPLFSNWWIQVTSLRIFVWLLLLYFMQVIAIVLYLMMPIVNISEVLGPLCLMLLMGTVHCQIVSTQITRPSGNNGNRRRRIKRVKLISNKGTETDNDPSCVHPIIKRRQCRPEIRMWQTREKAKFSDGEKCRREAFRRLGNGVSDDLSSEEDGEARTQMILLRRSVEGASSDNGCEVKNRKSILSRHLNSQVKKTTTRWCHIVRDSDSLAESEFESAAFSQGSRSGVSGGSRSLNMSRRDSESTRHDSETEDMLWDDLLHGPECRSSVTSDSEGAHVNTLHSGTKRDPKEDVFQQNHLFWLQNSSPSSDRVSAIIWEGNECKKMDMSVLEISGIIMSRVNAYQQGVGYQMLGNVVTIGLAFFPFLHRLFREKSLDQLKSISAEEILTLFCGAPPVTPIIVLSIINFFERLCLTWMFFFMMCVAERTYKQRFLFAKLFSHITSARKARKYEIPHFRLKKVENIKIWLSLRSYLKRRGPQRSVDVVVSSVFLLTLSIAFICCAQVLQGHKTFLNDAYNWEFLIWETALLLFLLRLASLGSETNKKYSNVSILLTEQINLYLKMEKKPNKKEQLTLVNNVLKLSTKLLKELDTPFRLYGLTMNPLIYNITRVVILSAVSGVISDLLGFNIRLWKIKS

SEQ ID NO: 336845 - protein, 331 aa, Artificial Sequence
  derived and/or modified sequence
  misc_feature (1)..(1): Xaa can be any naturally occurring amino acid
XQTREKAKFSDGEKCRREAFRRLGNGVSDDLSSEEDGEARTQMILLRRSVEGASSDNGCEVKNRKSILSRHLNSQVKKTTTRWCHIVRDSDSLAESEFESAAFSQGSRSGVSGGSRSLNMSRRDSESTRHDSETEDMLWDDLLHGPECRSSVTSDSEGAHVNTLHSGTKRDPKEDVFQQNHLFWLQNSSPSSDRVSAIIWEGNECKKMDMSVLEISGIIMSRVNAYQQGVGYQMLGNVVTIGLAFFPFLHRLFREKSLDQLKSISAEEILTLFCGAPPVTPIIVLSIINFFERLCLTWMFFFMMCVAERTYKQVSGEIRKIFYLFLYMIFH

SEQ ID NO: 336846 - protein, 105 aa, Artificial Sequence
  derived and/or modified sequence
MASNERDAISWYQKKIGAYDQQIWEKSIEQTQIKGLKNKPKKMGHIKPDLIDVDLIRGSTFAKAKPEIPWTSLTRKGLVRVVFFPLFSNWWIQVTSLRIFVWLLL

SEQ ID NO: 336847 - DNA, 2154 bp, Artificial Sequence
  derived and/or modified sequence
atggcctctaatgagcgagatgctatctcctggtaccagaaaaaaataggcgcctatgatcagcaaatttgggagaagagcatcgaacagactcagattaagggactgaaaaacaagccaaagaagatgggacatattaagccagacttgattgatgtggatctaattagaggctccacattcgctaaagcaaagcctgagataccatggacctctttgacaaggaagggactcgtgagagttgtcttcttcccactcttttctaattggtggattcaggtcacatcattaaggatcttcgtctggctgttactgctgtacttcatgcaggtgatagcaatcgtcttgtatcttatgatgccaatcgtaaacatttccgaagtgctgggtcctctgtgcctgatgctgctgatgggtaccgtgcactgccaaattgtcagcacccaaattacgagaccttccggcaacaacggcaatcggaggcgacggataaagagagtaaaactaatctctaacaagggcaccgagactgacaacgatcctagctgtgtgcacccaattattaaacgcaggcagtgccggcctgaaatcaggatgtggcagactagggagaaggccaagttcagcgacggagagaaatgcaggcgcgaggccttcagacgcctagggaatggagtttccgatgatttatcttccgaggaagatggcgaggcacgcacccagatgattctcctaagaaggagcgtggagggagcaagttcagacaacggttgcgaagtgaagaaccgcaaaagcatactgtcgcgtcacctgaactctcaggtcaaaaaaacaaccactcgctggtgccacatcgtgcgtgactccgattctttggcagaatctgagtttgagagtgccgctttttcccagggctctaggtcaggtgtttccggggggtctcgttcactgaacatgtctagacgcgattctgaaagtacccggcatgatagcgaaactgaggatatgctgtgggatgatcttctgcacggccccgaatgcaggagttccgtcacttcggactctgagggtgctcacgtaaacactctgcatagcggcacaaaaagagatccaaaagaggatgttttccaacagaatcaccttttctggcttcagaactctagtcccagttctgaccgcgtgagcgccattatttgggagggtaacgagtgcaagaaaatggatatgtctgtcctcgaaatcagcggcataatcatgagcagagttaatgcttaccagcaaggagtcggctaccagatgttaggcaacgtggtcactataggcctagcattctttcctttcctccacaggctcttccgcgaaaagtccttggatcaactgaaaagtatttcagcagaggaaatactgactctgttttgtggagcccccccagttactccaatcattgttctcagtataatcaacttcttcgaacgcctctgtctgacctggatgttttttttcatgatgtgcgtagctgagcgcacttacaaacagcgtttcttatttgcaaagctgttcagtcacataacctcagcccgtaaggcgagaaagtacgagataccacattttcggctcaagaaagtggaaaacattaagatatggttgagcttacgcagctatcttaaacgtcgggggcctcaacgcagcgtggatgtggtggtgagcagtgtgttccttctcactctgtcaatcgctttcatttgctgtgcacaggtcctgcagggacataaaaccttcctcaatgacgcctataactgggagttccttatttgggagacggccctcctactcttcctactgaggctggctagcctcggttctgaaacgaataagaagtacagcaatgtcagcattctacttaccgagcagattaatctgtacctgaaaatggaaaagaagcccaataaaaaggaacagctaactttggtaaataacgtgctgaagcttagcacaaagctcctgaaagaactcgatactccctttcgactgtatggtctgactatgaatcccctcatttacaacattacgcgggtagtcatactgtccgcagtaagcggggtgatcagcgacctgctgggtttcaatattagaatttggaagcactccagctag

SEQ ID NO: 336848 - DNA, 2154 bp, Artificial Sequence
  derived and/or modified sequence
atggcttctaacgagcgcgatgccatcagctggtatcaaaaaaaaatcggggcatatgaccagcagatctgggaaaaaagcatcgagcagacccagatcaaaggcttgaagaataagcccaagaaaatggggcacattaagcctgatctgatcgacgtggacctgatcagaggttctaccttcgccaaagctaagcccgagatcccttggacttcccttaccaggaaggggctggtacgggtggtgtttttccccctgttcagcaactggtggattcaggtgacttctctgcggatctttgtttggctgttacttctctactttatgcaggtcatcgcaatcgtcctctatctgatgatgcctatcgtgaacataagtgaggtgctggggcccctctgtctcatgctgctgatgggtactgtgcactgtcaaatcgtgagtacacagataacaagaccgtcaggcaacaacggtaaccgacgccgtaggatcaagagagtgaagcttatcagtaacaagggaacagaaactgacaatgatccctcatgcgtccaccccatcattaagcgacggcagtgtagacctgagatccgcatgtggcagactcgggaaaaagcgaagtttagtgatggtgagaaatgcagaagagaagctttccgtaggcttggtaatggcgttagtgatgatctgagctctgaggaggacggcgaggctcggacacagatgattctgctgcgtaggagcgtcgaaggagcctcttcagataacggatgtgaggtgaaaaataggaagagcatactgagtcgccatcttaacagtcaggttaagaagactaccactcgatggtgtcacatagtgagggattctgacagcttggctgaatctgaatttgagtccgccgcattctcccagggatctaggagtggcgtgagcggcggaagccgctctcttaatatgtctaggcgcgactccgaatccacaaggcatgattctgagacagaggatatgttgtgggacgatctgctgcatggcccagagtgtcgctcctcggttacaagcgattccgagggtgcccacgtgaacactcttcattcaggcacaaagagggaccccaaggaggacgtgtttcagcagaaccacctattctggctgcagaacagttccccatcaagcgaccgggtgagtgcaatcatctgggaaggcaacgagtgtaagaagatggacatgtccgtactcgagatatcaggcattatcatgagcagggtgaacgcataccagcaaggcgtaggctaccagatgctcggtaatgtcgttacaattggccttgccttttttccattcctgcaccgactctttagagaaaagtccctcgatcaactgaagtctatcagcgctgaggagattctgactctattttgtggcgcaccacctgtcactcctatcatagtgctgtcgattatcaattttttcgaaaggctgtgcctgacttggatgttttttttcatgatgtgcgtggctgaaaggacatacaagcagcgctttctcttcgctaaactgttttcacatattactagtgcaagaaaggcccgcaagtatgaaatacctcatttccgccttaaaaaggttgagaacatcaaaatttggctgtccctgcgaagttatttgaagagaagaggtccgcaaaggtcagtcgacgtggtggtgagcagtgtttttctgctgaccctgtcgatcgcctttatttgttgcgcacaagtgttgcagggtcacaagacgttcctaaacgatgcctataactgggagtttctaatctgggagacggccctcctcctgtttctactgagactggcctcactgggaagtgagaccaacaaaaaatatagcaacgtgagtatcctgctcactgagcagatcaacctgtacctcaaaatggaaaagaagccaaataagaaggagcagctgacgcttgtgaacaacgtattaaagttgtcaacaaagcttctgaaagagctggatacaccattccggttatatgggctgacaatgaatcccctgatttacaacatcacaagggtggtcattttgagcgccgtcagcggggttatttcggatctgctggggttcaacatcaggctgtggaagataaaatcatag

SEQ ID NO: 336849 - DNA, 2154 bp, Artificial Sequence
  derived and/or modified sequence
atggccagcaatgaaagagatgccatctcctggtaccagaagaagatcggggcctatgaccagcagatctgggagaagagcattgagcagacccagatcaagggcctgaagaacaagcccaagaagatgggccacatcaagccagacctgattgatgtggacctgatccggggcagcacctttgccaaggccaagccagagatcccctggaccagcctgaccaggaagggcctggtgcgggtggtgttcttccccctcttcagcaactggtggatccaggtgaccagcctgcgcatctttgtgtggctgctgctgctgtacttcatgcaggtgattgccatcgtgctgtacctgatgatgcccatcgtgaacatcagcgaggtgctgggccccctgtgcctgatgctgctgatgggcaccgtgcactgccagatcgtgtccacccagatcacccggcccagcggcaacaatggaaacagaagaagacgcatcaagagggtgaagctgatcagcaacaagggcacagaaacagacaatgaccccagctgtgtgcaccccatcatcaagaggcggcagtgcaggcctgagatccgcatgtggcagacccgggagaaggccaagttcagtgatggagagaagtgcagaagagaggccttccggcggctgggcaatggagtgtctgatgacctgagcagcgaggaggatggagaggcccggacccagatgatcctgctgcggcgctctgtggagggcgccagcagtgacaatggctgtgaggtgaagaacaggaagagcatcctgagccgccacctgaacagccaggtgaagaagaccaccacccgctggtgccacatcgtgcgggacagcgacagcctggccgagagcgagtttgaatctgctgccttcagccagggcagccgcagcggcgtgtctgggggcagccgcagcctgaacatgagcagaagagacagcgagagcaccaggcatgattctgaaacagaggacatgctgtgggatgacctgctgcacggccctgagtgccgcagctctgtgaccagtgacagcgagggcgcccacgtgaacaccctgcacagcggcaccaagagggaccccaaggaggatgtgttccagcagaaccacctgttctggctgcagaacagcagccccagcagtgacagagtgtctgccatcatctgggagggcaatgaatgcaagaagatggacatgtctgtgctggagatcagcggcatcatcatgagccgggtgaatgcctaccagcagggcgtgggctaccagatgctgggcaatgtggtgaccatcggcctggccttcttccccttcctgcacaggctcttccgggagaagagcctggaccagctgaagagcatctctgctgaggagatcctgaccctcttctgtggggcccctcctgtgacccccatcatcgtgctgagcatcatcaacttctttgagcggctgtgcctgacctggatgttcttcttcatgatgtgtgtggccgagaggacctacaagcagcgcttcctgtttgccaagctgttcagccacatcaccagcgccaggaaggccaggaaatatgagatcccccacttccggctgaagaaggtggagaacatcaagatctggctgagcctgcggagctacctgaagagaagaggcccccagaggtctgtggatgtggtggtgagcagcgtcttcctgctgaccctgagcatcgccttcatctgctgtgcccaggtgctgcagggccacaagaccttcctgaatgatgcctacaactgggagttcctgatctgggagacagccctgctgctcttcctgctgcggctggccagcctgggcagcgagaccaacaagaagtacagcaatgtgtccatcctgctgacagagcagatcaacctgtacctgaagatggagaagaagcccaacaagaaggagcagctgaccctggtgaacaacgtgctgaagctgagcaccaagctgctgaaggagctggacacccccttccggctgtatggcctgaccatgaaccccctcatctacaacatcaccagggtggtgatcctgtctgctgtgtctggagtcatcagtgacctgctgggcttcaacatccgcatctggaagcacagcagctag

SEQ ID NO: 336850 - DNA, 2154 bp, Artificial Sequence
  derived and/or modified sequence
atggccagcaatgaaagagatgccatctcctggtaccagaagaagatcggggcctatgaccagcagatctgggagaagagcattgagcagacccagatcaagggcctgaagaacaagcccaagaagatgggccacatcaagccagacctgattgatgtggacctgatccggggcagcacctttgccaaggccaagccagagatcccctggaccagcctgaccaggaagggcctggtgcgggtggtgttcttccccctcttcagcaactggtggatccaggtgaccagcctgcgcatctttgtgtggctgctgctgctgtacttcatgcaggtgattgccatcgtgctgtacctgatgatgcccatcgtgaacatcagcgaggtgctgggccccctgtgcctgatgctgctgatgggcaccgtgcactgccagatcgtgtccacccagatcacccggcccagcggcaacaatggaaacagaagaagacgcatcaagagggtgaagctgatcagcaacaagggcacagaaacagacaatgaccccagctgtgtgcaccccatcatcaagaggcggcagtgcaggcctgagatccgcatgtggcagacccgggagaaggccaagttcagtgatggagagaagtgcagaagagaggccttccggcggctgggcaatggagtgtctgatgacctgagcagcgaggaggatggagaggcccggacccagatgatcctgctgcggcgctctgtggagggcgccagcagtgacaatggctgtgaggtgaagaacaggaagagcatcctgagccgccacctgaacagccaggtgaagaagaccaccacccgctggtgccacatcgtgcgggacagcgacagcctggccgagagcgagtttgaatctgctgccttcagccagggcagccgcagcggcgtgtctgggggcagccgcagcctgaacatgagcagaagagacagcgagagcaccaggcatgattctgaaacagaggacatgctgtgggatgacctgctgcacggccctgagtgccgcagctctgtgaccagtgacagcgagggcgcccacgtgaacaccctgcacagcggcaccaagagggaccccaaggaggatgtgttccagcagaaccacctgttctggctgcagaacagcagccccagcagtgacagagtgtctgccatcatctgggagggcaatgaatgcaagaagatggacatgtctgtgctggagatcagcggcatcatcatgagccgggtgaatgcctaccagcagggcgtgggctaccagatgctgggcaatgtggtgaccatcggcctggccttcttccccttcctgcacaggctcttccgggagaagagcctggaccagctgaagagcatctctgctgaggagatcctgaccctcttctgtggggcccctcctgtgacccccatcatcgtgctgagcatcatcaacttctttgagcggctgtgcctgacctggatgttcttcttcatgatgtgtgtggccgagaggacctacaagcagcgcttcctgtttgccaagctgttcagccacatcaccagcgccaggaaggccaggaaatatgagatcccccacttccggctgaagaaggtggagaacatcaagatctggctgagcctgcggagctacctgaagagaagaggcccccagaggtctgtggatgtggtggtgagcagcgtcttcctgctgaccctgagcatcgccttcatctgctgtgcccaggtgctgcagggccacaagaccttcctgaatgatgcctacaactgggagttcctgatctgggagacagccctgctgctcttcctgctgcggctggccagcctgggcagcgagaccaacaagaagtacagcaatgtgtccatcctgctgacagagcagatcaacctgtacctgaagatggagaagaagcccaacaagaaggagcagctgaccctggtgaacaacgtgctgaagctgagcaccaagctgctgaaggagctggacacccccttccggctgtatggcctgaccatgaaccccctcatctacaacatcaccagggtggtgatcctgtctgctgtgtctggagtcatcagtgacctgctgggcttcaacatccggctgtggaagatcaagagctag

SEQ ID NO: 336851 - DNA, 2154 bp, Artificial Sequence
  derived and/or modified sequence
atggccagcaacgagcgggacgccatcagctggtaccagaagaagattggcgcctatgatcagcagatctgggagaagagtattgagcaaacgcagataaagggcctcaagaataaaccgaagaaaatgggacacataaaacccgacctcattgacgtggacttaatcaggggttccacctttgccaaagctaaacccgagattccctggacttctctgactcgcaaaggcttggtacgcgtggtattcttcccattgttctccaactggtggattcaggtgaccagcctgcgtattttcgtctggctactgctcctgtacttcatgcaggtcattgcaatcgtgctatatctgatgatgccaatcgtcaatatcagcgaggtcctgggacccctctgcctgatgctgctgatgggcacagtccactgccaaattgtgagcactcagatcacgagacccagcggaaacaatggtaatagacggcggaggataaaacgcgtgaaactgataagcaacaaaggcaccgagacggataacgaccccagctgtgtgcaccccataatcaaacgacggcagtgccggcctgagatccgtatgtggcagaccagggagaaagccaagttttcagacggtgagaagtgtaggcgggaggcatttaggcgcctggggaacggcgtcagcgacgacctttctagtgaagaggacggagaggcaaggactcagatgattctcctgcgccggtctgttgaaggcgccagcagcgacaatgggtgcgaagtcaagaataggaaatccatactatctcgtcaccttaactctcaggtgaaaaaaaccacgacacgctggtgtcacatcgtgcgagattccgactcacttgctgagtctgagttcgagtccgcagccttttctcaaggatcacgcagcggggtgtcaggtggctccagatcccttaacatgtcacggagggattccgagagcactcgccatgacagtgaaacagaggacatgctttgggacgacctcttacatggccctgagtgtcggtcctcggtcacaagcgacagtgagggagcccacgtgaacacattgcacagcggaactaagcgagatcctaaggaggatgtctttcaacagaaccatctgttctggctacagaacagctcaccgagtagcgacagagtctccgccataatttgggaggggaatgagtgtaagaagatggatatgtcagttctcgagatctcaggcatcatcatgagtcgagtgaacgcgtaccagcagggtgtgggatatcagatgctcgggaatgttgtaactatcggcctggcctttttcccctttctccataggctcttccgggaaaaatcacttgatcagctcaagagcatctccgctgaagagatcctcactctattttgcggagctcctcctgtgacacctatcatagtgctttcaattatcaatttcttcgaacgcctgtgtcttacatggatgttttttttcatgatgtgtgtagctgagcggacatataaacagagatttttgttcgccaagttgtttagccacatcactagcgcccggaaggcacgtaaatacgagattccccatttccgtttaaaaaaagtggagaatattaagatttggttgtctttgaggtcttacctgaagaggcgcggaccccagcgcagtgtggacgtagttgtctcctccgtattcctgctgaccctgtccatcgctttcatatgctgtgcacaagtgttgcagggacacaagacgtttctcaatgacgcttacaattgggagtttctgatctgggaaactgctctgctgctatttctcctacgattggcgagcttgggatcagagaccaataagaaatacagcaatgtgtctatattgcttacagaacaaatcaacctttatctgaaaatggaaaaaaaaccaaataagaaagaacagctgactcttgtgaacaatgtcctgaagctctctacgaaactgctgaaagagttggacacacctttccggctttatgggttgaccatgaatcccctgatctacaatattaccagagtcgtgatcttgtcagccgtttctggtgtcatcagtgacctgctgggattcaacatcagaatctggaagcattcttcttag

SEQ ID NO: 336852 - DNA, 2154 bp, Artificial Sequence
  derived and/or modified sequence
atggccagcaacgagcgggacgccatcagctggtaccagaagaagatcggtgcgtatgaccagcagatttgggagaagagtattgagcagacacagatcaaaggtctaaaaaataagcctaaaaaaatggggcacatcaaacctgatctaattgatgtggacctgataaggggatcgaccttcgcaaaggctaagccagaaattccttggacatccttaactcgtaaagggcttgtgcgggtcgttttcttccccctgttttctaactggtggatccaggttacttctttacgaatctttgtgtggctgctccttctgtattttatgcaggtaatcgcaattgtcctttacttgatgatgcccattgttaacatatctgaggtcctggggcccctctgtctcatgctgttaatgggcacggttcactgccagatcgtctccacgcagattacccggcccagtgggaacaatgggaatcgcaggcgaagaatcaagagagtcaagctaatcagtaacaaaggcacagaaactgacaacgacccttcttgcgtgcatccaatcatcaagcggcgacagtgtaggcctgagataagaatgtggcagactcgagaaaaggccaagttctcggacggtgagaagtgtcgaagggaggcctttcgacgtcttgggaacggcgtcagtgacgacctgtcttcagaggaagatggtgaagcaaggacacaaatgattctgctgagaaggagcgtcgagggtgcctctagcgacaacggctgtgaggtaaaaaatcgcaaaagcatcctctctcgccaccttaactcccaggtcaagaaaaccacaactagatggtgtcacatcgtgagggacagcgacagtttagccgagtccgagtttgagtccgcggctttcagtcaggggtccaggtctggtgtgtcaggaggaagcagatcacttaatatgagtaggcgcgactcggaatctacgcgccacgattcggagaccgaggacatgttgtgggatgacttgcttcacggaccagagtgtcggtcatccgttaccagcgattctgagggggcccacgtgaataccctacatagtggcactaagagagatcccaaggaagatgtgtttcaacagaatcatctgttttggctgcaaaacagttcgccgtcaagtgatagggtgagcgctattatctgggaagggaatgaatgtaagaaaatggatatgagcgtgttagagatttccggtataatcatgtcccgggtaaatgcgtatcagcaaggcgtgggataccagatgttgggaaatgttgtgactataggccttgcatttttcccctttctgcataggctatttagggagaagagcctggatcagctcaagagtattagcgccgaagaaattcttactctcttctgtggggctcctccggtaactccgattatcgtgctctctattattaactttttcgaaagactgtgcctgacctggatgtttttcttcatgatgtgcgtggccgaaagaacctacaaacaaaggtttcttttcgccaagttatttagccacattacctcggcccgaaaagcaaggaaatatgaaattccacactttagactaaagaaagtggagaacatcaaaatctggctttcactgcgctcgtacctcaaaaggcgcggtccacagaggtcagtggacgtggtggtctcatcagtttttttgctgactctctccatcgcctttatctgttgtgcccaagtgctgcaaggacataagacctttctgaacgacgcttataactgggaatttttgatctgggagaccgctcttctcttattcctgttgagacttgccagcctgggttccgagaccaacaagaaatattccaatgttagtatcctgttgaccgagcagatcaacctctatttaaagatggagaaaaagccaaataagaaggagcagctcactctcgtcaacaacgtattgaagttgtccactaaactcttaaaggagcttgacaccccattccgcctgtacggcctgacaatgaatcccttgatatataacatcacacgggtggtcattctctccgcggtgagcggagtgatctcagacctactgggttttaacatccgcctgtggaaaatcaaaagctag

SEQ ID NO: 336853 - DNA, 2154 bp, Artificial Sequence
  derived and/or modified sequence
atggcctccaatgaacgggatgcaatctcttggtatcagaaaaagatcggggcttacgaccaacagatctgggagaaaagtattgaacagacccaaatcaagggtctgaaaaacaagcccaagaaaatgggccacatcaagcccgacctaatcgatgtggatctgattagaggctccacatttgctaaggctaagcctgaaatcccctggacctcattaacgcggaaaggcctggtgcgcgttgtattcttccccctgttctcaaactggtggatacaggtgaccagtctgaggatctttgtctggctgctccttctttatttcatgcaggttattgccattgtactctacctgatgatgcctattgtaaatattagcgaagttcttggtccgctctgcctgatgttgctgatgggcacagttcactgccagattgtgtctactcaaatcacccgcccatcaggtaacaatggcaatagacgaaggcgcataaagagggtcaaactgatctccaacaaaggcacggaaaccgacaacgatcccagttgtgtgcatcccattatcaagcgcagacagtgccgcccagagattcgcatgtggcaaacacgagagaaagccaaattcagcgacggggaaaagtgccgcagagaggcctttagacgcctgggcaatggggttagcgacgatttaagctcggaagaggatggagaggcacgaacccagatgatcctgctgagacgctccgtcgaaggcgctagcagtgataatgggtgtgaggttaagaatcgcaagtctatcctgtccagacacctgaattctcaggtgaaaaaaaccacaacacgttggtgtcacattgtaagagacagtgactctctcgcagaatccgaattcgagagtgcagccttctcccagggaagccgcagcggcgtatctggtggatcccgcagtttaaatatgtctcggagggatagcgaaagcacccgacacgacagcgaaactgaggacatgctgtgggacgatctgttgcacggccctgagtgcagaagttcagtaacgagcgactctgaaggtgcccacgtaaacaccctccacagtggtacaaagcgtgatcctaaggaggacgtcttccaacaaaatcatcttttctggttacaaaatagctccccttcctccgaccgggtatctgctattatttgggagggtaacgaatgtaagaaaatggatatgtccgtcctagagatctccgggataattatgtcgagggtgaacgcttaccaacagggggtcggttaccagatgttgggcaatgttgtcactattggactggcttttttcccatttctccaccgcctgtttcgggaaaagtcactggaccagctgaagtccatatccgcagaggaaattctcactctgttttgcggagctccacccgtgacccctataatagtcctctccataattaactttttcgaaaggctgtgtctgacttggatgttcttttttatgatgtgtgtggccgagagaacttataagcaacgattcttgttcgccaagctgttctcacacataacttctgccaggaaagctcgcaaatacgagatccctcacttcagactgaagaaggtggagaacatcaagatctggctcagcctgcgcagttacctgaagcggaggggaccacagaggtccgtggatgtcgtcgtttccagcgtttttcttctgacactcagcattgctttcatctgttgtgcgcaggtgctgcagggacacaagacttttttgaacgacgcttataattgggaattcctgatttgggagaccgccctgctgcttttcctgttgcgcttggccagccttggctctgagactaataaaaagtacagcaatgtgagcattctgttgacggagcagatcaacctatacctaaagatggagaaaaaaccaaacaaaaaagaacagttgacactggtgaacaacgtgctgaagctgtctaccaagctgctgaaagaattggacactcccttccggctgtacggcctaactatgaaccctctgatttataacattacacgggtggttatcctgtctgccgtaagcggagtcatcagcgacctgttgggcttcaacattcggatttggaagcactcctcttag

SEQ ID NO: 336854 - DNA, 2154 bp, Artificial Sequence
  derived and/or modified sequence
atggcttcaaacgagcgtgacgctatctcctggtaccagaaaaagatcggagcctacgaccagcaaatatgggaaaagtccatcgagcaaacacaaatcaagggcctcaagaacaagccaaagaagatgggacacataaaacccgatctgatcgacgtggacctgatccggggaagcacatttgcaaaggccaagccagaaatcccatggacgagtttaacccggaaggggcttgtgcgcgtggtgttcttccccctgttctccaactggtggatacaagtgactagtttaagaatcttcgtctggctcctcttgttatatttcatgcaggtaatcgctatagttctttatctcatgatgccaatcgtaaacatttcagaagtactcgggcctttgtgcctgatgctgctgatgggaacagttcactgccagattgtttccacgcagattacacgcccttccggcaacaatggtaacagacggcgaagaatcaagcgggtcaagcttattagtaacaaagggacggaaacggataatgatccttcatgtgtgcacccaatcatcaaaagacgacagtgccgacctgagatcaggatgtggcagacacgcgagaaggcaaagttttctgatggagagaaatgtaggcgggaagccttccggcgactcggcaacggtgtcagtgatgacctgagctcggaagaagatggagaagcaaggacgcaaatgatcttgctgcgaaggtctgtcgaaggcgcatccagcgataacggttgtgaagtaaaaaatcgcaagtccatactcagtagacatctaaacagccaagtgaagaagaccaccactagatggtgtcatattgtgagagatagtgatagcctcgccgaaagcgaattcgagagcgctgccttctctcaaggctctagaagcggcgttagtggtggatcccgctcgctaaacatgagccgacgtgactctgagtccacacggcacgattcagagaccgaggatatgctctgggatgatctcctgcacgggccagagtgtcggagttcggtgacatctgactctgaaggcgctcatgtgaacacccttcattccggtacgaaacgcgaccccaaggaggacgtgtttcaacaaaatcatctcttttggttgcagaattcttcccccagtagtgaccgtgtctccgccattatttgggagggtaatgagtgtaagaagatggacatgtcagtgttggagatctccgggatcattatgtcacgtgttaatgcgtatcagcagggtgtcggctaccaaatgctgggaaatgttgtcaccataggactcgcttttttcccctttctgcacaggctgtttcgggaaaagagtctagatcagttgaagtctatcagcgccgaggaaattctaaccctcttctgcggagccccaccagtcaccccaattatagtgctgtccattataaacttctttgagcggctgtgtctcacttggatgttttttttcatgatgtgtgtagccgaaagaacctataagcagcgttttttatttgccaagctgttcagccacataacatcagccagaaaagcgaggaaatacgagattccgcacttccgactgaaaaaggtggagaatattaagatttggctttccctcaggtcgtacttaaagaggagaggcccacagcggtccgtcgatgtcgtggtgtcttccgtgttcctcctcaccctttctatcgcgttcatctgttgcgctcaggtgctgcaaggccacaaaacgtttttaaatgacgcatataattgggagttcttgatctgggagactgcactcctactgtttttgctgaggctcgcatcactaggctccgaaaccaataagaagtactctaacgtgagcatcctgctcacagaacagatcaacctctatctcaaaatggagaagaagccaaacaagaaagagcagttaacactcgtgaacaatgttctgaaactgtcaacaaaactcctaaaagaacttgataccccattcaggctttatgggctgactatgaacccactcatttacaatataacaagagttgtcatccttagcgccgtgtccggggtaatttcggatctgctcgggttcaacattcgtctgtggaagattaagagctag

SEQ ID NO: 336855 - DNA, 2603 bp, Artificial Sequence
  derived and/or modified sequence
ctctccggcgtctccgcctggaggggaagatgcggcctgcctggcccgccgcctcgcccccggcctcacggtgggaccccgggcactgaggacggaggtcccgggcgccggcccgcggggcaacgggcactaggtgagagccggacgcgggcgagcgaaggaggcgggtgccgggcgactccagcggcggcccctgcccctcccccgcacccacgaacacgctcgcccgatatattgcagaggcttctccggtcgccgctgcgccagtttttttttgtttgtttgttgtgttttccctggcaaacagctggagaaagagcagctcatggagaggctgagagaagcggttttcgcgtcctacccaaactgggagagtaaccttcagcagctggactcaccgattggttttccttcattttcagtgaaatcccattctctggctggagacacagatggcctcaaatgagagagatgctatatcgtggtaccaaaagaagattggagcctacgatcagcagatatgggaaaagtcaatcgaacagactcagattaagggtttgaaaaacaaaccgaaaaagatgggccacataaagccagacttgattgacgttgacttaatcagagggtcaacatttgccaaagcaaaacctgaaattccatggacatctctgactcggaaggggcttgttcgagttgtattttttccattgttcagcaattggtggattcaggttacctctttaagaatctttgtttggctgttactactttatttcatgcaagttatagcaattgtcttatatttgatgatgcctattgtgaacataagtgaagtacttggacccttgtgccttatgctactcatgggaactgtccactgtcaaattgtgtctactcagataacaagaccatcaggaaacaatggaaatcgaagaagaaggattaaaagagtaaaattaatatctaacaaagggactgaaactgacaatgacccaagttgtgtccatcctatcattaagaggagacaatgtcgaccagagattagaatgtggcaaacaagagagaaagcaaaattttcagatggagaaaagtgccgtagggaggcttttaggcgtttgggtaatggggtgtctgatgacctgtcaagtgaagaagatggtgaagcacggacacagatgatattattgcgtaggagtgtggaaggggcctcaagtgacaatggttgtgaagttaagaatagaaaatcaatactttcaaggcacctaaactctcaggtaaagaaaaccactacaaggtggtgtcatattgtgcgggattcagatagtctggctgaatcagaatttgaatcagcagccttcagccagggctctagatcgggtgtgagtggtggctctcgaagcctcaacatgtcaagaagagactcagaaagcacccgccatgactcggagactgaggacatgttatgggacgacctgctacatggcccagagtgccggtcatctgtcaccagtgacagtgagggggcccatgtgaatacccttcactcagggaccaaacgtgaccccaaagaggatgtttttcagcagaatcatttattctggcttcagaattcaagtccttcctctgatcgagttagtgcaataatctgggaggggaatgagtgcaaaaagatggatatgtctgtgttggaaataagtggcatcatcatgagcagggtcaatgcctatcagcaaggagtaggttatcagatgctgggaaatgttgtcactattggattagcattttttccattcttacatcgacttttccgtgagaagagccttgaccaactaaagtccatttcagctgaggagatcttgactctcttttgtggggcaccacctgttacacctattattgttttgtcgataattaatttttttgaaagattgtgtcttacttggatgttttttttcatgatgtgtgtggcagagagaacatataaacagagatttttatttgcaaaactcttcagccatattacttctgccaggaaagctaggaaatatgaaatacctcatttcagacttaagaaggtggagaatattaaaatatggttatcactgcgttcctatctaaagagacgggggccacagcgttcagttgatgtggttgtatcctcggttttcctactgacactttcgattgctttcatttgttgtgctcaggttctccaaggacataaaactttcctgaatgatgcttataactgggagtttttgatctgggaaacagctttactactttttttattgcgtctggcctcactggggtctgaaaccaataagaaatacagcaatgtttcaatattacttacagaacagattaatttatatcttaagatggaaaaaaagccaaataagaaagaacagcttactctagtaaacaatgtattaaagctgtccaccaagttgttgaaagagctggacacaccatttagactctatggactgacaatgaatcccttaatctacaatatcacaagagtagttatcctttctgctgtctcaggtgttataagtgatcttctaggatttaatataagaatttggaagcactcgtct

SEQ ID NO: 336856 - DNA, 3000 bp, Artificial Sequence
  derived and/or modified sequence
tggcgactggaggccttcacttttaatccccctcattttccagttcattctctgcttattttctggtcagtccgtgaccctgtaggcggcctctgaccggcgatcgatttgccgccctcagggcgctgggcggccggctgcctccgaagctggggcggcctccgcggtctccatggtaacggcctctccggcgtctccgcctggaggggaagatgcggcctgcctggcccgccgcctcgcccccggcctcacggtgggaccccgggcactgaggacggaggtcccgggcgccggcccgcggggcaacgggcactagtgaaatcccattctctggctggagacacagatggcctcaaatgagagagatgctatatcgtggtaccaaaagaagattggagcctacgatcagcagatatgggaaaagtcaatcgaacagactcagattaagggtttgaaaaacaaaccgaaaaagatgggccacataaagccagacttgattgacgttgacttaatcagagggtcaacatttgccaaagcaaaacctgaaattccatggacatctctgactcggaaggggcttgttcgagttgtattttttccattgttcagcaattggtggattcaggttacctctttaagaatctttgtttggctgttactactttatttcatgcaagttatagcaattgtcttatatttgatgatgcctattgtgaacataagtgaagtacttggacccttgtgccttatgctactcatgggaactgtccactgtcaaattgtgtctactcagataacaagaccatcaggaaacaatggaaatcgaagaagaaggattaaaagagtaaaattaatatctaacaaagggactgaaactgacaatgacccaagttgtgtccatcctatcattaagaggagacaatgtcgaccagagattagaatgtggcaaacaagagagaaagcaaaattttcagatggagaaaagtgccgtagggaggcttttaggcgtttgggtaatggggtgtctgatgacctgtcaagtgaagaagatggtgaagcacggacacagatgatattattgcgtaggagtgtggaaggggcctcaagtgacaatggttgtgaagttaagaatagaaaatcaatactttcaaggcacctaaactctcaggtaaagaaaaccactacaaggtggtgtcatattgtgcgggattcagatagtctggctgaatcagaatttgaatcagcagccttcagccagggctctagatcgggtgtgagtggtggctctcgaagcctcaacatgtcaagaagagactcagaaagcacccgccatgactcggagactgaggacatgttatgggacgacctgctacatggcccagagtgccggtcatctgtcaccagtgacagtgagggggcccatgtgaatacccttcactcagggaccaaacgtgaccccaaagaggatgtttttcagcagaatcatttattctggcttcagaattcaagtccttcctctgatcgagttagtgcaataatctgggaggggaatgagtgcaaaaagatggatatgtctgtgttggaaataagtggcatcatcatgagcagggtcaatgcctatcagcaaggagtaggttatcagatgctgggaaatgttgtcactattggattagcattttttccattcttacatcgacttttccgtgagaagagccttgaccaactaaagtccatttcagctgaggagatcttgactctcttttgtggggcaccacctgttacacctattattgttttgtcgataattaatttttttgaaagattgtgtcttacttggatgttttttttcatgatgtgtgtggcagagagaacatataaacagagatttttatttgcaaaactcttcagccatattacttctgccaggaaagctaggaaatatgaaatacctcatttcagacttaagaaggtggagaatattaaaatatggttatcactgcgttcctatctaaagagacgggggccacagcgttcagttgatgtggttgtatcctcggttttcctactgacactttcgattgctttcatttgttgtgctcaggttctccaaggacataaaactttcctgaatgatgcttataactgggagtttttgatctgggaaacagctttactactttttttattgcgtctggcctcactggggtctgaaaccaataagaaatacagcaatgtttcaatattacttacagaacagattaatttatatcttaagatggaaaaaaagccaaataagaaagaacagcttactctagtaaacaatgtattaaagctgtccaccaagttgttgaaagagctggacacaccatttagactctatggactgacaatgaatcccttaatctacaatatcacaagagtagttatcctttctgctgtctcaggtgttataagtgatcttctaggatttaatataagactgtggaaaattaaatcataagctgagtaaatgcctggactctcccctggctggtatcaaaacttacctatcaaggaaagtgatgactgcagaaaccagtgagatacccacctgcttgttcacatgcacaggtgctctcagctctgccaaagcgaatgaatggtgtttccggaggagcaagtccttttccaactgggtgtgcatgctaaaaacctgtattttcatgcttttcaaacaacatgaatagtcagctgactaaagactgtgtgtgttgtggtaacacaaagacaattttgtaagtttgcgcttcagtactgtgacagttatgtttactggacatagtcttttgggcaactatgatagatgcccaaagcatgaagcaaatatcttttattggaaatatgcaaattcaatacttttccattatagtctatagaactggagatttcatttctctatcaaagagagatcaagcgaactattttaggttaaatccgaataaaagaactttactggagact

SEQ ID NO: 336857 - DNA, 2154 bp, Artificial Sequence
  derived and/or modified sequence
atggccagcaacgagagagacgccatcagctggtaccagaagaagatcggcgcctacgaccagcagatctgggagaagagcatcgagcagacccagatcaagggcctgaagaacaagcccaagaagatgggccacatcaagcccgacctgatcgacgtggacctgatcagaggcagcaccttcgccaaggccaagcccgagatcccctggaccagcctgaccagaaagggcctggtgagagtggtgttcttccccctgttcagcaactggtggatccaggtgaccagcctgagaatcttcgtgtggctgctgctgctgtacttcatgcaggtgatcgccatcgtgctgtacctgatgatgcccatcgtgaacatcagcgaggtgctgggccccctgtgcctgatgctgctgatgggcaccgtgcactgccagatcgtgagcacccagatcaccagacccagcggcaacaacggcaacagaagaagaagaatcaagagagtgaagctgatcagcaacaagggcaccgagaccgacaacgaccccagctgcgtgcaccccatcatcaagagaagacagtgcagacccgagatcagaatgtggcagaccagagagaaggccaagttcagcgacggcgagaagtgcagaagagaggccttcagaagactgggcaacggcgtgagcgacgacctgagcagcgaggaggacggcgaggccagaacccagatgatcctgctgagaagaagcgtggagggcgccagcagcgacaacggctgcgaggtgaagaacagaaagagcatcctgagcagacacctgaacagccaggtgaagaagaccaccaccagatggtgccacatcgtgagagacagcgacagcctggccgagagcgagttcgagagcgccgccttcagccagggcagcagaagcggcgtgagcggcggcagcagaagcctgaacatgagcagaagagacagcgagagcaccagacacgacagcgagaccgaggacatgctgtgggacgacctgctgcacggccccgagtgcagaagcagcgtgaccagcgacagcgagggcgcccacgtgaacaccctgcacagcggcaccaagagagaccccaaggaggacgtgttccagcagaaccacctgttctggctgcagaacagcagccccagcagcgacagagtgagcgccatcatctgggagggcaacgagtgcaagaagatggacatgagcgtgctggagatcagcggcatcatcatgagcagagtgaacgcctaccagcagggcgtgggctaccagatgctgggcaacgtggtgaccatcggcctggccttcttccccttcctgcacagactgttcagagagaagagcctggaccagctgaagagcatcagcgccgaggagatcctgaccctgttctgcggcgccccccccgtgacccccatcatcgtgctgagcatcatcaacttcttcgagagactgtgcctgacctggatgttcttcttcatgatgtgcgtggccgagagaacctacaagcagagattcctgttcgccaagctgttcagccacatcaccagcgccagaaaggccagaaagtacgagatcccccacttcagactgaagaaggtggagaacatcaagatctggctgagcctgagaagctacctgaagagaagaggcccccagagaagcgtggacgtggtggtgagcagcgtgttcctgctgaccctgagcatcgccttcatctgctgcgcccaggtgctgcagggccacaagaccttcctgaacgacgcctacaactgggagttcctgatctgggagaccgccctgctgctgttcctgctgagactggccagcctgggcagcgagaccaacaagaagtacagcaacgtgagcatcctgctgaccgagcagatcaacctgtacctgaagatggagaagaagcccaacaagaaggagcagctgaccctggtgaacaacgtgctgaagctgagcaccaagctgctgaaggagctggacacccccttcagactgtacggcctgaccatgaaccccctgatctacaacatcaccagagtggtgatcctgagcgccgtgagcggcgtgatcagcgacctgctgggcttcaacatcagaatctggaagcacagcagctag

SEQ ID NO: 336858 - DNA, 2154 bp, Artificial Sequence
  derived and/or modified sequence
atggccagcaacgagagagacgccatcagctggtaccagaagaagatcggcgcctacgaccagcagatctgggagaagagcatcgagcagacccagatcaagggcctgaagaacaagcccaagaagatgggccacatcaagcccgacctgatcgacgtggacctgatcagaggcagcaccttcgccaaggccaagcccgagatcccctggaccagcctgaccagaaagggcctggtgagagtggtgttcttccccctgttcagcaactggtggatccaggtgaccagcctgagaatcttcgtgtggctgctgctgctgtacttcatgcaggtgatcgccatcgtgctgtacctgatgatgcccatcgtgaacatcagcgaggtgctgggccccctgtgcctgatgctgctgatgggcaccgtgcactgccagatcgtgagcacccagatcaccagacccagcggcaacaacggcaacagaagaagaagaatcaagagagtgaagctgatcagcaacaagggcaccgagaccgacaacgaccccagctgcgtgcaccccatcatcaagagaagacagtgcagacccgagatcagaatgtggcagaccagagagaaggccaagttcagcgacggcgagaagtgcagaagagaggccttcagaagactgggcaacggcgtgagcgacgacctgagcagcgaggaggacggcgaggccagaacccagatgatcctgctgagaagaagcgtggagggcgccagcagcgacaacggctgcgaggtgaagaacagaaagagcatcctgagcagacacctgaacagccaggtgaagaagaccaccaccagatggtgccacatcgtgagagacagcgacagcctggccgagagcgagttcgagagcgccgccttcagccagggcagcagaagcggcgtgagcggcggcagcagaagcctgaacatgagcagaagagacagcgagagcaccagacacgacagcgagaccgaggacatgctgtgggacgacctgctgcacggccccgagtgcagaagcagcgtgaccagcgacagcgagggcgcccacgtgaacaccctgcacagcggcaccaagagagaccccaaggaggacgtgttccagcagaaccacctgttctggctgcagaacagcagccccagcagcgacagagtgagcgccatcatctgggagggcaacgagtgcaagaagatggacatgagcgtgctggagatcagcggcatcatcatgagcagagtgaacgcctaccagcagggcgtgggctaccagatgctgggcaacgtggtgaccatcggcctggccttcttccccttcctgcacagactgttcagagagaagagcctggaccagctgaagagcatcagcgccgaggagatcctgaccctgttctgcggcgccccccccgtgacccccatcatcgtgctgagcatcatcaacttcttcgagagactgtgcctgacctggatgttcttcttcatgatgtgcgtggccgagagaacctacaagcagagattcctgttcgccaagctgttcagccacatcaccagcgccagaaaggccagaaagtacgagatcccccacttcagactgaagaaggtggagaacatcaagatctggctgagcctgagaagctacctgaagagaagaggcccccagagaagcgtggacgtggtggtgagcagcgtgttcctgctgaccctgagcatcgccttcatctgctgcgcccaggtgctgcagggccacaagaccttcctgaacgacgcctacaactgggagttcctgatctgggagaccgccctgctgctgttcctgctgagactggccagcctgggcagcgagaccaacaagaagtacagcaacgtgagcatcctgctgaccgagcagatcaacctgtacctgaagatggagaagaagcccaacaagaaggagcagctgaccctggtgaacaacgtgctgaagctgagcaccaagctgctgaaggagctggacacccccttcagactgtacggcctgaccatgaaccccctgatctacaacatcaccagagtggtgatcctgagcgccgtgagcggcgtgatcagcgacctgctgggcttcaacatcagactgtggaagatcaagagctag

SEQ ID NO: 336859 - protein, 139 aa, Artificial Sequence
  derived and/or modified sequence
METNVFHLMLCVTSARTHKSTSLCFGHFNSYPSLPLIHDLLLEISFQLSAPHEDARLTPEELERASLLQILPEMLGAERGDILRKADSSTNIFNPRGNLRKFQDFSGQDPNILLSHLLARIWKPYKKRETPDCFWKYCV

SEQ ID NO: 336860 - DNA, 420 bp, Artificial Sequence
  derived and/or modified sequence
atggaaacgaacgtgtttcacctcatgctttgcgtcacatcagccagaacacacaaaagcacttcactgtgtttcggacacttcaattcctacccatccctgccgttaatccacgacctgctgctggagatcagtttccaactcagcgccccacatgaggacgcgaggttgaccccggaagagctggagcgcgcttctctcctgcaaatcctgccagaaatgctgggagccgaaaggggggatattttacgcaaagcagactcgtccacaaatatcttcaatccaagaggcaacttgcggaaattccaggacttctctggccaggatcccaatattttactgagccacctcctggctcgaatctggaagccctacaagaagcgagagaccccagactgtttttggaagtactgcgtgtag

SEQ ID NO: 336861 - DNA, 420 bp, Artificial Sequence
  derived and/or modified sequence
atggaaacaaacgtgttccacctcatgttgtgcgttactagcgcccggacgcataagtcaacgtctctgtgcttcggacactttaattcctacccttcactccccctgatccacgacctccttctagagatttcatttcagctctctgccccacatgaagacgcaaggctcactccagaagaacttgagcgcgcctctctgttgcagatcctccctgaaatgcttggcgcagaacggggcgacatcctccggaaggcggactcttctacaaatatatttaaccctcgcggaaacctcaggaaattccaagacttctccgggcaagacccaaacatccttttaagccacctgctcgcacggatctggaaaccctacaagaaaagagagaccccagattgtttctggaaatattgtgtatag

SEQ ID NO: 336862 - DNA, 420 bp, Artificial Sequence
  derived and/or modified sequence
atggagaccaatgttttccaccttatgctgtgcgtcactagcgcccgaacacacaagtcaacatccctttgcttcggccatttcaattcatatccaagcctgccactaatacacgatcttctcctggaaatttcatttcagctcagtgcaccacacgaggatgctcggctgactcccgaggaacttgaacgcgcctctttgctccagatcctccccgagatgctgggcgctgaaaggggcgatattctccgtaaggctgactccagtacaaacatttttaacccccgtggtaatctgagaaagtttcaagatttttctggccaagatcctaacattctcttgagtcacctattagccagaatttggaagccttacaagaaaagagaaacacctgattgcttttggaaatattgcgtgtag

SEQ ID NO: 336863 - DNA, 420 bp, Artificial Sequence
  derived and/or modified sequence
atggaaaccaacgtatttcatcttatgctctgcgtcacttctgctcggactcataaatccacgtctctttgctttggccacttcaactcatatccaagccttcctttaattcatgatttattgctggaaatatcctttcaactctcagcacctcatgaagacgcgcgcttaactccggaggagctagaaagagcttcccttctacagatactgccagagatgctgggtgcagaaagaggggatattctcaggaaagcagactcaagtaccaacatttttaacccaagaggaaatttgagaaagtttcaggatttctctggacaagatcctaacattttactgagtcatcttttggccagaatctggaaaccatacaagaaacgtgagactcctgattgcttctggaaatactgtgtctga

SEQ ID NO: 336864 - DNA, 420 bp, Artificial Sequence
  derived and/or modified sequence
atggagaccaacgtgttccacctgatgctgtgcgtgaccagcgccagaacccacaagagcaccagcctgtgcttcggccacttcaacagctaccccagcctgcccctgatccacgacctgctgctggagatcagcttccagctgagcgccccccacgaggacgccagactgacccccgaggagctggagagagccagcctgctgcagatcctgcccgagatgctgggcgccgagagaggcgacatcctgagaaaggccgacagcagcaccaacatcttcaaccccagaggcaacctgagaaagttccaggacttcagcggccaggaccccaacatcctgctgagccacctgctggccagaatctggaagccctacaagaagagagagacccccgactgcttctggaagtactgcgtgtag

SEQ ID NO: 336865 - DNA, 420 bp, Artificial Sequence
  derived and/or modified sequence
atggagaccaacgtgttccacttaatgctgtgcgtaacctcggcgagaactcacaagtcgacgtctctttgtttcggccactttaattcctacccttctttgccattgattcacgacctactccttgagatatcatttcagctgtccgccccacacgaggacgcccgactgacacccgaggagctggaacgggcatcgctgttacagatactgcctgagatgctgggagcagagagaggagacatcctcaggaaagcggactctagtacaaacatcttcaatccccgagggaacctgagaaaatttcaggatttcagcgggcaggatcccaacattctcctctcccacttactagcacgcatctggaagccttacaagaagcgggaaactcctgactgcttctggaagtattgtgtgtag

SEQ ID NO: 336866 - DNA, 420 bp, Artificial Sequence
  derived and/or modified sequence
atggagaccaacgtgttccacctgatgctgtgtgtgaccagcgcccggacccacaagagcaccagcctgtgcttcggccacttcaacagctaccccagcctgcccctcatccatgacctgctgctggagatctccttccagctgagcgcccctcatgaagatgcccggctgaccccagaggagctggagcgggccagcctgctgcagatcctgcctgagatgctgggcgctgagcggggggacatcctgaggaaggctgacagcagcaccaacatcttcaacccccggggcaacctgaggaagttccaggacttcagcggccaggaccccaacatcctgctgagccacctgctggcccgcatctggaagccctacaagaagcgggagaccccagactgcttctggaagtactgtgtgtag

SEQ ID NO: 336867 - DNA, 420 bp, Artificial Sequence
  derived and/or modified sequence
atggagaccaacgtgttccacctgatgctgtgcgtgaccagcgcccggacccataaaagcacttctctttgtttcgggcactttaacagttacccatctctgccgcttatccacgacctactcctcgaaatcagcttccagctgtctgccccacacgaagacgccaggctaacaccagaggagctagagcgtgctagcctgctgcagatacttcctgagatgctgggcgccgaacgcggcgatattcttcgcaaggcagactcatcgaccaacattttcaatcctcggggaaacctaagaaagtttcaagacttcagcggccaggaccccaatatactactgtcccacctgttggctcgaatttggaaaccttacaagaaaagagaaacaccagactgcttctggaaatattgtgtatag

SEQ ID NO: 336868 - RNA, 420 nt, Artificial Sequence
  derived and/or modified sequence
auggaaacaaacguguuccaccucauguugugcguuacuagcgcccggacgcauaagucaacgucucugugcuucggacacuuuaauuccuacccuucacucccccugauccacgaccuccuucuagagauuucauuucagcucucugccccacaugaagacgcaaggcucacuccagaagaacuugagcgcgccucucuguugcagauccucccugaaaugcuuggcgcagaacggggcgacauccuccggaaggcggacucuucuacaaauauauuuaacccucgcggaaaccucaggaaauuccaagacuucuccgggcaagacccaaacauccuuuuaagccaccugcucgcacggaucuggaaacccuacaagaaaagagagaccccagauuguuucuggaaauauuguguauag

SEQ ID NO: 336869 - RNA, 420 nt, Artificial Sequence
  derived and/or modified sequence
auggagaccaauguuuuccaccuuaugcugugcgucacuagcgcccgaacacacaagucaacaucccuuugcuucggccauuucaauucauauccaagccugccacuaauacacgaucuucuccuggaaauuucauuucagcucagugcaccacacgaggaugcucggcugacucccgaggaacuugaacgcgccucuuugcuccagauccuccccgagaugcugggcgcugaaaggggcgauauucuccguaaggcugacuccaguacaaacauuuuuaacccccgugguaaucugagaaaguuucaagauuuuucuggccaagauccuaacauucucuugagucaccuauuagccagaauuuggaagccuuacaagaaaagagaaacaccugauugcuuuuggaaauauugcguguag

SEQ ID NO: 336870 - protein, 124 aa, Artificial Sequence
  derived and/or modified sequence
MYKLASCCLLFIGFLNPLLSLPLLDSREISFQLSAPHEDARLTPEELERASLLQILPEMLGAERGDILRKADSSTNIFNPRGNLRKFQDFSGQDPNILLSHLLARIWKPYKKRETPDCFWKYCV

SEQ ID NO: 336871 - protein, 139 aa, Artificial Sequence
  derived and/or modified sequence
MYKLASCCLLFIGFLNPLLSLPLLDSREISFQLSAPHEDARLTPEELERASLLQILPEMLGAERGDILRKADSSTNIFNPRGNLRKFQDFSGQDPNILLSHLLARIWKPYKKQRRKLRQDLRLWKKEPGLRIFKNYVWV

SEQ ID NO: 336872 - protein, 139 aa, Artificial Sequence
  derived and/or modified sequence
MYKLASCCLLFIGFLNPLLSLPLLDSREISFQLSAPHEDARLTPEELERASLLQILPEMLGAERGDILRKADSSTNIFNPRGNLRKFQDFSGQDPNILLSHLLARIWKPYKKQRRKLRQDLRLWKKEPGLRIFKNYVYI

SEQ ID NO: 336873 - DNA, 375 bp, Artificial Sequence
  derived and/or modified sequence
atgtataagctcgccagttgctgtctgttgtttatcggtttcctgaatcccttactgtcacttcccctgctggacagcagggagatttctttccagttgtcggcccctcacgaggacgctcggctcactccagaagaactagagagagcttcgttgctgcagatattacctgagatgcttggtgccgaaaggggcgacatcttgaggaaggccgattcttcaactaacatttttaacccacggggaaacctgcggaaattccaggacttttcaggtcaagaccctaatatattactctctcacctgctagctcgtatttggaaaccgtacaaaaagagagaaactccggactgtttttggaagtactgcgtgtag

SEQ ID NO: 336874 - DNA, 458 bp, Artificial Sequence
  derived and/or modified sequence
caacagaagccaagaaggaagccgtctatcttgtggcgatcatgtataagctggcctcctgctgtttgcttttcataggattcttaaatcctctcttatctcttcctctccttgactccagggaaatatcctttcaactctcagcacctcatgaagacgcgcgcttaactccggaggagctagaaagagcttcccttctacagatactgccagagatgctgggtgcagaaagaggggatattctcaggaaagcagactcaagtaccaacatttttaacccaagaggaaatttgagaaagtttcaggatttctctggacaagatcctaacattttactgagtcatcttttggccagaatctggaaaccatacaagaaacagagaagaaagctgaggcaagatttaagattgtggaagaaagagcctggcttacgaatttttaaaaactatgtgtacatc

SEQ ID NO: 336875 - DNA, 420 bp, Artificial Sequence
  derived and/or modified sequence
atgtacaagcttgcatcttgttgtcttctgtttattgggttccttaatccattgctgtcactcccccttctggactctagggagatctcctttcagctctcagccccacacgaagacgcacgtctgacccccgaggaactggaaagagcctcgttgttgcagatcctgcccgaaatgctcggtgctgagagaggcgatatcctccggaaggcagactcttccacgaatatcttcaacccgagagggaacctgaggaagttccaagacttttcgggccaagaccctaacattcttctttcacacttgttggcacgcatttggaaaccttataagaaacaacgccgaaagctcaggcaggatctacgcctctggaaaaaagaaccgggtcttcgcatcttcaagaactacgtttgggtgtag

SEQ ID NO: 336876 - DNA, 420 bp, Artificial Sequence
  derived and/or modified sequence
atgtacaaacttgcttcttgctgtcttctctttataggtttcctgaaccctctgctgagcctccccctgcttgactcaagagaaatcagttttcaattgtccgccccacacgaggacgcgaggcttactccagaggagctggaacgagcatctttactccaaattctgccagaaatgctcggagctgagcgtggagacattctccgtaaggctgacagttccaccaatatcttcaaccctagaggcaatttgcgaaaatttcaagacttctcaggacaagaccctaacatcctcttgtcacacctgctagcaagaatctggaagccttataagaagcagagaagaaagttgcgacaggatcttaggctgtggaagaaagaacctggtctacgaattttcaagaattatgtttatatttag

SEQ ID NO: 336877 - DNA, 375 bp, Artificial Sequence
  derived and/or modified sequence
atgtataaattggcctcctgttgcctgctgtttatcggatttctcaacccccttctctctctgcccctcttagactctcgagaaatttctttccaactttctgccccacacgaagatgccaggctgactcctgaggagcttgagcgtgcgagtcttttgcaaattctgcccgaaatgttaggcgctgaaaggggcgacatcctgcgcaaagctgacagctccacaaatattttcaaccccagagggaatctacggaaatttcaggacttctctggccaggacccaaacattctcctgtctcatcttctggcaagaatctggaaaccttataagaagcgcgagacccccgactgcttttggaaatactgcgtgtag

SEQ ID NO: 336878 - DNA, 420 bp, Artificial Sequence
  derived and/or modified sequence
atgtataagttggcctcatgttgcctgttgttcataggctttctgaaccctttactgtctctgcctctcttggatagtagagaaatctctttccagctgtccgccccccacgaagatgctcgcctcacccctgaagagctcgaacgcgcatccctcctgcagattttacccgagatgcttggtgcagagcgaggggatattctccggaaagccgattcttcaacaaacattttcaatcctcgcggcaacctgcggaaattccaggatttctcaggacaggaccctaatatactgctaagccacttacttgccagaatatggaaaccctataagaaacaacgccgaaaactaagacaggacctacggctctggaagaaggagccaggactccgcatctttaaaaattacgtttgggtgtag

SEQ ID NO: 336879 - DNA, 420 bp, Artificial Sequence
  derived and/or modified sequence
atgtacaaactggcatcatgttgtttgttgtttattgggtttctcaaccccctcctgtccctgcccctgctggatagtcgcgaaatctcttttcaattatctgccccacacgaggatgcccgccttacccctgaggaattagagagggcctcactgttgcaaattctgccggaaatgctgggggccgagcggggagatatccttcggaaggccgattcatcaactaacatattcaatcccagaggtaacttgcgtaagttccaggacttctccggacaggaccccaacattttgttatctcacctgctggctagaatttggaaaccctacaaaaagcagcggcgtaaacttcggcaagaccttagattatggaaaaaggagcccggccttagaatcttcaagaactatgtatatatctag

SEQ ID NO: 336880 - DNA, 375 bp, Artificial Sequence
  derived and/or modified sequence
atgtataaattggcctcctgttgcctgctgtttatcggatttctcaacccccttctctctctgcccctcttagactctcgagaaatttctttccaactttctgccccacacgaagatgccaggctgactcctgaggagcttgagcgtgcgagtcttttgcaaattctgcccgaaatgttaggcgctgaaaggggcgacatcctgcgcaaagctgacagctccacaaatattttcaaccccagagggaatctacggaaatttcaggacttctctggccaggacccaaacattctcctgtctcacctcctcgctagaatttggaagccttacaagaagagagaaacaccggactgtttttggaaatactgcgtatag

SEQ ID NO: 336881 - DNA, 420 bp, Artificial Sequence
  derived and/or modified sequence
atgtacaagctggcatcctgctgcttactgttcatcggcttcttaaatccattactgagtttgcctctgctggactcccgcgagatctcctttcagttatcagccccacatgaggacgcaagattaacccctgaagagttggagagagccagtctgctgcagattctcccggaaatgctcggggctgaacgcggtgacattctcaggaaggctgactccagtactaatatcttcaacccacgcggaaatttgcgcaagttccaagacttctccgggcaagatccaaatatcctgctctcccacctcctcgcccgaatttggaaaccttacaaaaagcaaagaaggaagctccgacaggacctcagactgtggaagaaagaacctggtctccggattttcaagaactacgtgtgggtttag

SEQ ID NO: 336882 - DNA, 420 bp, Artificial Sequence
  derived and/or modified sequence
atgtataaactggcctcctgctgccttctgtttattgggttcctaaacccactgctgtccctccctctgttagactcgcgcgagatatcgttccagcttagcgctccccacgaagatgccagattaactcctgaagaactcgagcgtgcgtctctcttgcagatcttacctgaaatgctcggcgcagaacgcggcgacatcctccgaaaagcagatagctctaccaacatctttaatccacgcgggaatctccgtaagtttcaagactttagtggtcaggaccctaatatactgctatcacatttgcttgctagaatttggaagccttacaaaaaacaaaggaggaagctacgccaggatctaagactatggaaaaaggagccaggtctccgtatattcaagaactacgtctacatttag

SEQ ID NO: 336883 - DNA, 375 bp, Artificial Sequence
  derived and/or modified sequence
atgtacaagctggccagctgctgcctgctgttcatcggcttcctgaaccccctgctgagcctgcccctgctggacagcagagagatcagcttccagctgagcgccccccacgaggacgccagactgacccccgaggagctggagagagccagcctgctgcagatcctgcccgagatgctgggcgccgagagaggcgacatcctgagaaaggccgacagcagcaccaacatcttcaaccccagaggcaacctgagaaagttccaggacttcagcggccaggaccccaacatcctgctgagccacctgctggccagaatctggaagccctacaagaagagagagacccccgactgcttctggaagtactgcgtgtag

SEQ ID NO: 336884 - DNA, 420 bp, Artificial Sequence
  derived and/or modified sequence
atgtacaagctggccagctgctgcctgctgttcatcggcttcctgaaccccctgctgagcctgcccctgctggacagcagagagatcagcttccagctgagcgccccccacgaggacgccagactgacccccgaggagctggagagagccagcctgctgcagatcctgcccgagatgctgggcgccgagagaggcgacatcctgagaaaggccgacagcagcaccaacatcttcaaccccagaggcaacctgagaaagttccaggacttcagcggccaggaccccaacatcctgctgagccacctgctggccagaatctggaagccctacaagaagcagagaagaaagctgagacaggacctgagactgtggaagaaggagcccggcctgagaatcttcaagaactacgtgtgggtgtag

SEQ ID NO: 336885 - DNA, 420 bp, Artificial Sequence
  derived and/or modified sequence
atgtacaagctggccagctgctgcctgctgttcatcggcttcctgaaccccctgctgagcctgcccctgctggacagcagagagatcagcttccagctgagcgccccccacgaggacgccagactgacccccgaggagctggagagagccagcctgctgcagatcctgcccgagatgctgggcgccgagagaggcgacatcctgagaaaggccgacagcagcaccaacatcttcaaccccagaggcaacctgagaaagttccaggacttcagcggccaggaccccaacatcctgctgagccacctgctggccagaatctggaagccctacaagaagcagagaagaaagctgagacaggacctgagactgtggaagaaggagcccggcctgagaatcttcaagaactacgtgtacatctag

SEQ ID NO: 336886 - DNA, 375 bp, Artificial Sequence
  derived and/or modified sequence
atgtataaactggcctcatgttgcctcctgtttatagggtttctaaaccctttgttgtccctgccgctgctggactcacgagagatcagctttcagctgagtgctccccatgaggacgcacggctgacgcctgaagaacttgaacgggctagcttattacagattctgcctgagatgttaggggctgaacgtggcgatatcctcagaaaggcggactctagcacgaacattttcaacccacgcggaaacttgaggaagttccaggatttctccgggcaggacccaaacattctgctgtctcatctcttagctcggatttggaaaccgtataagaaaagagagacacccgactgtttttggaaatactgcgtttag

SEQ ID NO: 336887 - DNA, 420 bp, Artificial Sequence
  derived and/or modified sequence
atgtataagctggcatcttgctgcctgttattcatcggcttcctgaatcctctgttatcactgcctctgctggatagccgcgagatctcttttcagctttctgccccccacgaagacgcccgcctaacccccgaagagctagagagagccagtctgttgcagattctccccgaaatgctcggcgcggagagaggtgatatccttcggaaagccgatagttcgactaatattttcaatcccaggggaaaccttcgcaagttccaggatttcagcggtcaagaccctaacattctgctgtctcatctcctcgccagaatctggaaaccctacaaaaaacagaggcgcaaacttcgacaggacctgcgtctgtggaaaaaagagccggggctgcgaatatttaagaactacgtgtgggtctag

SEQ ID NO: 336888 - DNA, 420 bp, Artificial Sequence
  derived and/or modified sequence
atgtataaactcgccagttgttgcttgctgtttattggcttcctcaaccccttactatctctgccactgctggattccagggaaatttctttccagttgagcgctccccacgaagacgcacgtctgaccccagaggagcttgagagagcctcacttctgcagatactgccggaaatgctgggagctgagcggggagatattttacggaaggccgacagctcgacgaacatctttaacccaagaggaaacttacgtaagttccaggatttctcaggccaagatcctaacatcttgctgagccaccttctggctaggatatggaagccctacaaaaagcagcggcgaaagcttcggcaggacctgcggctttggaagaaggaacccgggctccgtatatttaaaaactacgtttacatatag

SEQ ID NO: 336889 - DNA, 551 bp, Artificial Sequence
  derived and/or modified sequence
ccaagaaggaagccgtctatcttgtggcgatcatgtataagctggcctcctgctgtttgcttttcataggattcttaaatcctctcttatctcttcctctccttgactccagggaaatatcctttcaactctcagcacctcatgaagacgcgcgcttaactccggaggagctagaaagagcttcccttctacagatactgccagagatgctgggtgcagaaagaggggatattctcaggaaagcagactcaagtaccaacatttttaacccaagaggaaatttgagaaagtttcaggatttctctggacaagatcctaacattttactgagtcatcttttggccagaatctggaaaccatacaagaaacgtgagactcctgattgcttctggaaatactgtgtctgaagtgaaataagcatctgttagtcagctcagaaacacccatcttagaatatgaaaaataacacaatgcttgatttgaaaacagtgtggagaaaaactaggcaaactacaccctgttcattgttacctggaaaataaatcctctat

SEQ ID NO: 336890 - DNA, 375 bp, Artificial Sequence
  derived and/or modified sequence
atgtacaagctggccagctgctgcctgctcttcatcggcttcctgaaccccctgctgagcctgcccctgctggacagccgggagatctccttccagctgagcgcccctcatgaagatgcccggctgaccccagaggagctggagcgggccagcctgctgcagatcctgcctgagatgctgggcgctgagcggggggacatcctgaggaaggctgacagcagcaccaacatcttcaacccccggggcaacctgaggaagttccaggacttcagcggccaggaccccaacatcctgctgagccacctgctggcccgcatctggaagccctacaagaagcgggagaccccagactgcttctggaagtactgtgtgtag

SEQ ID NO: 336891 - DNA, 420 bp, Artificial Sequence
  derived and/or modified sequence
atgtacaagctggccagctgctgcctgctcttcatcggcttcctgaaccccctgctgagcctgcccctgctggacagccgggagatctccttccagctgagcgcccctcatgaagatgcccggctgaccccagaggagctggagcgggccagcctgctgcagatcctgcctgagatgctgggcgctgagcggggggacatcctgaggaaggctgacagcagcaccaacatcttcaacccccggggcaacctgaggaagttccaggacttcagcggccaggaccccaacatcctgctgagccacctgctggcccgcatctggaagccctacaagaagcagaggaggaagctgcggcaggacctgcggctgtggaagaaggagcccggcctgcgcatcttcaagaactacgtgtgggtgtag

SEQ ID NO: 336892 - DNA, 420 bp, Artificial Sequence
  derived and/or modified sequence
atgtacaagctggccagctgctgcctgctcttcatcggcttcctgaaccccctgctgagcctgcccctgctggacagccgggagatctccttccagctgagcgcccctcatgaagatgcccggctgaccccagaggagctggagcgggccagcctgctgcagatcctgcctgagatgctgggcgctgagcggggggacatcctgaggaaggctgacagcagcaccaacatcttcaacccccggggcaacctgaggaagttccaggacttcagcggccaggaccccaacatcctgctgagccacctgctggcccgcatctggaagccctacaagaagcagaggaggaagctgcggcaggacctgcggctgtggaagaaggagcccggcctgcgcatcttcaagaactacgtgtacatctag

SEQ ID NO: 336893 - DNA, 1601 bp, Artificial Sequence
  derived and/or modified sequence
tccacagattgtcattcttcagggatggcagccctaaacacagcatggcaactcatctactcactcatgaaagattaaaaaatggaaaccaacgtatttcatcttatgctctgcgtcacttctgctcggactcataaatccacgtctctttgctttggccacttcaactcatatccaagccttcctttaattcatgatttattgctgatgatgtcaggtcataggatgatatatataatcagtgagcaggcagaatgaggagacagttgaaagttctctacaacagaagccaagaaggaagccgtctatcttgtggcgatcatgtataagctggcctcctgctgtttgcttttcataggattcttaaatcctctcttatctcttcctctccttgactccagggaaatatcctttcaactctcagcacctcatgaagacgcgcgcttaactccggaggagctagaaagagcttcccttctacagatactgccagagatgctgggtgcagaaagaggggatattctcaggaaagcagactcaagtaccaacatttttaacccaagaggaaatttgagaaagtttcaggatttctctggacaagatcctaacattttactgagtcatcttttggccagaatctggaaaccatacaagaaacagagaagaaagctgaggcaagatttaagattgtggaagaaagagcctggcttacgaatttttaaaaactatgtgtgggtgtgaatttcatctatcattccaagtttaagaaggaatcagggacttctctaaaaagcaccagagagtgagctgatttatcaagtaaacaatcacactcacttcttaaaagacacaactacaaacgccatagaaagcggtgactgatggagcctgcaggaccctgtgggcgaggacaactgggctcgcctggacgttttctcttttgcagtccccacaacactgccctgttcaagggcaaacaaaaggcagtgccagtcagacctgtggtagggctggagcgacctcttttgtataaattgattggaaagaaagagttaactgttttggtaagaatgaaaatttaaacacagaagtatgtaagaatgatactagcttttacattacttgtaaaacattttacaatcattattttaaaaacaaaaatactcaaaagggcaacagcactgggtaagaagctctttcattttaatattacacatgcaaatgctaactgaaacttacaagaataggcccatggtaagcggatcgatttttaagataagactttcagaatttcactggaaggtgggaaatcaataggaaagggatctacaaggatgaaggccaaaactcaacccccaaaacctggttatcccagatatgctaatggacagtatgtgctaatgtgttgtgagaaaaccggaatgtttcatcttaattatggaggggaacgccaggttgaatgaagcctgtatgaacgtactacattcatggaaaccattatgaaaagtacacaacctgtaggtggcatttcttcaagcactctaaggggaaaatgacttatgtaacagaacaaaataaatgaggctaaggtttggggctca

SEQ ID NO: 336894 - DNA, 375 bp, Artificial Sequence
  derived and/or modified sequence
atgtacaagctggccagctgctgcctgctgttcatcggcttcctgaaccccctgctttctctgccactgctcgattcaagagagatctcattccagctgtctgcccctcatgaggacgcgcgcctcacccccgaagaactggaacgcgcttcattgctacagatcctgcccgagatgcttggggcggaaagaggcgatattttaagaaaggccgatagctcaaccaacatattcaacccgcgcggcaatctccgcaaatttcaggatttttccggacaggaccccaacattctgctatctcaccttttagccagaatttggaaaccttataaaaaaagagaaacaccggactgcttctggaagtactgtgtgtag

SEQ ID NO: 336895 - DNA, 420 bp, Artificial Sequence
  derived and/or modified sequence
atgtacaagctggccagctgctgcctgctgttcatcggcttcctgaacccgctgctcagcctgccactgctcgatagcagagagatttcctttcagctgagtgcccctcacgaagacgccaggctcacccccgaagaacttgaacgagccagcctactgcagatactgccagagatgctgggtgctgaaaggggtgacatcctgaggaaggcagactcatccactaacatctttaatcccagggggaatttgagaaaattccaagatttttctggacaagatcccaatatcctcttgagccacttactggcccggatttggaaaccctacaagaaacaacgacggaagcttcggcaggatctgagattatggaaaaaagaacccggcttgcgcatatttaagaactacgtgtgggtgtag

SEQ ID NO: 336896 - DNA, 420 bp, Artificial Sequence
  derived and/or modified sequence
atgtacaagctggccagctgctgcctgctgttcatcggcttcctgaaccccctgctgagcctcccgctgttagacagccgggaaatttctttccagttatccgcaccacatgaggacgcacgcttgactccagaggagctagagagagctagtctgctgcagatcctgcccgaaatgttgggtgccgagcggggcgatatattaagaaaggccgatagcagcaccaatatctttaacccgcgggggaatttgagaaagtttcaggacttctctggccaggaccctaacatactactgtcacacctgctcgcaaggatatggaagccatacaaaaagcaacgccggaaactgaggcaggatcttcgcctttggaagaaggagcctggcctcagaattttcaaaaattacgtctatatctag

SEQ ID NO: 336897 - RNA, 375 nt, Artificial Sequence
  derived and/or modified sequence
auguauaaauuggccuccuguugccugcuguuuaucggauuucucaacccccuucucucucugccccucuuagacucucgagaaauuucuuuccaacuuucugccccacacgaagaugccaggcugacuccugaggagcuugagcgugcgagucuuuugcaaauucugcccgaaauguuaggcgcugaaaggggcgacauccugcgcaaagcugacagcuccacaaauauuuucaaccccagagggaaucuacggaaauuucaggacuucucuggccaggacccaaacauucuccugucucaucuucuggcaagaaucuggaaaccuuauaagaagcgcgagacccccgacugcuuuuggaaauacugcguguag

SEQ ID NO: 336898 - RNA, 420 nt, Artificial Sequence
  derived and/or modified sequence
auguauaaguuggccucauguugccuguuguucauaggcuuucugaacccuuuacugucucugccucucuuggauaguagagaaaucucuuuccagcuguccgccccccacgaagaugcucgccucaccccugaagagcucgaacgcgcaucccuccugcagauuuuacccgagaugcuuggugcagagcgaggggauauucuccggaaagccgauucuucaacaaacauuuucaauccucgcggcaaccugcggaaauuccaggauuucucaggacaggacccuaauauacugcuaagccacuuacuugccagaauauggaaacccuauaagaaacaacgccgaaaacuaagacaggaccuacggcucuggaagaaggagccaggacuccgcaucuuuaaaaauuacguuuggguguag

SEQ ID NO: 336899 - RNA, 420 nt, Artificial Sequence
  derived and/or modified sequence
auguacaaacuggcaucauguuguuuguuguuuauuggguuucucaacccccuccugucccugccccugcuggauagucgcgaaaucucuuuucaauuaucugccccacacgaggaugcccgccuuaccccugaggaauuagagagggccucacuguugcaaauucugccggaaaugcugggggccgagcggggagauauccuucggaaggccgauucaucaacuaacauauucaaucccagagguaacuugcguaaguuccaggacuucuccggacaggaccccaacauuuuguuaucucaccugcuggcuagaauuuggaaacccuacaaaaagcagcggcguaaacuucggcaagaccuuagauuauggaaaaaggagcccggccuuagaaucuucaagaacuauguauauaucuag

SEQ ID NO: 336900 - RNA, 375 nt, Artificial Sequence
  derived and/or modified sequence
auguauaaauuggccuccuguugccugcuguuuaucggauuucucaacccccuucucucucugccccucuuagacucucgagaaauuucuuuccaacuuucugccccacacgaagaugccaggcugacuccugaggagcuugagcgugcgagucuuuugcaaauucugcccgaaauguuaggcgcugaaaggggcgacauccugcgcaaagcugacagcuccacaaauauuuucaaccccagagggaaucuacggaaauuucaggacuucucuggccaggacccaaacauucuccugucucaccuccucgcuagaauuuggaagccuuacaagaagagagaaacaccggacuguuuuuggaaauacugcguauag

SEQ ID NO: 336901 - RNA, 420 nt, Artificial Sequence
  derived and/or modified sequence
auguacaagcuggcauccugcugcuuacuguucaucggcuucuuaaauccauuacugaguuugccucugcuggacucccgcgagaucuccuuucaguuaucagccccacaugaggacgcaagauuaaccccugaagaguuggagagagccagucugcugcagauucucccggaaaugcucggggcugaacgcggugacauucucaggaaggcugacuccaguacuaauaucuucaacccacgcggaaauuugcgcaaguuccaagacuucuccgggcaagauccaaauauccugcucucccaccuccucgcccgaauuuggaaaccuuacaaaaagcaaagaaggaagcuccgacaggaccucagacuguggaagaaagaaccuggucuccggauuuucaagaacuacguguggguuuag

SEQ ID NO: 336902 - RNA, 420 nt, Artificial Sequence
  derived and/or modified sequence
auguauaaacuggccuccugcugccuucuguuuauuggguuccuaaacccacugcugucccucccucuguuagacucgcgcgagauaucguuccagcuuagcgcuccccacgaagaugccagauuaacuccugaagaacucgagcgugcgucucucuugcagaucuuaccugaaaugcucggcgcagaacgcggcgacauccuccgaaaagcagauagcucuaccaacaucuuuaauccacgcgggaaucuccguaaguuucaagacuuuaguggucaggacccuaauauacugcuaucacauuugcuugcuagaauuuggaagccuuacaaaaaacaaaggaggaagcuacgccaggaucuaagacuauggaaaaaggagccaggucuccguauauucaagaacuacgucuacauuuag

SEQ ID NO: 336903 - DNA, 1839 bp, Artificial Sequence
  derived and/or modified sequence
atgtcaaccgtttcagagctgagaattaccgcccaagagaatgacatggaggtggagctgcccgctgctgccaattctcgcaaacaattcagcgtgccccctgccccgactagaccctcatgcccagccgtcgccgagatacccttacgtatggtgagcgaggaaatggaagaacaggtgcattcaatcagaggatctagctcagcaaaccccgttaactccgtcagacggaagagctgtctcgttaaagaggtggaaaaaatgaagaacaagagggaggaaaaaaaggcgcagaattcagaaatgcggatgaagcgcgctcaggagtatgattccagtttcccaaattgggaatttgccaggatgatcaaagaattccgggctaccttagagtgtcaccctttaaccatgaccgatcccatcgaagagcatcgcatatgcgtctgcgtgaggaagcgacctctgaacaagcaggaattagctaagaaagaaatcgatgtcatctcaattccgtccaaatgcctcctgctcgtccacgagccaaagctgaaagttgacctgacaaaatacctggagaaccaagctttttgtttcgacttcgcctttgacgagactgcctccaatgaagtggtgtaccgcttcaccgcccgaccactcgtccagacaatcttcgagggcggaaaagctacatgcttcgcatatggtcagaccggcagtggaaagacacatacgatgggtggtgatttatctggaaaggctcagaacgctagtaagggaatttacgctatggcctcccgggacgtgttccttcttaagaaccagccttgctacagaaagttgggcttggaggtgtatgttacatttttcgagatctataacggcaaactgtttgatctcctgaataagaaagctaagctccgcgtcctggaggacgggaagcagcaagtccaagtggtgggtttacaagaacatctggtgaactcggcagatgatgttatcaaaatgattgacatgggatccgcgtgcaggacgtcaggccagacgttcgccaattctaacagttcccgatctcacgcctgttttcaaatcattctgagagccaaaggtcgtatgcacggcaagtttagcctggtggacctggcaggcaatgaacggggagcagatacctcaagcgcagaccggcaaacccggatggagggggctgagatcaataagtcactgttagcattgaaggagtgcatcagggccctcggacagaacaaggcacatacgcctttcagagagtccaaactcacccaggttctaagggattcctttataggcgaaaactctaggacatgtatgatcgctacaatttcaccagggattagctcgtgtgaatatacgctgaatacactccgctacgctgacagagtcaaggagctctctccccactcgggccctagcggagaacagctcatccagatggagaccgaagaaatggaggcttgtagcaacggagccctgatcccgggaaacctgagcaaagaggaggaagaactctctagtcagatgtcttccttcaacgaggccatgacccagattagagaactggaggagaaggccatggaggaactgaaagaaatcatacagcagggtccggattggttggagctgagtgagatgacagagcagcccgattacgatttagagacctttgttaacaaggcagagagcgcactggctcagcaagccaagcattttagtgccctgagagacgtgataaaagcactgcgactggccatgcagctggaggagcaggcttccaggcagatcagcagtaaaaagcgccctcagtag

SEQ ID NO: 336904 - DNA, 324 bp, Artificial Sequence
  derived and/or modified sequence
taaaaagaatgtattagagcacttggacagaacaaggcacacacccctttcagagagtccaaactgacccaggtgctccgggattccttcatcggcgagaattctaggacgtgcatgattgctaccatctccccgggtatcagctcctgtgaatatacactaaacaccttgagatatgcggaccggcagggatgtcatagtattcccctggaaccacaggcttcaaagccagggcgatgtcacattccactgcttagtaaggaggaagaggagctgtccagccagatgagttctttcaatgaagctatgacacagatcagatag

SEQ ID NO: 336905 - DNA, 320 bp, Artificial Sequence
  derived and/or modified sequence
tgaaggagtgcatcagggccctgggacagaacaaggctcacaccccgttccgtgagagcaagctgacacaggtgctgagggactccttcattggggagaactctaggacttgcatgattgccacgatctcaccaggcataagctcctgtgaatatactttaaacaccctgagatatgcagacaggcaaggttgccattccatccccttggagcctcaagcctcgaagcctgggcggtgccacattcctctgttatccaaggaagaggaggaactgtcttcccagatgtccagctttaacgaagccatgactcagatcagg

SEQ ID NO: 336906 - DNA, 1839 bp, Artificial Sequence
  derived and/or modified sequence
atgagcacagtgtctgagctgcgcatcacagcccaggagaatgacatggaggtggagctgcctgctgctgccaacagcaggaagcagttctctgtgcccccagcccccacccggcccagctgcccagctgtggccgagatccccctgaggatggtgtctgaggagatggaggagcaggtgcacagcatccggggcagcagcagcgccaaccctgtgaacagcgtgcggaggaagagctgcctggtgaaggaggtggagaagatgaagaacaagcgggaggagaagaaggcccagaacagcgagatgaggatgaagagggcccaggagtatgacagcagcttccccaactgggagtttgccaggatgatcaaggagttccgggccaccctggagtgccaccccctgaccatgacagaccccatcgaggagcaccgcatctgtgtgtgtgtgaggaagaggcccctgaacaagcaggagctggccaagaaggagattgatgtgatcagcatccccagcaagtgcctgctgctggtgcatgagcccaagctgaaggtggacctgaccaagtacctggagaaccaggccttctgctttgattttgcctttgatgaaacagccagcaatgaggtggtgtaccgcttcaccgcccggcccctggtgcagaccatctttgagggcggcaaggccacctgctttgcctacggccagacaggcagcggcaagacccacaccatgggcggggacctgagcggcaaggcccagaatgccagcaagggcatctatgccatggccagcagagatgtgttcctgctgaagaaccagccctgctacaggaagctgggcctggaggtgtatgtgaccttctttgagatctacaacgggaagctgtttgacctgctgaacaagaaggccaagctgcgggtgctggaggatggcaagcagcaggtgcaggtggtgggcctgcaggagcacctggtgaacagcgcagatgatgtgatcaagatgattgacatgggcagcgcctgcaggaccagcggccagacctttgccaacagcaacagcagccgcagccacgcctgcttccagatcatcctgcgggccaagggccgcatgcacggcaagttcagcctggtggacctggccggaaatgaaagaggagctgacaccagcagcgctgaccggcagaccaggatggagggcgctgagatcaacaagagcctgctggccctgaaggagtgcatccgggccctgggccagaacaaggcccacacccccttccgggagagcaagctgacccaggtgctgcgggacagcttcatcggggagaacagcaggacctgcatgattgccaccatcagccctggcatcagcagctgtgagtacaccctgaacaccctgcgctatgctgacagagtgaaggagctgagcccccacagcggccccagcggggagcagctgatccagatggagacagaggagatggaggcctgcagcaatggagccctgatccctggcaacctgagcaaggaggaggaggagctgagcagccagatgagcagcttcaatgaggccatgacccagatccgggagctggaggagaaggccatggaggagctgaaggagatcatccagcagggccctgactggctggagctgtctgagatgacagagcagcctgactatgacctggagacctttgtgaacaaggccgagagcgccctggcccagcaggccaagcacttcagcgccctgagagatgtgatcaaggccctgcggctggccatgcagctggaggagcaggccagccggcagatcagcagcaagaagaggccccagtag

SEQ ID NO: 336907 - DNA, 324 bp, Artificial Sequence
  derived and/or modified sequence
tgaaaagaatgcatccgggccctgggccagaacaaggcccacacccccttccgggagagcaagctgacccaggtgctgcgggacagcttcatcggggagaacagcaggacctgcatgattgccaccatcagccctggcatcagcagctgtgagtacaccctgaacaccctgcgctatgctgaccggcagggctgccacagcatccccctggagccccaggccagcaagccaggccgctgccacatccccctgctgagcaaggaggaggaggagctgagcagccagatgagcagcttcaatgaggccatgacccagatcagatag

SEQ ID NO: 336908 - DNA, 1839 bp, Artificial Sequence
  derived and/or modified sequence
atgagcaccgtgagcgagctgcggatcaccgcccaggagaacgacatggaggtagaactccccgccgcagcaaactcccggaaacaattcagtgtccccccagccccaactagaccctcttgcccagctgtagccgagataccccttcggatggtctctgaggagatggaggaacaagtgcacagcatccgcgggtcctcgagtgctaatcctgtaaacagtgtgagacgtaagtcttgcctggtgaaggaggtggaaaaaatgaagaacaagagggaggaaaagaaggcacaaaacagcgagatgcgcatgaaaagggcgcaggaatacgactctagttttccaaactgggaattcgctagaatgataaaagaatttcgggcaactctggagtgtcaccccctgacaatgactgatccaatcgaggagcacaggatctgcgtttgcgtgcgcaagcgaccgctgaataagcaggaactcgctaagaaagaaattgacgtcatatcaataccttctaagtgcctgttactggtccacgaaccaaaacttaaggtcgacctgacgaaatacctcgaaaatcaggctttctgtttcgatttcgccttcgatgaaactgcctcaaacgaagtagtgtaccgctttaccgcaaggcctctggtgcagactatcttcgagggggggaaggccacgtgttttgcatatggccaaaccgggtccgggaagactcataccatgggtggcgatctgtccgggaaggctcaaaatgcctcaaagggaatctatgccatggcaagtcgcgacgtcttcctgttaaagaaccaaccctgctacaggaagctcggcctcgaggtgtatgtaacttttttcgagatctacaatggcaaattgtttgacttgctgaacaagaaggccaagctccgggtcctggaagatggaaaacagcaggttcaggtggtgggcctccaagaacacctcgtgaattctgccgatgatgtgatcaagatgatcgacatggggtccgcctgtcggacatcaggccaaaccttcgcaaacagcaactcaagcaggagccacgcatgctttcaaattatcctgcgtgctaaagggcgtatgcacggaaagttttcattagtggatctcgcgggtaatgaacgtggcgctgataccagcagcgccgatcggcagaccagaatggagggcgcagaaataaataagagcttactcgcgcttaaggagtgtataagggctctgggtcagaacaaggctcacacgcctttccgggaaagcaagctgacgcaggtgttaagggacagttttatcggcgagaactcccgcacttgcatgattgccacaattagcccaggcattagctcttgtgaatacaccctcaataccctcagatatgcagatcgtgtgaaggagcttagccctcactctggcccctccggtgagcagctcatccagatggaaactgaagagatggaagcctgcagtaacggagcactgatacctggcaatcttagtaaggaggaggaagagctgtcttcccagatgtcatctttcaatgaggccatgacccagatcagagagcttgaagaaaaagccatggaagaacttaaggagatcattcagcagggtcccgattggctggagctgagtgagatgacggaacaacccgattacgacctggaaacgtttgtcaacaaagctgagagtgcattggcccagcaggctaagcactttagtgccttgcgagacgttatcaaggccctgcggttggctatgcagctagaagagcaggcctcgcgccagattagctccaaaaaacgcccacaatag

SEQ ID NO: 336909 - DNA, 324 bp, Artificial Sequence
  derived and/or modified sequence
tgaaaggagtgcatccgggccctgggccagaacaaggcccacacccccttccgggagtctaaactgacacaggtgttgagggactccttcattggcgaaaatagccgtacctgcatgattgccacgattagcccaggcatctcttcatgtgagtacaccctgaataccctgagatacgccgacagacagggttgccattccatccccttagagccacaggccagtaaacctgggcggtgccacatacctcttttgtccaaggaggaagaggagttgtcatcacagatgagttcctttaacgaagcaatgacgcagatcagatag

SEQ ID NO: 336910 - DNA, 1839 bp, Artificial Sequence
  derived and/or modified sequence
atgtcaactgtttcggagttacggatcacagcccaggaaaacgatatggaggtggagcttcctgccgcagccaatagccggaaacagttcagcgtccccccagcccctacccgaccctcctgtccagccgtcgccgagattcctttgcgaatggtgagtgaggagatggaggaacaggtccacagtattcgcggatcctcttccgccaatcccgtgaactctgtgaggcgcaaaagttgtcttgtcaaagaggtagagaagatgaaaaataagagggaagagaagaaggctcaaaacagcgagatgagaatgaaacgggcacaggaatacgacagcagctttcctaattgggaattcgctcggatgatcaaggaattccgcgcaacattggagtgccaccctttgaccatgaccgaccctatagaagagcatagaatctgcgtctgcgtgagaaagcgtcctctgaataaacaggaactggccaagaaggagatcgatgtgatcagcatcccctctaagtgtctgttgctagtgcacgagcccaagctgaaggttgaccttaccaagtacctggagaaccaggctttttgctttgactttgcatttgacgagacagcttcaaatgaggtggtgtacagatttacggcccgacctcttgtccagaccattttcgagggcggaaaggcgacatgttttgcttacggccagaccggttctgggaaaacccacaccatggggggagatctgagcggaaaggctcagaacgccagtaaaggaatctatgcaatggctagtcgggatgttttccttctgaaaaatcaaccttgttaccgaaagctggggctggaggtgtacgttaccttcttcgaaatttataatggtaaactctttgatttgctcaacaaaaaggctaaactgcgagtgctggaggatggcaagcagcaagtgcaggtagttggtctacaggagcatctggtgaactcggcagacgacgtgattaagatgattgacatggggtccgcctgtagaacctcaggccagactttcgctaacagcaactcttcgcggtcccacgcatgctttcagattatccttcgtgcgaagggacgcatgcatggcaaatttagtctcgttgacctggcagggaatgaacgaggtgctgacacaagttctgcagatcggcagacccgcatggaaggcgctgaaattaacaaatcactgctggccttgaaggagtgcatacgcgctctcggacagaacaaggcccataccccctttagagagtccaagctgacacaggtgctgcgggatagctttatcggggagaactcgagaacctgtatgattgcgactatctcccctggcatctcgagctgcgagtacactctgaacaccctccgctacgcagaccgcgtcaaggagttgtctccccactctggcccttctggcgaacagctcattcagatggaaacagaagagatggaggcgtgttcgaacggggctctgattcctggaaacctatccaaggaagaggaggagctgtccagtcagatgtcaagttttaacgaggctatgactcaaatccgggagctggaggagaaagctatggaagagttgaaggagatcattcagcagggacccgactggctggaactctccgagatgaccgaacaacccgactacgacctagaaacgttcgtgaacaaagccgagtcagccctcgcccagcaggctaaacactttagcgctctgcgggatgttattaaggccctgagactggctatgcaactggaagaacaggcctccaggcagataagcagcaaaaagcgcccacagtag

SEQ ID NO: 336911 - DNA, 324 bp, Artificial Sequence
  derived and/or modified sequence
tgaaaggagtgtatacgagccctaggccagaacaaagctcataccccgttccgtgagtctaaactgacccaagttctccgagactcattcatcggtgagaattcgaggacatgtatgattgcgactatttctccgggaatctcgtcatgtgaatatactcttaacactctcagatacgcagacaggcagggctgtcattcgataccgctggagccacaggcatctaaacccggtaggtgccatatccctctgctgagcaaggaggaggaggaacttagcagccagatgagctcctttaatgaggcaatgacccagatccgctag

SEQ ID NO: 336912 - DNA, 1839 bp, Artificial Sequence
  derived and/or modified sequence
atgagcaccgtgagcgagctgagaatcaccgcccaggagaacgacatggaggtggagctgcccgccgccgccaacagcagaaagcagttcagcgtgccccccgcccccaccagacccagctgccccgccgtggccgagatccccctgagaatggtgagcgaggagatggaggagcaggtgcacagcatcagaggcagcagcagcgccaaccccgtgaacagcgtgagaagaaagagctgcctggtgaaggaggtggagaagatgaagaacaagagagaggagaagaaggcccagaacagcgagatgagaatgaagagagcccaggagtacgacagcagcttccccaactgggagttcgccagaatgatcaaggagttcagagccaccctggagtgccaccccctgaccatgaccgaccccatcgaggagcacagaatctgcgtgtgcgtgagaaagagacccctgaacaagcaggagctggccaagaaggagatcgacgtgatcagcatccccagcaagtgcctgctgctggtgcacgagcccaagctgaaggtggacctgaccaagtacctggagaaccaggccttctgcttcgacttcgccttcgacgagaccgccagcaacgaggtggtgtacagattcaccgccagacccctggtgcagaccatcttcgagggcggcaaggccacctgcttcgcctacggccagaccggcagcggcaagacccacaccatgggcggcgacctgagcggcaaggcccagaacgccagcaagggcatctacgccatggccagcagagacgtgttcctgctgaagaaccagccctgctacagaaagctgggcctggaggtgtacgtgaccttcttcgagatctacaacggcaagctgttcgacctgctgaacaagaaggccaagctgagagtgctggaggacggcaagcagcaggtgcaggtggtgggcctgcaggagcacctggtgaacagcgccgacgacgtgatcaagatgatcgacatgggcagcgcctgcagaaccagcggccagaccttcgccaacagcaacagcagcagaagccacgcctgcttccagatcatcctgagagccaagggcagaatgcacggcaagttcagcctggtggacctggccggcaacgagagaggcgccgacaccagcagcgccgacagacagaccagaatggagggcgccgagatcaacaagagcctgctggccctgaaggagtgcatcagagccctgggccagaacaaggcccacacccccttcagagagagcaagctgacccaggtgctgagagacagcttcatcggcgagaacagcagaacctgcatgatcgccaccatcagccccggcatcagcagctgcgagtacaccctgaacaccctgagatacgccgacagagtgaaggagctgagcccccacagcggccccagcggcgagcagctgatccagatggagaccgaggagatggaggcctgcagcaacggcgccctgatccccggcaacctgagcaaggaggaggaggagctgagcagccagatgagcagcttcaacgaggccatgacccagatcagagagctggaggagaaggccatggaggagctgaaggagatcatccagcagggccccgactggctggagctgagcgagatgaccgagcagcccgactacgacctggagaccttcgtgaacaaggccgagagcgccctggcccagcaggccaagcacttcagcgccctgagagacgtgatcaaggccctgagactggccatgcagctggaggagcaggccagcagacagatcagcagcaagaagagaccccagtag

SEQ ID NO: 336913 - DNA, 324 bp, Artificial Sequence
  derived and/or modified sequence
tgaaaggagtgcatcagagccctgggccagaacaaggcccacacccccttcagagagagcaagctgacccaggtgctgagagacagcttcatcggcgagaacagcagaacctgcatgatcgccaccatcagccccggcatcagcagctgcgagtacaccctgaacaccctgagatacgccgacagacagggctgccacagcatccccctggagccccaggccagcaagcccggcagatgccacatccccctgctgagcaaggaggaggaggagctgagcagccagatgagcagcttcaacgaggccatgacccagatcagatag

SEQ ID NO: 336914 - protein, 594 aa, Artificial Sequence
  derived and/or modified sequence
MAVEELQSIIKRCQILEEQDFKEEDFGLFQLAGQRCIEEGHTDQLLEIIQNEKNKVIIKNMGWNLVGPVVRCLLCKDKEDSKRKVYFLIFDLLVKLCNPKELLLGLLELIEEPSGKQISQSILLLLQPLQTVIQKLHNKAYSIGLALSTLWNQLSLLPVPYSKEQIQMDDYGLCQCCKALIEFTKPFVEEVIDNKENSLENEKLKDELLKFCFKSLKCPLLTAQFFEQSEEGGNDPFRYFASEIIGFLSAIGHPFPKMIFNHGRKKRTWNYLEFEEEENKQLADSMASLAYLVFVQGIHIDQLPMVLSPLYLLQFNMGHIEVFLQRTEESVISKGLELLENSLLRIEDNSLLYQYLEIKSFLTVPQGLVKVMTLCPIETLRKKSLAMLQLYINKLDSQGKYTLFRCLLNTSNHSGVEAFIIQNIKNQIDMSLKRTRNNKWFTGPQLISLLDLVLFLPEGAETDLLQNSDRIMASLNLLRYLVIKDNENDNQTGLWTELGNIENNFLKPLHIGLNMSKAHYEAEIKNSQEAQKSKDLCSITVSGEEIPNMPPEMQLKVLHSALFTFDLIESVLARVEELIEIKTKSTSEENIGIK

SEQ ID NO: 336915 - DNA, 1785 bp, Artificial Sequence
  derived and/or modified sequence
atggccgtggaggagctgcagagcatcatcaagagatgccagatcctggaggagcaggacttcaaggaggaggacttcggcctgttccagctggccggccagagatgcatcgaggagggccacaccgaccagctgctggagatcatccagaacgagaagaacaaggtgatcatcaagaacatgggctggaacctggtgggccccgtggtgagatgcctgctgtgcaaggacaaggaggacagcaagagaaaggtgtacttcctgatcttcgacctgctggtgaagctgtgcaaccccaaggagctgctgctgggcctgctggagctgatcgaggagcccagcggcaagcagatcagccagagcatcctgctgctgctgcagcccctgcagaccgtgatccagaagctgcacaacaaggcctacagcatcggcctggccctgagcaccctgtggaaccagctgagcctgctgcccgtgccctacagcaaggagcagatccagatggacgactacggcctgtgccagtgctgcaaggccctgatcgagttcaccaagcccttcgtggaggaggtgatcgacaacaaggagaacagcctggagaacgagaagctgaaggacgagctgctgaagttctgcttcaagagcctgaagtgccccctgctgaccgcccagttcttcgagcagagcgaggagggcggcaacgaccccttcagatacttcgccagcgagatcatcggcttcctgagcgccatcggccaccccttccccaagatgatcttcaaccacggcagaaagaagagaacctggaactacctggagttcgaggaggaggagaacaagcagctggccgacagcatggccagcctggcctacctggtgttcgtgcagggcatccacatcgaccagctgcccatggtgctgagccccctgtacctgctgcagttcaacatgggccacatcgaggtgttcctgcagagaaccgaggagagcgtgatcagcaagggcctggagctgctggagaacagcctgctgagaatcgaggacaacagcctgctgtaccagtacctggagatcaagagcttcctgaccgtgccccagggcctggtgaaggtgatgaccctgtgccccatcgagaccctgagaaagaagagcctggccatgctgcagctgtacatcaacaagctggacagccagggcaagtacaccctgttcagatgcctgctgaacaccagcaaccacagcggcgtggaggccttcatcatccagaacatcaagaaccagatcgacatgagcctgaagagaaccagaaacaacaagtggttcaccggcccccagctgatcagcctgctggacctggtgctgttcctgcccgagggcgccgagaccgacctgctgcagaacagcgacagaatcatggccagcctgaacctgctgagatacctggtgatcaaggacaacgagaacgacaaccagaccggcctgtggaccgagctgggcaacatcgagaacaacttcctgaagcccctgcacatcggcctgaacatgagcaaggcccactacgaggccgagatcaagaacagccaggaggcccagaagagcaaggacctgtgcagcatcaccgtgagcggcgaggagatccccaacatgccccccgagatgcagctgaaggtgctgcacagcgccctgttcaccttcgacctgatcgagagcgtgctggccagagtggaggagctgatcgagatcaagaccaagagcaccagcgaggagaacatcggcatcaagtag

SEQ ID NO: 336916 - DNA, 1785 bp, Artificial Sequence
  derived and/or modified sequence
atggcagtggaagagctgcagtccatcattaagcgctgccagattctggaggaacaggatttcaaggaagaggactttggcctgtttcagctggcgggccaaaggtgtatcgaggagggccatacggaccaacttttggagatcatccaaaacgaaaagaataaagtaattattaagaacatgggctggaaccttgtcggaccggtggtgaggtgcctgctgtgtaaagacaaggaagacagcaagcgcaaggtgtatttcctcattttcgacctcctcgtcaagttatgcaacccgaaagagctattattgggcctcctggaacttatcgaagaaccttcaggcaaacagatcagccagtccatattgctgttgctacagccattgcaaacagtgattcagaaactgcataacaaggcttattccatcggtctggccctgagtacactatggaatcagttgagtctgctccctgtgccctactccaaagagcaaattcagatggatgattacggactgtgtcagtgctgtaaggcgttgattgagttcaccaagcccttcgtggaggaggtgattgacaacaaggaaaattctttagagaatgaaaaacttaaagatgagctcctgaaattttgttttaagtctcttaaatgtcctctcctgaccgcacagttctttgagcagtcagaagaaggtggcaatgacccattcaggtacttcgcttcagagataatcggcttcctctccgccattggccacccattcccaaagatgatatttaatcatggcagaaaaaagagaacatggaactatctggaatttgaagaggaggagaacaagcagctcgccgactccatggccagcctggcctatctggtcttcgtgcagggaatccatattgatcagctgcctatggttctgtctcctctgtatctccttcaattcaatatgggacacatagaggtgttcctgcagagaaccgaagagtcagtgatctctaaaggcctggagcttcttgagaacagcctcctgaggattgaggataactcgctgctttatcaataccttgagatcaaatcttttcttacagtgccccaggggcttgttaaggtaatgacactctgtcctatcgagaccctccgaaaaaaatctctggcaatgcttcagctgtatatcaataaactggactcacaaggcaaatacacgttgtttcgttgtctcttaaacacgagcaaccacagtggagtggaggcgttcatcatacaaaatatcaaaaatcagatcgacatgagtctgaagcggacacggaacaataaatggtttaccggccctcagttgatttcacttctggacctggtcctgttccttcccgaaggggccgaaacggatctgctgcagaactctgaccgcatcatggcttcattaaacttgctacgatatctggtcatcaaggacaatgagaatgacaatcaaactggcctttggactgagctcgggaacatcgaaaataacttccttaagccgttgcacataggcttgaatatgtctaaagcccactacgaagcagaaatcaagaatagtcaggaggcccagaagtccaaggacctgtgctctatcactgtgtccggcgaggagatccccaacatgcctcccgaaatgcagttgaaagtgttgcacagcgccttgtttaccttcgacttgatcgagagtgtactggcccgggttgaagaactgatcgagatcaaaaccaagagtacttcagaggaaaatatcggcattaaatag

SEQ ID NO: 336917 - DNA, 1785 bp, Artificial Sequence
  derived and/or modified sequence
atggctgtggaggagctgcagagcatcatcaagcgctgccagatcctggaggagcaggacttcaaggaggaggactttggcctcttccagctggccggccagcgctgcatcgaggagggccacacagaccagctgctggagatcatccagaatgagaagaacaaggtgatcatcaagaacatgggctggaacctggtgggccctgtggtgcgctgcctgctgtgcaaggacaaggaggacagcaagaggaaggtgtacttcctgatctttgacctgctggtgaagctgtgcaaccccaaggagctgctgctgggcctgctggagctgattgaggagcccagcggcaagcagatcagccagagcatcctgctgctgctgcagcccctgcagaccgtcatccagaagctgcacaacaaggcctacagcatcggcctggccctgagcaccctgtggaaccagctgagcctgctgcctgtgccctacagcaaggagcagatccagatggatgattatggcctgtgccagtgctgcaaggccctgattgagttcaccaagccctttgtggaggaggtgattgacaacaaggagaacagcctggagaatgagaagctgaaggatgagctgctgaagttctgcttcaagagcctgaagtgccccctgctgacagcccagttctttgagcagagcgaggagggcggcaatgaccccttccgctactttgccagcgagatcatcggcttcctgagcgccatcggccaccccttccccaagatgatcttcaaccacggcaggaagaagaggacctggaactacctggagtttgaggaggaggagaacaagcagctggccgacagcatggccagcctggcctacctggtgtttgtgcagggcatccacatcgaccagctgcccatggtgctgagccccctgtacctgctgcagttcaacatgggccacatcgaggtgttcctgcagaggacagaggagagcgtcatcagcaagggcctggagctgctggagaacagcctgctgagaattgaggacaacagcctgctgtaccagtacctggagatcaagagcttcctgactgtgccccagggcctggtgaaggtgatgaccctgtgccccatcgagaccctgaggaagaagagcctggccatgctgcagctgtacatcaacaagctggacagccagggcaagtacaccctcttccgctgcctgctgaacaccagcaaccacagcggcgtggaggccttcatcatccagaacatcaagaaccagattgacatgagcctgaagaggaccaggaacaacaagtggttcaccggcccccagctgatcagcctgctggacctggtgctcttcctgcctgagggcgctgagacagacctgctgcagaacagcgaccgcatcatggccagcctgaacctgctgcgctacctggtgatcaaggacaatgaaaatgacaaccagacaggcctgtggacagagctgggcaacatcgagaacaacttcctgaagcccctgcacatcggcctgaacatgagcaaggcccactatgaggccgagatcaagaacagccaggaggcccagaagagcaaggacctgtgcagcatcaccgtgtctggagaggagatccccaacatgcctcctgagatgcagctgaaggtgctgcacagcgccctcttcacctttgacctgattgagagcgtgctggcccgggtggaggagctgattgagatcaagaccaagagcaccagtgaagaaaatattggcatcaagtag

SEQ ID NO: 336918 - DNA, 1995 bp, Artificial Sequence
  derived and/or modified sequence
ctaagacgccggaggaggtggcggcggctgggagaggcgagggttctggccgattttagcatcgaaactaggagaaataagaatggctgtagaggaacttcagtctataataaagagatgtcaaatcctagaagagcaagactttaaagaagaggattttggcctatttcagttagctgggcaaagatgcatagaagaagggcacacagaccagctattagaaattattcaaaatgaaaagaataaggtcatcatcaagaatatgggctggaatctcgttggtcctgttgttcgatgccttttgtgtaaagataaagaggatagtaaaagaaaagtttattttttgatctttgatttattggtaaagttatgcaatccaaaggaattattgttgggtttgcttgaactgattgaagagccctctggaaaacagatatcccaaagtattcttcttttgcttcagccattacaaacagtgattcagaaacttcataacaaggcatattcaattggattagcattgtctaccctttggaatcagctatctcttcttcctgttccatactcaaaagaacaaatacaaatggatgactatggcctttgtcagtgttgcaaggccttaatagagttcactaagccttttgtggaagaagtcattgataacaaagaaaactcactggaaaatgaaaagttaaaggatgaattactgaaattttgtttcaaaagcttgaaatgccctttgctgacagcacaattctttgaacagtctgaagaaggtggaaatgatcctttcaggtattttgcatcagaaataataggttttttatcagcaattggacaccctttccccaaaatgatttttaatcatggaaggaaaaagagaacttggaattaccttgaatttgaagaagaagaaaataaacagttagcagactcaatggcttctctggcatatctagtatttgtacagggcatccatattgatcagcttccaatggtcttaagcccattgtaccttttgcagtttaatatggggcacattgaagtctttttgcaaagaacagaagagtctgttatctccaaaggattggagctgctggagaatagtttattgagaatagaagacaatagtctactttaccagtacttagaaatcaagagttttcttactgtacctcagggcttagtgaaagtaatgacactttgccccattgagacactgaggaaaaagagtttagctatgcttcagctgtatattaacaagttggattcacaaggcaaatatacattatttaggtgcttattgaatacaagtaatcactcaggtgtggaggcttttattattcaaaatatcaaaaatcaaattgacatgtcattaaagagaacacgtaacaacaaatggtttacaggaccacagttgatttcccttcttgatttggtactttttctcccagagggtgcagaaacagatttactgcaaaactcagataggattatggcttcattaaatttattgaggtatttggttatcaaagataatgaaaatgacaatcaaactggattatggacagaacttggaaatattgagaataatttcttaaagccacttcatataggacttaatatgtcaaaagcacattatgaagcagaaattaaaaatagccaagaggcccagaaatctaaagatctttgttctataactgtaagtggagaagagatccctaatatgcctcctgaaatgcagcttaaggtcctgcattcagctcttttcacatttgatttgattgaaagtgttctagctcgagtggaagaactcattgaaataaaaacaaagtctacctctgaagaaaatattgggataaagtgaaagttccatttcctaaataaaaactaataaaatatagtactttccattatgattcatttaatacctttataaaaaatttttctgtaaaaatttactgcttgaaaaataaatgtagcttttctcattta

SEQ ID NO: 336919 - DNA, 1785 bp, Artificial Sequence
  derived and/or modified sequence
atggccgtggaggagctgcagagcatcatcaagcggtgccagatcttggaggaacaggatttcaaagaggaggacttcggtttatttcagctagctgggcaaaggtgtattgaagagggacacacagaccagttgctggaaatcattcagaacgaaaagaataaggtgatcattaaaaacatgggctggaatctggttgggcccgttgtccggtgtttattgtgcaaggataaggaggactctaagcgaaaagtctactttctgattttcgatctgctcgttaaactgtgtaatcctaaagagctgttactggggctgcttgaactgatcgaggaaccaagtggtaaacagatctcgcagtccattctcctccttctgcagccactgcaaacagtgatacagaagctacataacaaagcctatagtattgggctcgctttatccacactttggaatcaactaagcctcttgcccgtcccctacagcaaagagcaaattcagatggacgattacgggctttgccagtgttgtaaggccttgattgaatttacaaaaccattcgttgaggaggttatcgacaacaaggagaatagcctagagaacgagaaactaaaggatgagttactcaagttctgctttaagagccttaagtgtccgctgctcactgcccagttcttcgaacagtccgaagaaggcggcaacgatcctttccggtactttgcttcagaaattatagggtttttgagcgcaatcggacatccttttccaaagatgattttcaatcacggccgaaagaagcgtacctggaattatctagagtttgaggaggaagaaaacaaacaactcgcagatagtatggcctcactggcctatctggtattcgttcagggtattcatatagatcagcttcccatggttctgtcacccctctacttactgcaattcaacatggggcatatagaggtgtttttgcagcgaacagaggagagcgtcatcagcaaggggctggagttgctggaaaattccttgctcaggattgaagataactccttgctgtatcagtatcttgagatcaaatctttcctgacagtcccacagggactcgtgaaggtcatgacgttatgccccatagaaacactcaggaagaagagtctcgccatgcttcagctgtatatcaacaaactcgatagccaggggaagtacacactattccgctgtcttctaaatacatccaaccactcaggagtggaggccttcattatccagaatattaaaaaccagatcgatatgtcgttaaaaagaactagaaataacaagtggtttactggaccgcagcttatttccctgctcgacctggtgttgtttctgcctgaaggggccgagacggatttgcttcagaattcagatcgcattatggcctctctgaatctgcttcgatacttggtcatcaaggataatgaaaatgacaaccagaccggactctggactgaattggggaacattgagaacaatttcttgaagccgctgcatattggactgaacatgtccaaggcacactacgaggccgagatcaagaattcacaggaggcacagaagagtaaagatctgtgctcaatcacagtgtccggcgaggaaatacccaacatgccgccagagatgcagctcaaagtgctgcattcagcgctgtttactttcgatttaattgagtccgtattggctcgggtggaggagctgatcgaaatcaagaccaaatccacttccgaagagaatataggcatcaagtag

SEQ ID NO: 336920 - DNA, 1785 bp, Artificial Sequence
  derived and/or modified sequence
atggccgttgaggagctgcaaagcattatcaagcgatgccagatcctggaggagcaagacttcaaagaggaggatttcggactctttcaactggccggacagcggtgcatcgaggagggccacaccgatcagttactcgaaattatacagaacgagaaaaataaggtcattatcaagaacatgggatggaaccttgtgggacctgtagtgcgttgtctactttgtaaggataaagaggattcaaaacggaaagtctacttcctgattttcgacctactcgtcaaactctgcaatcctaaggaactcttgttaggactgctagagctgatcgaggagccttcaggcaaacagataagtcaatcaattttgcttttgctgcagccattacagactgtgatccaaaagctccacaataaggcctacagcattggcctcgccctctccaccctatggaaccaactttccctgttgcctgttccctatagcaaggagcagatacaaatggatgattatgggctgtgccaatgctgcaaagcgttaatcgagttcacaaaacctttcgtggaggaggtgatcgacaacaaagaaaactctttagagaatgagaaattaaaggatgagctgcttaagttctgtttcaaaagcttaaaatgtccgctgctgactgcacagttctttgagcaaagcgaagaaggcggaaacgatccattccgctactttgcgagcgagattatagggtttctaagcgccatcgggcacccgttcccgaaaatgatctttaaccatggtcgcaagaaaagaacttggaactatctagaatttgaggaggaggagaacaagcagttggctgactccatggcctctttagcttaccttgtctttgttcagggaatccacatcgaccagctgcccatggtcttgagccccctatacttgcttcagttcaacatgggtcatatcgaggtgttcctccaaaggacggaggaaagtgtcatatccaaaggcctcgagctactcgagaactctctactcaggattgaggacaactccctgctgtatcagtacctcgagatcaagtcctttctaacagtgccccagggattggtcaaagtgatgacactgtgtcctatcgagactttaaggaagaaatcccttgccatgctccagctgtacataaacaagctggactcgcaaggaaagtataccctctttcgatgccttcttaatacgtccaaccattccggggtcgaagctttcattatccaaaacattaagaaccagatcgatatgtcactgaaacgaacacgcaacaacaaatggtttacaggaccacagctgatttctcttcttgatttggtgctcttcctgccggagggagccgaaacggatctgctccagaactccgatcgtataatggcatcactcaatctcctgcgatatctcgtaattaaggataatgaaaacgataaccaaacaggcctttggactgaactcgggaatatcgaaaacaatttccttaagccattgcacatcggactgaacatgtccaaagctcactacgaagccgagatcaagaactcccaggaagctcaaaagtcgaaggacctgtgcagtatcacagtgtccggggaggagatccccaatatgcccccagaaatgcagcttaaagtcctgcacagcgctctgtttacgtttgacctcattgaatctgtgctggccagggtggaggagttgatcgaaattaagacaaagtctacctctgaagagaatattgggataaagtag

SEQ ID NO: 336921 - DNA, 3147 bp, Artificial Sequence
  derived and/or modified sequence
cagccagtcctgagcacctaaccatgttgggcatcactgtcctcgctgcgctcttggcctgtgcaacacccggacctaccgtgtggccgtgggaaagaacaacctggaggtggaagacgaagaaggatccctgtttgtgggtgtggacaccatccacgtccacaagagatggaatgccctcctgttgcgcaatgatattgccctcatcaagcttgcagagcatgtggagctgagtgacaccatccaggtggcctgcctgccagagaaggactccctgctccccaaggactacccctgctatgtcaccggctggggccgcctctggaggggactccggtggcccactgaactgccagttggagaacggttcctgggaggtgtttggcatcgtcagctttggctcccggcggggctgcaacacccgcaagaagccggtagtctacacccgggtgtccgcctacatcgactggatcaacgagaaaatgcagctgtgatttgttgctgggagcggcggcagcgagtccctgcaacagcaataaacttccttctcctcgggccacctggatccttgatttgtgcagcttctgttgcttccctcctctctggtgctgcccctttccacactatggagccaaagagagaccccactcagccagtttcccccaccctgcattagacaggtggggaaacagaggccgggagagagggccaaggaaggagcctcctggggcattaatgggaggcagggggctggggtggagagcccagggagtcctgcgtgaagccggaggggatgggagtgaaggacgcatcagacaccttccccgctccatctcacaagctgcgaacaggtgagaccctgatgaaatcactcgcttctccgatcctacctccaccgaggggcctggcaggtcctcacagccccccagcagcaggtggaagacagggtctccccaaaagcagcgtcccccaggccagagagaccaggccacaggaggatggccaaagctcagggacaaccactcctggggaaggggctccctagcagggaccccccacccccaccccgcagcacagaccccatggctgctgttggcaggggctctctgctttgagaagtgtttagtgagccagcccctgtgtccagtcctgtgctgggcatgatgagggtacaggaagaggaagagaccccagcatcatcctcaggagacatacgtttgaagaaggcaatggtttccacacagaatcacagtggtcagagctggatatgctttcattgcattagacaagtggggaaactgaggcccagagagaggaaggagttgggatagctggcaatgcctgatccaggagaagagagttctcctgaggctgacaagaggccaagaggagccagagatgagatagacccagtgtccagggagggacatgccagtgggatcagaccctgatgacaggggcagccagagatgagagagatccaatgtccagggagggacatgccagggggatcagaccctgatgataggggcctctggcctggcctgctcctgggaatgtcctgttctgtgggggtgcccccagcccagcctctggacccctcgctggagagccctcggctgcagctacctcagactggcccaagagttgtcccttttctccaccagactttgtcccctgggagtggggaccatggtgtgactcccacacccccatgatgccaaggcaagtctcaggaaagacttgacttactcaacaagcagtgggagctacagggagcccagcaccacccagacccgggaatccaggatgggggtaccccagctgtgcaggagacagaccagtaaatagatcattaaattccctggtatacatttgaaaacagaaatacagaccagaagcatagaaacaggacacctgaagcagtgtcagttggcgggaggaatccaggatggcttcctggaggtgatgatgcccaagcttggtcttaaaatttgactagaaggtacccaagtacagaacgtagtccttcttaagtttgcttaatctaaacttcattcccacctatcctcttcttttttttttttttttttttgagacggagtcttgctctgatgcccaggctggagtgcagtggcacaatctcagctcactgcaacctccacctcccaggttcaagtgattcttctgcctcagcctcccaagtagctgggattacaggcacgcaccaccatgcacagctaattttttttttttttttttagacagagtctcgctctctcacctgggctgtagtgcagtggtgccatctcggctcactgcaagctccgcctcccaggttcacgccattctcctgcctcagcctcctgagtagctgggactacaggcgccagccaccatgcctggctaattttttttttttttgtatttttagcagagacggggtttcaccgtgttagccaggatggtctcgatctcctgatctcgtgatccacctgcctcggcctcccaaagtgctggcattacaggcgtgagccaccgtgcccggccccagctaatttttttgtatttttttagtagagatggggtttcaccatgtcgtccaggctggtctcaaactcctgacctcaggtgatctgcccgccttggcctcccaaagtactgggatcacaggtgtgagccaccacacccggtctcattcccagctatcttcttttgtgtatgtctttatattgggggttataaatgctaaatgcttgctgtcctcagatcccttgtagttagggagctaattaaaatgttaattaatattacaatgttatttaagcaatgttaaataatatctaacatttattgggcacttagtatgtgccaagcactatcctataggttttacattatctcaatccccagaaacaatcccatgaggtaggttactattaacatcatgcccattttacagatgagaaaactgaggccagacagggttagtgacttcccaatgtgtgaactagaaggtagtggagccggaatccagactttagtgatctgactccagggcctgtgctcttgtccaccatgctctgctgccctgcaatgtaaaacatcctccagaaaaaaaataaataaataaaaacttccctgatg

SEQ ID NO: 336922 - protein, 374 aa, Artificial Sequence
  derived and/or modified sequence
MAGYLSESDFVMVEEGFSTRDLLKELTLGASQATTDEVAAFFVADLGAIVRKHFCFLKCLPRVRPFYAVKCNSSPGVLKVLAQLGLGFSCANKAEMELVQHIGIPASKIICANPCKQIAQIKYAAKHGIQLLSFDNEMELAKVVKSHPSAKFVQQRGTACLIRMVLCIATDDSHSLSCLSLKFGVSLKSCRHLLENAKKHHVEVVGVSFHIGSGCPDPQAYAQSIADARLVFEMGTELGHKMHVLDLGGGFPGTEGAKVRFEEIASVINSALDLYFPEGCGVDIFAELGRYYVTSAFTVAVSIIAKKEVLLDQPGREEENGSTSKTIVYHLDEGVYGIFNSVLFDNICPTPILQKSKNHSPCYMSLESIHFIAV

SEQ ID NO: 336923 - protein, 204 aa, Artificial Sequence
  derived and/or modified sequence
MAGYLSESDFVMVEEGFSTRDLLKELTLGASQATTDEVAAFFVADLGAIVRKHFCFLKCLPRVRPFYAVKCNSSPGVLKVLAQLGLGFSCANKIASVINSALDLYFPEGCGVDIFAELGRYYVTSAFTVAVSIIAKKEVLLDQPGREEENGSTSKTIVYHLDEGVYGIFNSVLFDNICPTPILQKSKNHSPCYMSLESIHFIAV

SEQ ID NO: 336924 - DNA, 1125 bp, Artificial Sequence
  derived and/or modified sequence
atggccggctacctgagcgagagcgacttcgtgatggtggaggagggcttcagcaccagagacctgctgaaggagctgaccctgggcgccagccaggccaccaccgacgaggtggccgccttcttcgtggccgacctgggcgccatcgtgagaaagcacttctgcttcctgaagtgcctgcccagagtgagacccttctacgccgtgaagtgcaacagcagccccggcgtgctgaaggtgctggcccagctgggcctgggcttcagctgcgccaacaaggccgagatggagctggtgcagcacatcggcatccccgccagcaagatcatctgcgccaacccctgcaagcagatcgcccagatcaagtacgccgccaagcacggcatccagctgctgagcttcgacaacgagatggagctggccaaggtggtgaagagccaccccagcgccaagttcgtgcagcagagaggcaccgcctgcctgatcagaatggtgctgtgcatcgccaccgacgacagccacagcctgagctgcctgagcctgaagttcggcgtgagcctgaagagctgcagacacctgctggagaacgccaagaagcaccacgtggaggtggtgggcgtgagcttccacatcggcagcggctgccccgacccccaggcctacgcccagagcatcgccgacgccagactggtgttcgagatgggcaccgagctgggccacaagatgcacgtgctggacctgggcggcggcttccccggcaccgagggcgccaaggtgagattcgaggagatcgccagcgtgatcaacagcgccctggacctgtacttccccgagggctgcggcgtggacatcttcgccgagctgggcagatactacgtgaccagcgccttcaccgtggccgtgagcatcatcgccaagaaggaggtgctgctggaccagcccggcagagaggaggagaacggcagcaccagcaagaccatcgtgtaccacctggacgagggcgtgtacggcatcttcaacagcgtgctgttcgacaacatctgccccacccccatcctgcagaagagcaagaaccacagcccctgctacatgagcctggagagcatccacttcatcgccgtgtag

SEQ ID NO: 336925 - DNA, 615 bp, Artificial Sequence
  derived and/or modified sequence
atggccggctacctgagcgagagcgacttcgtgatggtggaggagggcttcagcaccagagacctgctgaaggagctgaccctgggcgccagccaggccaccaccgacgaggtggccgccttcttcgtggccgacctgggcgccatcgtgagaaagcacttctgcttcctgaagtgcctgcccagagtgagacccttctacgccgtgaagtgcaacagcagccccggcgtgctgaaggtgctggcccagctgggcctgggcttcagctgcgccaacaagatcgccagcgtgatcaacagcgccctggacctgtacttccccgagggctgcggcgtggacatcttcgccgagctgggcagatactacgtgaccagcgccttcaccgtggccgtgagcatcatcgccaagaaggaggtgctgctggaccagcccggcagagaggaggagaacggcagcaccagcaagaccatcgtgtaccacctggacgagggcgtgtacggcatcttcaacagcgtgctgttcgacaacatctgccccacccccatcctgcagaagagcaagaaccacagcccctgctacatgagcctggagagcatccacttcatcgccgtgtag

SEQ ID NO: 336926 - DNA, 1712 bp, Artificial Sequence
  derived and/or modified sequence
tgggcggggttatataagccagcggcgggcggaaggcggggcgtgggggtctgtggctgctgggctggcggggcgcaggccgcgggacccgagcccggggaagcgagagagcggaggcgccgaggatccgattcactccctggggagacctatgggccgaagccgtgtaaatgcgttttaagcagaggcctcggctccgcaactgccactcctcctcggggtgttgcacaagtttcgaggtcaccggcgaccccccctagcagcgcgcctggctctggcccccgcgaaggaggacggagtttggagcttgcggcccccacccaccgcgtggcgtccccaggcacgcctagaattctagcacctcaggatcagtccagcccccatttacaattggggaaactgcggctccgaaagggtcagagggtacccgaggtcaagcagtagagagcggactcgaacttaagctcttgctcttaggctgagacgccttgatgtggccaccggctaccctctagtgtgttgcatactttctaaggcggcggctgcagcagcggctccatccagcccgtcagctcctcctgcaaggcatggctggctacctgagtgaatcggactttgtgatggtggaggagggcttcagtacccgagacctgctgaaggaactcactctgggggcctcacaggccaccacggacgaggtagctgccttcttcgtggctgacctgggtgccatagtgaggaagcacttttgctttctgaagtgcctgccacgagtccggcccttttatgctgtcaagtgcaacagcagcccaggtgtgctgaaggttctggcccagctggggctgggctttagctgtgccaacaaggcagagatggagttggtccagcatattggaatccctgccagtaagatcatctgcgccaacccctgtaagcaaattgcacagatcaaatatgctgccaagcatgggatccagctgctgagctttgacaatgagatggagctggcaaaggtggtaaagagccaccccagtgccaagtttgtccagcagaggggcactgcgtgtctcatcaggatggttctgtgcattgctaccgatgactcccactccctgagctgcctgagcctaaagtttggagtgtcactgaaatcctgcagacacctgcttgaaaatgcgaagaagcaccatgtggaggtggtgggtgtgagttttcacattggcagtggctgtcctgaccctcaggcctatgctcagtccatcgcagacgcccggctcgtgtttgaaatgggcaccgagctgggtcacaagatgcacgttctggaccttggtggtggcttccctggcacagaaggggccaaagtgagatttgaagagattgcttccgtgatcaactcagccttggacctgtacttcccagagggctgtggcgtggacatctttgctgagctggggcgctactacgtgacctcggccttcactgtggcagtcagcatcattgccaagaaggaggttctgctagaccagcctggcagggaggaggaaaatggttccacctccaagaccatcgtgtaccaccttgatgagggcgtgtatgggatcttcaactcagtcctgtttgacaacatctgccctacccccatcctgcagaagtctaagaaccactcaccctgctacatgtctctagagtccattcatttcattgccgtgtag

SEQ ID NO: 336927 - DNA, 1202 bp, Artificial Sequence
  derived and/or modified sequence
tgggcggggttatataagccagcggcgggcggaaggcggggcgtgggggtctgtggctgctgggctggcggggcgcaggccgcgggacccgagcccggggaagcgagagagcggaggcgccgaggatccgattcactccctggggagacctatgggccgaagccgtgtaaatgcgttttaagcagaggcctcggctccgcaactgccactcctcctcggggtgttgcacaagtttcgaggtcaccggcgaccccccctagcagcgcgcctggctctggcccccgcgaaggaggacggagtttggagcttgcggcccccacccaccgcgtggcgtccccaggcacgcctagaattctagcacctcaggatcagtccagcccccatttacaattggggaaactgcggctccgaaagggtcagagggtacccgaggtcaagcagtagagagcggactcgaacttaagctcttgctcttaggctgagacgccttgatgtggccaccggctaccctctagtgtgttgcatactttctaaggcggcggctgcagcagcggctccatccagcccgtcagctcctcctgcaaggcatggctggctacctgagtgaatcggactttgtgatggtggaggagggcttcagtacccgagacctgctgaaggaactcactctgggggcctcacaggccaccacggacgaggtagctgccttcttcgtggctgacctgggtgccatagtgaggaagcacttttgctttctgaagtgcctgccacgagtccggcccttttatgctgtcaagtgcaacagcagcccaggtgtgctgaaggttctggcccagctggggctgggctttagctgtgccaacaagattgcttccgtgatcaactcagccttggacctgtacttcccagagggctgtggcgtggacatctttgctgagctggggcgctactacgtgacctcggccttcactgtggcagtcagcatcattgccaagaaggaggttctgctagaccagcctggcagggaggaggaaaatggttccacctccaagaccatcgtgtaccaccttgatgagggcgtgtatgggatcttcaactcagtcctgtttgacaacatctgccctacccccatcctgcagaagtctaagaaccactcaccctgctacatgtctctagagtccattcatttcattgccgtgtag

SEQ ID NO: 336928 - DNA, 1125 bp, Artificial Sequence
  derived and/or modified sequence
atggccgggtacctttcggagtccgacttcgttatggtagaagagggtttttccactcgggacttgctgaaagagctgacattaggagcatcccaggcgacgacagacgaggtcgcggccttctttgttgcagacttgggggccattgtgcgtaagcatttctgcttcctcaagtgcctaccacgggtgagaccattctacgccgtcaaatgcaattctagccctggggtcttgaaggtgctggctcaactcggccttggcttctcctgtgccaataaagcggagatggagctcgtgcagcatattgggattcccgcttctaaaattatttgtgctaacccgtgcaaacagattgcccaaattaagtacgccgccaagcatggaatccagctgctgtcattcgacaatgaaatggagctggctaaggtggtcaagagccacccctcagctaaatttgtgcagcagcggggaactgcctgtctgattaggatggtgctgtgtatagccaccgatgactcccattccctcagttgcctgtcactgaaattcggtgtgagcctgaaatcctgtcgtcaccttctggaaaacgccaaaaaacaccatgtggaggtggtcggcgtgagtttccacatcggatccgggtgtcccgaccctcaagcatacgcccaatctatagcggatgcccgactggtctttgaaatgggaacagaactgggtcataaaatgcacgtcctggacttaggcggcgggttccccggtactgagggtgccaaggttagatttgaggaaatcgcttctgtaatcaactctgctctcgacctctattttcccgaagggtgtggagtggatatctttgctgagctgggccgctattatgtgacatctgctttcaccgtggccgtatcaatcattgcaaaaaaggaggtgttgctcgaccagcctggaagggaggaggaaaatgggagcaccagtaaaaccatcgtgtatcatctggatgaaggagtgtacgggatcttcaattccgtgttgttcgataacatttgcccaacccccatcctccagaagagcaagaaccattccccctgttatatgtcattggagtctatccattttattgcagtgtag

SEQ ID NO: 336929 - DNA, 615 bp, Artificial Sequence
  derived and/or modified sequence
atggctggctacttaagtgagtccgactttgtgatggtcgaagaagggttttctactagagatctccttaaagagttgacgctgggagcttcccaggcaacgacagatgaagtcgcagccttcttcgttgctgatcttggcgcaatcgtgagaaagcacttttgctttctgaagtgtctccctcgcgtgcgtccgttctatgccgtcaagtgcaatagcagccccggtgtgctaaaggtgctggcccaactgggacttggcttcagttgtgcaaataaaatcgcctccgttatcaacagcgccctggatttgtatttccccgaggggtgtggcgtggatattttcgccgagctcggtagatactatgtcactagtgcattcactgtcgccgttagcatcatagccaagaaggaagtgctgctggatcagcctggtcgagaagaggaaaatggcagtacatcaaagacgattgtatatcatttagacgaaggagtgtacggtattttcaactcagtgctgttcgacaatatctgcccaactcccatcttacagaagtctaaaaatcatagtccgtgttacatgagtctggaatcgattcattttatcgccgtatag

SEQ ID NO: 336930 - DNA, 615 bp, Artificial Sequence
  derived and/or modified sequence
atggctgggtacctttccgagagcgatttcgtgatggtggaagagggtttttctacacgtgatttattgaaggagcttaccctgggcgccagccaggccactacagacgaggtcgctgccttttttgtcgccgacctcggcgctattgtgcgtaaacacttctgtttcttaaaatgtttgccacgggttagaccattttacgcggttaaatgcaatagctctcctggagttctcaaagtgctggcccaactgggactaggcttctcctgtgcaaacaaaattgccagcgttataaacagcgcactagatctgtacttcccggaaggatgcggagtcgacatctttgctgagctaggccgttattatgtcacaagcgctttcacggtggccgtcagtattatcgctaagaaggaagttctcttggaccagcccggtagagaagaagagaatgggtccacctcaaaaaccatcgtttatcacctggatgagggcgtgtacggcattttcaactcagtgctcttcgacaacatttgccccacacctatactgcagaaatcaaaaaaccatagcccatgttatatgagcctggaatctattcacttcattgctgtgtag

SEQ ID NO: 336931 - DNA, 616 bp, Artificial Sequence
  derived and/or modified sequence
atggctggctacctgagtgaatcggactttgtgatggtggaggagggcttcagtacccgagacctgctgaaggaactcactctgggggcctcacaggccaccacggacgaggtagctgccttcttcgtggctgacctgggtgccatagtgaggaagcacttttgctttctgaagtgcctgccacgagtccggcccttttatgctgtcaagtgcaacagcagcccaggtgtgctgaaggttctggcccagctggggctgggctttagctgtgccaacaagattgcttccgtgatcaactcagccttggacctgtacttcccagagggctgtggcgtggacatctttgctgagctggggcgctactacgtgacctcggccttcactgtggcagtcagcatcattgccaagaaggaggttctgctagaccagcctggcagggaggaggaaaatggttccacctccaagaccatcgtgtaccaccttgatgagggcgtgtatgggatcttcaactcagtcctgtttgacaacatctgccctacccccatcctgcagaagtctaagaaccactcaccctgctacatgtctctagagtccattcatttcattgccgtgtagc

SEQ ID NO: 336932 - DNA, 1125 bp, Artificial Sequence
  derived and/or modified sequence
atggccggctacctgtctgagagtgactttgtgatggtggaggagggcttcagcacccgggacctgctgaaggagctgaccctgggcgccagccaggccaccacagatgaggtggccgccttctttgtggccgacctgggcgccatcgtgaggaagcacttctgcttcctgaagtgcctgccccgggtgcggcccttctatgctgtgaagtgcaacagcagccctggggtgctgaaggtgctggcccagctgggcctgggcttcagctgtgccaacaaggccgagatggagctggtgcagcacatcggcatcccagccagcaagatcatctgtgccaacccctgcaagcagatcgcccagatcaagtatgctgccaagcacggcatccagctgctgagctttgacaatgagatggagctggccaaggtggtgaagagccaccccagcgccaagtttgtgcagcagaggggcacagcctgcctgatccgcatggtgctgtgcatcgccacagatgacagccacagcctgagctgcctgagcctgaagtttggagtgtccctgaagagctgccgccacctgctggagaatgccaagaagcaccacgtggaggtggtgggcgtgtccttccacatcggcagcggctgcccagacccccaggcctatgcccagagcattgctgatgcccggctggtgtttgagatgggcacagagctgggccacaagatgcacgtgctggacctgggcggcggcttccctggaacagagggcgccaaggtgcgctttgaggagatcgccagcgtcatcaacagcgccctggacctgtacttccctgagggctgcggcgtggacatctttgctgagctgggccgctactacgtgaccagcgccttcaccgtggccgtgtccatcatcgccaagaaggaggtgctgctggaccagcccggccgggaggaggagaatggcagcaccagcaagaccatcgtgtaccacctggatgagggcgtgtatggcatcttcaacagcgtgctgtttgacaacatctgccccacccccatcctgcagaagagcaagaaccacagcccctgctacatgagcctggagagcatccacttcatcgctgtgtag

SEQ ID NO: 336933 - DNA, 615 bp, Artificial Sequence
  derived and/or modified sequence
atggccggctacctgtctgagagtgactttgtgatggtggaggagggcttcagcacccgggacctgctgaaggagctgaccctgggcgccagccaggccaccacagatgaggtggccgccttctttgtggccgacctgggcgccatcgtgaggaagcacttctgcttcctgaagtgcctgccccgggtgcggcccttctatgctgtgaagtgcaacagcagccctggggtgctgaaggtgctggcccagctgggcctgggcttcagctgtgccaacaagatcgccagcgtcatcaacagcgccctggacctgtacttccctgagggctgcggcgtggacatctttgctgagctgggccgctactacgtgaccagcgccttcaccgtggccgtgtccatcatcgccaagaaggaggtgctgctggaccagcccggccgggaggaggagaatggcagcaccagcaagaccatcgtgtaccacctggatgagggcgtgtatggcatcttcaacagcgtgctgtttgacaacatctgccccacccccatcctgcagaagagcaagaaccacagcccctgctacatgagcctggagagcatccacttcatcgctgtgtag

SEQ ID NO: 336934 - DNA, 1125 bp, Artificial Sequence
  derived and/or modified sequence
atggccggctacctgagcgagagcgacttcgtgatggtggaggagggattcagcacaagagatttactgaaggaattaacgttaggagcctcgcaggcaaccaccgacgaagtcgctgccttttttgtcgcagatctcggggcaattgtgcgcaaacatttctgcttcctgaaatgcctgcccagagtgagacctttctacgcagtgaagtgcaattcctccccgggcgtactgaaggtgctagcccaactggggttgggcttctcttgcgcaaacaaggcggaaatggagctggtccagcacattggcatcccagctagcaagatcatctgtgctaatccttgcaagcagatcgcacagatcaaatatgcggctaaacacggtatccaattattgtcctttgacaatgagatggagctggctaaggtcgtgaagtcgcaccccagcgctaaatttgtgcagcagagaggtactgcgtgcctgatccgaatggtgctctgtattgccacggatgacagccattcgctgagttgcctgtccctgaagttcggggtgagtctgaagagctgccggcatctcttggagaacgctaaaaaacatcacgtggaagtggtgggagtcagtttccacattggaagcgggtgtccggatccccaggcatatgcacagtctattgccgatgcgaggctggtgtttgagatgggaactgaactaggtcacaagatgcacgtcttggacctcggtggcgggtttccaggcactgaaggcgctaaagtccggtttgaggagattgcgtctgtaattaattcagctctggatctgtatttcccagaggggtgtggcgttgatatctttgctgaactgggtcggtactatgtcacctccgccttcaccgttgccgttagcataattgccaaaaaagaagttctgttggatcagccaggacgggaggaagagaatgggagcacaagcaagacaatcgtatatcacttggatgaaggagtgtacggtattttcaatagtgtgctctttgacaatatttgtcctacaccgatcttgcagaagtccaaaaaccattccccgtgttacatgtccctagagagcatccacttcattgctgtctag

SEQ ID NO: 336935 - DNA, 615 bp, Artificial Sequence
  derived and/or modified sequence
atggccggctacctgagcgagagcgacttcgtgatggtggaggagggtttttctactcgcgatctactgaaagaactcactttaggagcaagccaggcaaccacagacgaagtggcggctttttttgtcgcagatttaggggctatagtgcggaaacacttctgctttctcaagtgtcttcctcgtgtcaggcctttttatgccgtcaagtgcaacagcagccccggagtcctgaaggtcctcgcacaactcggattagggttctcatgtgccaacaagatcgccagcgtcatcaatagcgccctggatctgtattttccggaaggttgcggagtggacattttcgccgaactaggcaggtactatgtgacctcagcttttacggtcgccgtctccatcatcgccaagaaagaagtgctcctggaccaacctggccgggaggaagagaacgggtccacgtccaagactattgtgtaccacctggacgagggcgtatacggcattttcaacagcgtactttttgacaatatctgtcccaccccgatcctacagaagagcaagaaccattcgccgtgttatatgagcctagagagcattcactttatcgccgtgtag

SEQ ID NO: 336936 - DNA, 615 bp, Artificial Sequence
  derived and/or modified sequence
atggccggctacctgagcgagagcgacttcgtgatggtggaggaggggttcagcacaagagatctgctcaaagaactgactctcggggcttcacaggcaaccacagacgaggtggctgcattttttgtggctgatcttggcgcaattgtccgtaaacacttctgctttctgaagtgcctgccacgcgtgaggcccttttacgccgtgaagtgtaactcctcaccaggcgtacttaaggtgctcgcgcaactgggcctagggttctcctgtgctaataaaatcgctagcgtaataaattcagcactggacctgtacttccccgagggctgtggagtggatatttttgctgagttgggcagatactacgtgacgagtgccttcacagtcgctgtgtccattatcgccaaaaaggaagtcctgctagatcaaccaggacgggaggaggagaacggcagcacatccaagacaatcgtgtaccatctcgacgagggtgtgtacggaatttttaatagcgtactgttcgacaatatctgccccacccccattctgcaaaaatccaagaaccactcgccctgttatatgtctctggagagtatccacttcattgctgtgtag

SEQ ID NO: 336937 - DNA, 1125 bp, Artificial Sequence
  derived and/or modified sequence
atggctggttatttatctgaatctgactttgttatggtcgaggagggattctctacgagagatctgttaaaggagctgacactcggggcatcccaggctacgacggatgaagtagccgctttttttgtcgccgatctcggagcaatcgtgaggaaacatttctgctttctaaaatgcctgcctcgggtgcgaccattttacgccgttaagtgcaacagcagccctggagttctgaaagtactggcccagctgggactgggattctcttgcgctaataaggcggagatggagttagtgcagcatattggaattcctgcttccaagattatttgtgcaaatccgtgcaagcagattgcccagattaagtatgccgctaaacacggcatccagctgttgtctttcgacaatgagatggaactggccaaggtggtcaagagccatccttccgccaagtttgtccagcagagagggacagcatgccttatacggatggtgttgtgcatcgcaactgatgattcccacagcctcagttgccttagtctcaagtttggtgttagtctcaaaagctgccgccatctgctggagaacgccaaaaaacaccacgttgaagtcgtcggggtcagtttccacattggcagtggctgccccgaccctcaggcttatgcccagagtatagctgatgccaggcttgtctttgaaatgggcaccgagttgggacacaagatgcatgttctggacttgggagggggttttcctgggacagaaggcgctaaagtgagattcgaagagattgcttccgttatcaactcagccctggatctgtacttccccgagggttgtggagtcgatatttttgctgagctgggaaggtattacgttacatcagcatttacagtggccgtgtctattattgccaaaaaggaagtgctgcttgaccaaccagggagagaggaggagaacgggtccacaagcaagactatagtttatcacctggatgaaggagtatacggaatctttaacagcgtcttatttgataacatttgcccaaccccgatactgcagaaatctaaaaaccattctccgtgctatatgtctctggagtccattcacttcatcgcagtttag

SEQ ID NO: 336938 - DNA, 615 bp, Artificial Sequence
  derived and/or modified sequence
atggccggttacttgtcagagagcgactttgtgatggttgaggaaggattttcaactcgggacctgctgaaggagctgacactgggcgcatcacaggctaccaccgacgaggtcgcagccttcttcgtggccgatctgggggcaattgtgagaaagcacttttgcttcttgaaatgcttgccgagagtgagacccttctacgcagtcaaatgcaactctagccctggtgtgttgaaggtcctggcgcaattgggactgggtttcagttgcgcaaataagatcgcttccgtaatcaacagtgcccttgacttgtattttccagaagggtgtggtgtggacatcttcgctgagttgggccgatattatgttacatccgcattcactgtggctgtgtcaatcattgcgaaaaaagaagttctcctggatcagcctggaagggaggaggagaatggctccaccagtaaaaccatcgtgtatcacctggatgagggtgtatatggcattttcaactctgtgctgttcgataatatatgcccgaccccaatcctgcagaagtccaaaaaccattccccatgctatatgtcgttagagtccatacacttcatagccgtttag

SEQ ID NO: 336939 - DNA, 615 bp, Artificial Sequence
  derived and/or modified sequence
atggccggatacctctctgaatcagacttcgtaatggtggaggagggattctccacgcgggacctgttgaaagagttgactctgggtgcctcgcaggcaacaaccgacgaggttgcggcttttttcgtggccgacttgggggcaatcgtgagaaaacatttttgctttcttaagtgcctgcctcgcgtgcgacctttttacgctgtcaagtgcaattcttcaccaggagtcctgaaagtcctggcacaactgggcttgggctttagctgtgctaacaagattgcaagtgtcataaattccgctctagacctctatttcccggaggggtgtggggttgatatctttgccgagctgggcagatactacgtgacctccgctttcacggttgctgtgtccataatcgctaaaaaggaggttctgttggatcagcctggcagagaggaggagaacggctctacgtcaaaaactatcgtctatcatctggatgagggggtctatgggatcttcaatagcgtcctattcgacaatatctgcccaactcctattcttcaaaaaagcaagaatcactccccctgttacatgtcactagagtctattcacttcatcgcggtttag

SEQ ID NO: 336940 - protein, 385 aa, Artificial Sequence
  derived and/or modified sequence
MPEYKGRTVLVRDAQEGSVTLQILDVRLEDQGSYRCLIQVGNLSKEDTVILQVAAPSVGSLSPSAVALAVILPVLVLLIMVCLCLIWKQRRAKEKLLYEHVTEVDNLLSDHAKEKGKLHKAVKKLRSELKLKRAAANSGWRRARLHFVAVTLDPDTAHPKLILSEDQRCVRLGDRRQPVPDNPQRFDFVVSILGSEYFTTGCHYWEVYVGDKTKWILGVCSESVSRKGKVTASPANGHWLLRQSRGNEYEALTSPQTSFRLKEPPRCVGIFLDYEAGVISFYNVTNKSHIFTFTHNFSGPLRPFFEPCLHDGGKNTAPLVICSELHKSEESIVPRPEGKGHANGDVSLKVNSSLLPPKAPELKDIILSLPPDLGPALQELKAPSF

SEQ ID NO: 336941 - protein, 475 aa, Artificial Sequence
  derived and/or modified sequence
MEMASSAGSWLSGCLIPLVFLRLSVHVSGHAGDAGKFHVALLGGTAELLCPLSLWPGTVPKEVRWLRSPFPQRSQAVHIFRDGKDQDEDLMPEYKGRTVLVRDAQEGSVTLQILDVRLEDQGSYRCLIQVGNLSKEDTVILQVAAPSVGSLSPSAVALAVILPVLVLLIMVCLCLIWKQRRAKEKLLYEHVTEVDNLLSDHAKEKGKLHKAVKKLRSELKLKRAAANSGWRRARLHFVAVTLDPDTAHPKLILSEDQRCVRLGDRRQPVPDNPQRFDFVVSILGSEYFTTGCHYWEVYVGDKTKWILGVCSESVSRKGKVTASPANGHWLLRQSRGNEYEALTSPQTSFRLKEPPRCVGIFLDYEAGVISFYNVTNKSHIFTFTHNFSGPLRPFFEPCLHDGGKNTAPLVICSELHKSEESIVPRPEGKGHANGDVSLKVNSSLLPPKAPELKDIILSLPPDLGPALQELKAPSF

SEQ ID NO: 336942 - DNA, 1158 bp, Artificial Sequence
  derived and/or modified sequence
atgcccgaatacaaagggcggaccgtgctggtaagagacgctcaggagggcagcgtgacgttgcagattctggacgttcgcctcgaggatcagggaagctacagatgcctcattcaagttgggaatcttagcaaggaagatacggtaatactgcaagtagctgctccctccgtggggagtttatcaccttccgcagttgcactagcagtgattctgcccgttctcgttctgctgattatggtttgtctgtgcctaatctggaagcagcggagggcgaaggaaaaactcttatatgaacacgtgaccgaggtggacaacctgttatctgatcatgctaaggagaaaggaaagctccacaaagcagtaaagaagctgcgcagtgagctcaaattaaagagggccgccgcaaattcagggtggcgaagagccaggttgcactttgtggccgtgacactcgaccccgacaccgcacacccaaaactcatcctatcggaagatcagcgatgcgtgaggttgggagaccggaggcagcccgtgccggacaaccctcagagattcgactttgtggtatccatcctggggtcagagtactttactacggggtgccactactgggaagtttatgtgggagataagactaagtggattctgggggtgtgttcagaatcagtttctcgaaaagggaaggtgactgcctcccctgccaatgggcactggctgctgcgccagtctagggggaatgaatacgaggctttaacaagtccgcaaacctcctttcggcttaaggagccaccccgctgcgtggggatctttctcgactacgaggccggagtcatctcattctataacgtgaccaacaagtcccacatttttactttcacccacaacttctcaggaccattgcggccatttttcgagccgtgcctccacgacggcggcaagaacactgcaccacttgtcatatgcagtgagctccacaagagcgaggagagtattgtcccgcggccagagggtaagggccatgccaacggagatgtcagtctgaaagtcaacagctcgctgttgcccccaaaggcacccgaactgaaggacatcatactcagtttaccgcccgatctcggacccgctttgcaagagcttaaggccccctccttttag

SEQ ID NO: 336943 - DNA, 1428 bp, Artificial Sequence
  derived and/or modified sequence
atggaaatggcctcctctgcaggatcttggctttcagggtgtctaatccccctcgtgttcctgagactctcagtgcacgtgtctggtcacgccggagacgctggaaaatttcacgtggccctcctaggggggacagccgaactgctgtgcccgctcagtttatggcctggtaccgtacccaaagaagtgcgttggctaagatccccctttcctcagagatcacaagcggtccacatattcagagacgggaaggatcaagatgaagacctaatgcctgagtacaagggaaggactgtgctagtgagagatgctcaggaaggcagtgtgactctccagatcctcgacgtgaggctcgaggaccagggctcataccgatgcctcatacaggtgggtaacctgagcaaggaggatacagtcattctacaggtggccgctccctccgtgggctctctatcaccgtccgccgtggccttggccgtcattttgccggtcctagtactcctgatcatggtttgcctgtgcctcatatggaagcaaagaagggccaaagaaaagctgttgtatgagcacgtgaccgaagtagataacctcctgtccgatcacgcaaaggagaaagggaagttacacaaggcagtgaaaaaactgagatcagagcttaagttgaaaagagccgcagccaactctggctggcgacgcgcacgcctccatttcgtcgcagtgacgttagacccagacacagctcatcccaagcttattctaagcgaagaccaacggtgcgtcaggcttggggataggagacagccagtcccagataatccccagcgcttcgactttgtcgtatccattctcggcagtgagtactttaccaccgggtgccactattgggaagtgtacgtgggcgataaaaccaagtggatcctcggcgtgtgttccgaatcagtgagtcggaaagggaaggtcaccgcatcccccgcaaatgggcattggctcttacggcaatcccggggaaatgaatacgaagcgttaacgagcccccagacctcctttagacttaaggaaccaccacgttgtgtcgggatattcctcgactatgaggcaggtgtaatctctttttataatgttacaaataagtcacacatctttacttttacgcataattttagtggccccctgaggccgttttttgaaccgtgcctgcacgacggaggaaaaaacaccgcccctcttgttatctgttcggagctccacaaatcagaggagtccatcgtcccacgccccgagggcaagggccacgctaacggtgacgtcagtcttaaggttaacagtagtctgctccccccgaaagccccggaattaaaagatataatcctcagcctgcctccagacctcggccccgccctgcaggaactgaaggccccatccttttag

SEQ ID NO: 336944 - DNA, 1428 bp, Artificial Sequence
  derived and/or modified sequence
atggaaatggcgtcatctgctggttcctggctgagcgggtgcctcattcccctcgtcttcctccggcttagtgtgcacgtctctgggcacgctggggacgctgggaaattccatgtggcactgctgggcgggactgccgagctcctgtgtcctttgagcctgtggcctgggacagtgcccaaggaggttcggtggttgaggagcccctttccacagcgatcgcaagctgtgcatatctttagggacgggaaagatcaggacgaggatctcatgccagaatataagggcaggacggtgctggtgagagacgcccaagaagggtctgtaaccttgcagatccttgacgtgagactcgaggaccagggcagctacagatgcttgattcaggttggtaacctgtccaaagaagatacagtcatcctccaagtggccgcaccaagtgtcggctcactctccccgagcgcagttgcattagcagtgattctgcctgtgttagtgctgttaatcatggtatgcttgtgccttatctggaaacagcgcagggcgaaagaaaaactactgtatgagcacgttactgaagtagacaacctgctgagtgaccatgccaaggaaaaaggaaagctgcacaaagcggtaaagaaattgcggtcagaacttaaactcaaacgggctgccgccaatagcggctggagaagggctcgcctccattttgtggccgtcaccctggatccagatactgcccatcccaaattgatactctcagaggaccagaggtgcgtccgtctgggagacagaagacagcctgtccctgataacccccagcgattcgacttcgtggtctctatcctgggatccgaatattttaccacggggtgtcactattgggaagtctacgtgggggacaaaactaagtggatcttaggggtctgctccgaatccgttagcaggaaaggcaaggtaaccgcctcacctgccaatggccattggctcctccgccagagtcgaggcaacgagtacgaggctctgacctcgcctcagacgagctttagattgaaggaacctccacgctgcgtgggcatatttctcgactacgaagctggtgttatctcgttttacaacgtcaccaataagtcccatatctttaccttcactcataatttttcaggacccctgaggccattctttgaaccatgtttgcacgacggcggaaaaaataccgctcccctcgttatttgttcagagctccacaaatctgaggaatctatcgtgccaagaccagagggtaagggtcacgccaatggggatgttagtctgaaggtcaattcttccctgctcccgccgaaagctcctgagctaaaagacataattttgtcattaccccctgatcttgggcccgccctgcaagagctgaaagctccctccttttag

SEQ ID NO: 336945 - DNA, 1158 bp, Artificial Sequence
  derived and/or modified sequence
atgcctgagtacaagggccgcacagtgctggtgagagatgcccaggagggctctgtgaccctgcagatcctggatgtgcggctggaggaccagggcagctaccgctgcctgatccaggtgggcaacctgagcaaggaggacaccgtcatcctgcaggtggccgcccccagcgtgggcagcctgagccccagcgctgtggccctggccgtcatcctgcctgtgctggtgctgctgatcatggtgtgcctgtgcctgatctggaagcagaggcgggccaaggagaagctgctgtatgagcacgtgacagaggtggacaacctgctgagtgaccacgccaaggagaagggcaagctgcacaaggctgtgaagaagctgcggtctgagctgaagctgaagagagctgctgccaacagcggctggaggcgggcccggctgcactttgtggccgtgaccctggaccctgacacagcccaccccaagctgatcctgtctgaggaccagagatgtgtgcggctgggggaccggcggcagcctgtgcctgacaacccccagagatttgattttgtggtgtccatcctgggcagcgagtacttcaccaccggctgccactactgggaggtgtatgtgggggacaagaccaagtggatcctgggcgtgtgcagcgagagcgtgtccaggaagggcaaggtgacagccagccctgccaacggccactggctgctgcggcagagcagaggaaatgaatatgaggccctgaccagcccccagaccagcttccggctgaaggagcccccaagatgtgtgggcatcttcctggactatgaggccggggtcatctccttctacaacgtgaccaacaagagccacatcttcaccttcacccacaacttcagcggccccctgcggcccttctttgagccctgcctgcatgatggcggcaagaacacagcccccctggtgatctgcagcgagctgcacaagtctgaggagagcatcgtgcccaggcctgagggcaaaggacatgccaatggagatgtgtccctgaaggtgaacagcagcctgctgccccccaaggcccctgagctgaaggacatcatcctgagcctgcccccagacctgggccctgccctgcaggagctgaaggcccccagcttctag

SEQ ID NO: 336946 - DNA, 1428 bp, Artificial Sequence
  derived and/or modified sequence
atggagatggccagcagcgctggctcctggctgagcggctgcctgatccccctggtgttcctgcggctgtctgtgcacgtgtctggccatgctggagatgctgggaagttccacgtggccctgctgggcggcacagctgagctgctgtgccccctgagcctgtggccaggcaccgtgcccaaggaggtgcgctggctgcggagccccttcccccagaggagccaggccgtgcacatcttcagagatggcaaggaccaggatgaggacctgatgcctgagtacaagggccgcacagtgctggtgagagatgcccaggagggctctgtgaccctgcagatcctggatgtgcggctggaggaccagggcagctaccgctgcctgatccaggtgggcaacctgagcaaggaggacaccgtcatcctgcaggtggccgcccccagcgtgggcagcctgagccccagcgctgtggccctggccgtcatcctgcctgtgctggtgctgctgatcatggtgtgcctgtgcctgatctggaagcagaggcgggccaaggagaagctgctgtatgagcacgtgacagaggtggacaacctgctgagtgaccacgccaaggagaagggcaagctgcacaaggctgtgaagaagctgcggtctgagctgaagctgaagagagctgctgccaacagcggctggaggcgggcccggctgcactttgtggccgtgaccctggaccctgacacagcccaccccaagctgatcctgtctgaggaccagagatgtgtgcggctgggggaccggcggcagcctgtgcctgacaacccccagagatttgattttgtggtgtccatcctgggcagcgagtacttcaccaccggctgccactactgggaggtgtatgtgggggacaagaccaagtggatcctgggcgtgtgcagcgagagcgtgtccaggaagggcaaggtgacagccagccctgccaacggccactggctgctgcggcagagcagaggaaatgaatatgaggccctgaccagcccccagaccagcttccggctgaaggagcccccaagatgtgtgggcatcttcctggactatgaggccggggtcatctccttctacaacgtgaccaacaagagccacatcttcaccttcacccacaacttcagcggccccctgcggcccttctttgagccctgcctgcatgatggcggcaagaacacagcccccctggtgatctgcagcgagctgcacaagtctgaggagagcatcgtgcccaggcctgagggcaaaggacatgccaatggagatgtgtccctgaaggtgaacagcagcctgctgccccccaaggcccctgagctgaaggacatcatcctgagcctgcccccagacctgggccctgccctgcaggagctgaaggcccccagcttctag

SEQ ID NO: 336947 - DNA, 1158 bp, Artificial Sequence
  derived and/or modified sequence
atgcccgagtacaagggccggaccgtgctggtgcgggacgcccaggaggggtccgtaacacttcaaattcttgacgtgagattagaagaccagggctcctatcgctgcttgattcaagtgggcaatttatccaaagaggatacagtcatcctgcaagtggccgcaccctctgtagggtcactgagccctagtgccgttgccctggctgttatcttacccgtgttggtcctgctgatcatggtctgcctgtgccttatatggaagcagcggagggcgaaggaaaagctgctttacgaacacgtaacagaggtggataacctattatctgatcatgccaaggagaaaggcaagctccacaaggccgtaaaaaagctcagaagtgaattgaaactgaaaagggctgccgccaactccggatggcggcgagcaagattgcactttgtggccgttaccctagatccggacacagcgcatccaaagcttatattatcagaggatcaaaggtgtgtgcgcctgggagacaggagacagccagtacctgataatccccagagatttgacttcgtggtctctatactcggctccgaatattttacaaccggatgtcactattgggaggtgtacgtaggagataaaactaaatggatccttggcgtgtgctctgaatcagtgagccggaaaggtaaggtgacggcttccccagccaatgggcattggcttctgcgccagtcaagagggaacgaatatgaagctcttacatctccccagactagctttcggctgaaggagccccccagatgtgtgggtattttcctggactatgaagccggcgtaataagtttctataatgttacaaacaaatcgcatatctttactttcacccacaacttctccgggcctctaaggcccttctttgaaccttgtttacacgatggcgggaaaaacaccgcacctctcgtgatctgtagcgagttgcacaagtcagaagagtccatcgtgccaagacccgagggcaaaggacatgctaacggggacgtaagcctgaaagtaaattcctctttgctaccgcctaaagctcccgaacttaaggacatcatcctatccctgccccccgaccttggtccagcactgcaggagctgaaagctccgagtttttag

SEQ ID NO: 336948 - DNA, 1428 bp, Artificial Sequence
  derived and/or modified sequence
atggagatggccagcagcgccggcagctggctgagcggctgcctgatccctttggtctttctaagattgagcgtgcacgtgtccggacacgcaggggatgctggcaaattccatgtggcattactcggaggcacagccgaactcttatgcccgctgagtctgtggccgggcacggtcccaaaagaggttcggtggctgcgtagtccattcccgcagaggtcgcaggcagtacacatcttcagggacggcaaagatcaggatgaggacctgatgcctgagtacaagggccggaccgtactggtgagggacgcccaggagggctcagtgaccttacagattttggatgtgcggcttgaggatcaagggagctacaggtgtcttattcaggtggggaatctgagcaaagaggacaccgtcattttacaagtggcagccccaagcgtgggatctctctccccctccgccgtcgcgctggcagtgatacttccagtgcttgtcctgttgataatggtgtgcctctgcctgatctggaaacagcggcgagcaaaagaaaagctgctttatgagcatgtcactgaggtggacaacctgctcagtgaccacgccaaggagaagggcaaactgcataaggcagttaagaagctgaggtctgaattgaagcttaaacgagctgcggccaactccggctggcggagggctcggcttcattttgtcgccgtgacgctggacccggacaccgcacacccgaagttaattcttagcgaggaccagcggtgcgtcaggctgggagacagaagacagccggtgccggacaatcctcagcggtttgactttgtggtctctatcctgggtagcgagtactttaccaccggatgtcattattgggaagtttacgtgggagataagacaaaatggattctcggcgtgtgttcggaaagcgtgagccggaagggaaaggtaacagcctctcctgctaacgggcattggctgttgcggcagagccgcggaaatgagtacgaagctcttactagcccccagactagcttccgcctgaaagagccccccagatgcgtggggattttcctggactacgaggctggcgtcatctcgttctacaacgtgactaataagtcacatatcttcacctttacacacaatttttctggaccactgcgtccattctttgaaccatgtcttcatgacggaggaaaaaacactgctcctctggtcatttgtagcgagcttcataaaagcgaagagtctatcgtcccaagacccgagggcaagggacacgccaacggggacgtgtccttaaaagtgaattcgagcttactgcccccgaaagcccctgagctaaaggacatcatcctgagtcttcccccagatttgggcccagcgctgcaggaactgaaggccccctccttctag

SEQ ID NO: 336949 - DNA, 1428 bp, Artificial Sequence
  derived and/or modified sequence
atggagatggccagcagcgccggcagctggctgagcggctgcctgatccccctagtgttcctgagactgagtgtacatgtgtcgggccatgccggcgatgctgggaaatttcacgtagccctgcttggagggacagccgagctcctgtgccccctgtccctatggccaggtacagtgcccaaggaagtcaggtggcttagatcaccgttcccacagcggtctcaggccgtccacatctttagagatgggaaggatcaagatgaggaccttatgcctgagtataaggggcgtaccgtgttagtaagagacgctcaggaaggtagcgtgaccctacaaattcttgatgtgcggctggaagaccaggggtcttatcggtgtcttattcaggtcggcaatctgtctaaggaagatactgtgatccttcaggtggcagcccccagcgtgggatctctcagtccttccgcggtggcacttgctgtgattcttcccgtgctggtgctcctaataatggtgtgtctgtgcctcatatggaagcagcgacgcgccaaggaaaagctcctgtatgagcacgtgacagaagtggataacttgctgtccgatcatgcaaaggagaaagggaagctgcacaaagctgtcaagaaactgaggtccgaactcaaactgaaacgtgccgctgccaattcaggctggagaagagcccgactccactttgttgcagttacgctggatcccgacacagctcatcccaaattgatcctctccgaggaccaacgctgcgtgcgcctaggagatcgccgtcagccggtgccagataacccgcaacggttcgatttcgtggtgtcgattctaggcagcgagtattttacaacaggctgccactactgggaagtgtatgtaggagataaaactaaatggatcctgggggtatgttcagaaagtgtaagccgaaagggaaaggtaaccgcgtctccagcaaacggacattggcttttaagacagtctaggggcaatgagtacgaggctctaacttccccccagacttcctttcgactaaaggaacctccccggtgcgtgggaatctttttggactacgaagccggagtgatcagcttttataacgtgaccaataagtctcatatattcacctttacacataacttcagcggaccactcagaccatttttcgagccctgcttgcacgacgggggcaagaacaccgccccattagtgatctgtagcgaactccacaaatcagaagaatctatcgtgccccgccccgagggaaaaggacacgcaaatggcgacgtgtccctgaaagtgaactcctctctgttgccaccgaaagcccctgaacttaaggatataattttgagccttcctccagacctgggcccagctttacaagaactcaaggctccctccttttag

SEQ ID NO: 336950 - DNA, 1158 bp, Artificial Sequence
  derived and/or modified sequence
atgccagagtacaagggcaggactgttcttgtgagggacgcacaggaaggttcggtgacgttacagatcctcgatgtgagactcgaggaccaggggtcctatcgctgtctgatccaggtgggcaatctgagtaaagaggacacagtgatcctgcaggtggcagcaccttctgtggggagtttgagcccctctgcagttgcgcttgctgtgattctgccggttttagtgctgctcataatggtctgcctgtgcctcatttggaaacaacgtcgggctaaggagaagctgctatacgaacacgtaacagaggtggataacctgcttagcgaccatgctaaagaaaagggcaagctacacaaagctgtcaaaaagttgcgcagcgagttgaagttgaaacgggctgctgcgaacagtggttggagacgggctcggttgcacttcgtcgcagtgacacttgaccccgacaccgcccaccctaaactcatcctgagcgaggaccagcgttgtgttcgactgggggacaggagacagcctgtgcccgataatccccagcgttttgattttgttgtttctatcctgggcagtgagtactttacgacaggttgccactattgggaggtgtatgtgggcgacaaaacaaagtggattctaggggtttgctccgaaagtgtgtcccgtaaaggcaaagtgacagctagcccggctaacggacactggctcttacggcagagccgcggaaatgaatatgaagcgctgacatcaccacagacttcttttagactcaaagaaccacctaggtgcgtgggcattttccttgattatgaggccggagtgatatctttttacaatgtgaccaacaagagtcacatctttacctttacacataatttttctggaccgctgcgccctttcttcgagccctgtttgcatgacggtgggaaaaacaccgctcctttggtaatctgtagcgagttgcacaagagcgaggagtccatcgtcccaaggcccgagggcaaggggcatgccaacggggatgtttccttgaaagtgaactctagcttactgccaccgaaggcccctgaactgaaggatattatccttagcctcccaccggacttggggccagccctgcaggaacttaaggcaccatctttctag

SEQ ID NO: 336951 - DNA, 1428 bp, Artificial Sequence
  derived and/or modified sequence
atggagatggccagcagtgccggaagctggctgtcaggttgtctgattcctctagtgtttttgcgtctgagtgtgcacgtatcagggcacgctggggatgccggtaagtttcacgttgcactgcttggaggtaccgctgagcttctgtgccccctgtctctatggccaggtaccgtccccaaggaggtgagatggctacgctctcccttcccccagcgatctcaagccgtgcacatcttccgagacggcaaggaccaagacgaagacttgatgcctgaatacaaaggcaggaccgtactcgtgcgcgacgcacaggagggttctgtgactctgcagattctggatgtcaggttggaggatcagggatcatacagatgcctcatccaggttgggaacctgtcaaaagaagacactgttatcctgcaggtggctgccccttcggtaggctctctgtctccttccgccgtggcactggccgtgatcctccccgttcttgtgctgctcattatggtctgtctctgtttgatctggaagcagcgtagagctaaggaaaagctgctatacgagcatgtgaccgaggtcgataaccttctctccgaccacgcaaaggagaagggcaaactgcacaaggcagtcaagaagctgagatcggaactcaaattgaaacgagctgctgctaattcgggctggcgaagagcaaggctgcatttcgtggctgtgacactggaccccgataccgctcatccgaagctcatactcagtgaagaccaaagatgcgtcaggctgggagaccggaggcagcccgtacccgacaatccacagcgcttcgactttgttgtctctatactgggctctgagtacttcaccactggctgccattactgggaggtttatgtaggtgacaaaacaaaatggatcctgggagtgtgctctgagtccgtgtcacgcaaggggaaggtgaccgccagtcccgctaacggccactggcttctccgtcagagtcgaggaaatgagtatgaagccctcacatcaccccaaaccagctttcgactgaaggaaccaccacggtgtgtgggcattttccttgattatgaggcaggcgttatttccttttacaacgtaactaacaagtcccatatattcacatttacacacaatttttcaggccctcttaggccatttttcgagccatgtcttcacgatgggggtaagaacaccgctcccctggtgatctgcagcgaactacacaagtctgaggagagcatagttcccaggcctgagggaaagggacacgcaaacggagacgtttcgctcaaggtcaactcatcccttttacctcccaaagcacccgaactgaaagacatcatccttagtctgcctcccgatctgggcccagcattacaggagctcaaagcaccctccttttag

SEQ ID NO: 336952 - DNA, 1428 bp, Artificial Sequence
  derived and/or modified sequence
atggaaatggcatcctcggcgggttcatggctgtccgggtgcctgatccctctggtatttctgcggctgtctgtgcatgtgtccggccacgcgggagatgcgggaaagttccatgtagcgctgcttgggggtaccgctgaactgctctgcccactgtcactgtggccagggacggtgcccaaggaggtgagatggttgcgaagtcccttcccacaacgcagtcaggcagttcatatctttagagacgggaaggatcaggatgaggacctcatgcccgaatataagggccgaactgtcctggtacgggacgcccaggagggctcggtgacactgcagatcctggatgtgagactggaagaccagggctcttacaggtgtcttatccaagtagggaacctcagtaaagaggacactgttatactgcaggtggcagcgcctagtgtcggatcacttagccctagcgctgtcgccttggccgtgatcctgccagtgctggtgctgctgattatggtctgcctgtgcctgatctggaaacagcgtagggccaaggaaaaattactgtatgagcacgtgactgaggtggataacctcctcagcgaccatgctaaggagaagggtaagctgcataaagccgtaaaaaaactcaggtctgagctaaaactaaaaagagctgcagccaattcgggctggcgccgtgcacgtctgcacttcgtggcagtgaccctggacccggataccgcacaccctaaactcattttatcagaagatcaaagatgtgtgcgcctgggagaccgtcgccaaccagttcctgacaatcctcaacgctttgacttcgttgtttccatcctcggcagcgagtattttacaacaggatgccattattgggaagtatacgtgggcgacaagaccaagtggatcttgggtgtctgcagcgagtcagtgtctcggaagggaaaagttaccgctagtcctgccaatggacactggctactgcgccagtcccgcggtaatgaatacgaagcccttaccagtccacagacaagtttccgccttaaagagccccctcgatgcgttggaatcttcctcgattacgaggccggagtgattagcttctataacgttaccaataagagtcacatcttcaccttcactcacaacttttccgggccactgcggcctttttttgagccctgcctgcacgacgggggaaaaaacacggcaccgttagtcatctgttctgagctgcataaaagtgaggagtcaatcgtgcctagaccagagggcaagggccatgccaacggggatgtctctcttaaggtgaatagcagtctgctaccgcctaaagcccctgaactgaaagatattattctatcgctgccaccagatctggggccagctctccaagagctcaaggcccctagcttctag

SEQ ID NO: 336953 - DNA, 1158 bp, Artificial Sequence
  derived and/or modified sequence
atgcccgagtacaagggcagaaccgtgctggtgagagacgcccaggagggcagcgtgaccctgcagatcctggacgtgagactggaggaccagggcagctacagatgcctgatccaggtgggcaacctgagcaaggaggacaccgtgatcctgcaggtggccgcccccagcgtgggcagcctgagccccagcgccgtggccctggccgtgatcctgcccgtgctggtgctgctgatcatggtgtgcctgtgcctgatctggaagcagagaagagccaaggagaagctgctgtacgagcacgtgaccgaggtggacaacctgctgagcgaccacgccaaggagaagggcaagctgcacaaggccgtgaagaagctgagaagcgagctgaagctgaagagagccgccgccaacagcggctggagaagagccagactgcacttcgtggccgtgaccctggaccccgacaccgcccaccccaagctgatcctgagcgaggaccagagatgcgtgagactgggcgacagaagacagcccgtgcccgacaacccccagagattcgacttcgtggtgagcatcctgggcagcgagtacttcaccaccggctgccactactgggaggtgtacgtgggcgacaagaccaagtggatcctgggcgtgtgcagcgagagcgtgagcagaaagggcaaggtgaccgccagccccgccaacggccactggctgctgagacagagcagaggcaacgagtacgaggccctgaccagcccccagaccagcttcagactgaaggagccccccagatgcgtgggcatcttcctggactacgaggccggcgtgatcagcttctacaacgtgaccaacaagagccacatcttcaccttcacccacaacttcagcggccccctgagacccttcttcgagccctgcctgcacgacggcggcaagaacaccgcccccctggtgatctgcagcgagctgcacaagagcgaggagagcatcgtgcccagacccgagggcaagggccacgccaacggcgacgtgagcctgaaggtgaacagcagcctgctgccccccaaggcccccgagctgaaggacatcatcctgagcctgccccccgacctgggccccgccctgcaggagctgaaggcccccagcttctag

SEQ ID NO: 336954 - DNA, 1428 bp, Artificial Sequence
  derived and/or modified sequence
atggagatggccagcagcgccggcagctggctgagcggctgcctgatccccctggtgttcctgagactgagcgtgcacgtgagcggccacgccggcgacgccggcaagttccacgtggccctgctgggcggcaccgccgagctgctgtgccccctgagcctgtggcccggcaccgtgcccaaggaggtgagatggctgagaagccccttcccccagagaagccaggccgtgcacatcttcagagacggcaaggaccaggacgaggacctgatgcccgagtacaagggcagaaccgtgctggtgagagacgcccaggagggcagcgtgaccctgcagatcctggacgtgagactggaggaccagggcagctacagatgcctgatccaggtgggcaacctgagcaaggaggacaccgtgatcctgcaggtggccgcccccagcgtgggcagcctgagccccagcgccgtggccctggccgtgatcctgcccgtgctggtgctgctgatcatggtgtgcctgtgcctgatctggaagcagagaagagccaaggagaagctgctgtacgagcacgtgaccgaggtggacaacctgctgagcgaccacgccaaggagaagggcaagctgcacaaggccgtgaagaagctgagaagcgagctgaagctgaagagagccgccgccaacagcggctggagaagagccagactgcacttcgtggccgtgaccctggaccccgacaccgcccaccccaagctgatcctgagcgaggaccagagatgcgtgagactgggcgacagaagacagcccgtgcccgacaacccccagagattcgacttcgtggtgagcatcctgggcagcgagtacttcaccaccggctgccactactgggaggtgtacgtgggcgacaagaccaagtggatcctgggcgtgtgcagcgagagcgtgagcagaaagggcaaggtgaccgccagccccgccaacggccactggctgctgagacagagcagaggcaacgagtacgaggccctgaccagcccccagaccagcttcagactgaaggagccccccagatgcgtgggcatcttcctggactacgaggccggcgtgatcagcttctacaacgtgaccaacaagagccacatcttcaccttcacccacaacttcagcggccccctgagacccttcttcgagccctgcctgcacgacggcggcaagaacaccgcccccctggtgatctgcagcgagctgcacaagagcgaggagagcatcgtgcccagacccgagggcaagggccacgccaacggcgacgtgagcctgaaggtgaacagcagcctgctgccccccaaggcccccgagctgaaggacatcatcctgagcctgccccccgacctgggccccgccctgcaggagctgaaggcccccagcttctag

SEQ ID NO: 336955 - DNA, 3949 bp, Artificial Sequence
  derived and/or modified sequence
ggagggacctcactgccttgatctgttatttatcaagagtcaaactggaaaaggctgtcagggaaacctccaggctgcatcttgggcaaagattggcttgaaacaggcatttcccaagcctggccttggacaccaactgtaaaaaaaaggccattactggtgtttccttggttagttctgggtataagttctggatcctcactcatctcatctgcactgacatcctcactcacggcatttagagacttaacacgccagcctctgtgtgagcatttacctctttcaaccctcaccataatcccacaaggaggcacagttcttttacccattttgaagatgaagaaacacagtctcagagaagttcggtcacagtatcacaaggaggtaagtagcagagctgggattggagccccggcctttgtgatcccagagcaccagcaataccgtctcggcctcggctcctgggttataccctctgtcacgccaagcccatcagcccgcttgtgctgtctccctctgtctgtcctagttcggatggagatggcgagttctgctggctcctggctctctggctgcctcatccctctcgtcttcctccggctgtctgtgcatgtgtcaggtaggagtttctgatcctctttccctgcctggtacatgtgatattggcgtccccagaataaggaagcttggctggaaacattatgtcttttggggttctgttcccccggccctggcaatcctttccagagtccttcctgggctctgtccgtccccgggatatcctcttcctcatcccttcccaagctttctcctgccgtccctcccagttggccttgtctctttttttgtccaggccacgcaggggatgccggcaagttccacgtggccctactagggggcacagccgagctgctctgccctctctccctctggcccgggacggtacccaaggaggtgaggtggctgcggtccccattcccgcagcgctcccaggctgttcacatattccgggatgggaaggaccaggatgaagatctgatgccggaatataaggggaggacggtgctagtgagagatgcccaagagggaagtgtcactctgcagatccttgacgtgcgccttgaggaccaagggtcttaccgatgtctgatccaagttggaaatctgagtaaagaggacaccgtgatcctgcaggttgcagccccatctgtggggagtctctccccctcagcagtggctctggctgtgatcctgcctgtcctggtacttctcatcatggtgtgcctttgccttatctggaagcaaagaagagcaaaagaaaagcttctctatgaacatgtgacggaggtggacaatcttctttcagaccatgctaaagaaaaaggaaaactccataaagctgtcaagaaactccggagtgaactgaagttgaaaagagctgcagcaaactcaggctggagaagagcccggttgcattttgtggcagtgaccctggacccagacacagcacatcccaaactcatcctttctgaggaccaaagatgtgtaaggcttggagacagacggcagcctgtacctgacaacccccagagatttgatttcgttgtcagcatcctaggctctgagtacttcacgactggctgccactactgggaggtgtatgtgggagacaagaccaaatggattcttggagtatgtagtgagtcagtgagcaggaaggggaaggttactgcctcacctgccaatggacactggcttctgcgacagagtcgtgggaatgagtatgaagctctcacatccccgcagacctccttccgccttaaagagcctccacggtgtgtggggattttcctggactatgaagcaggagtcatctctttctacaatgtgaccaacaagtcccacatctttactttcacccacaatttctctggcccccttcgccctttctttgaaccttgccttcatgatggaggaaaaaacacagcacctctagtcatttgttcagaactacacaaatcagaggaatcaattgtccccaggccagaagggaaaggccatgctaatggagatgtgtccctcaaggtgaactcttctttactacccccgaaggccccagagctgaaggatataatcctgtccttgccccctgaccttggcccagcccttcaggagctcaaggctccttctttttagggatatgccacattacctgctcccatcaccatccagcccagcaccctggacttcagtcgcctggcccaaccccatgattatggaacgtctcttcaccttaacccaaatccagacccttttgtggtttctatttgtaccacttttctcccaggcctcagttctgaagcttacctttcttctaaggaattgaagctcccagtgacctggagggaggattcctggaaaccaaacaatcagtttaggtgcaggtggagatgttgaatatgtgttaccaagatacagcacaggttcagggaaaagagttcgctactccaggggttatttagaagacactttctctgcctcatcctgccctcaagctttagtcaagaagttatggcccccagtccctgacttcttacttatcccattgaggactgcctttctctctctcagttctggcctctgccccccaaagtcagctctctaaaagcaagcatgttttagaccactcactctttccctctttcttcaggaatgaattgggaaaggctgatgagtaaaacataccatccttttctattttcttgatgctgtttacaacatagtttggtgatatccagagctaatgtacatgctttcaaaagctaatctgcctgttgatggtaactaggtacagcgactttaaatacagttgctataatcctgaaaagccccaggagcacatcagggagctgggaaacacagttgcagagaactcagctgtatgttgccctctgaccttggcccagaccttcagaggctcagtctgttgagtctgttgtgactgtcttatgaatcaatctgttgtgccaaccctttctgagattcagagaggtccagctagaaaaagtggcagttttaaccaccaacgtagaagcttttttttccccacaagaccattgtactgcaatacttgagtatttgtgtagcaaacagcctcttaggttggagagtattgatttcaaataggaagttggtagactaggtgtgaggatgaaataatgaccttgatttttgggtgtgtattgcagaagcctcgtcgctttcaagtcacatcatatatgcgatctggcctaaccatggagatattggttatcagtttgcagatgaatacacagttctatccaacagaaactgtatctttctgtttgtcagaagttctccgttagttcctgtattagtcaaggttttccagagaaacagaatcaatatatattggggcaggggggcggtggttattataaggaattggctcacgtgattatggaggcggttaaatcccaagatctgcaggataagtcagcaagatggagtcccatgagagctgatggtttagttccagtctgatggcagcaggcttgacgccaaggaagagatgatgtttaattcaagtccgaaggcaaggaaaaagctgatggtcctgtccaaaggctattaggcaggaagaattctcttagggcagagttagctcttttgttctattcaggccttcaactgattcagcaaggcccgcccacatttgggaggacagtctgcattactcagtctactgatttgaatgttaatgtcattgagaaacaccctcacaggaacactcagaataatgtttgaccaaatagctgggcatcttgtgacccagttaagtggatacataagattaactatcacagtgactcagtggaattttttgtttgcttttgtacagttttaaaataaaagtttggtatttgtg

SEQ ID NO: 336956 - DNA, 3369 bp, Artificial Sequence
  derived and/or modified sequence
cagagagagccctggcctctcatatttcataaaatatgaacttttcccggcccacatccctaggccttcctgatgcgcttgcctgctccctggtctctctgcatggggaaggagtgttcccagcttgcaaactccagctttgcctgtgagaggaacaagcgtccctgatccagaaggtgttcggatggagatggcgagttctgctggctcctggctctctggctgcctcatccctctcgtcttcctccggctgtctgtgcatgtgtcaggccacgcaggggatgccggcaagttccacgtggccctactagggggcacagccgagctgctctgccctctctccctctggcccgggacggtacccaaggaggtgaggtggctgcggtccccattcccgcagcgctcccaggctgttcacatattccgggatgggaaggaccaggatgaagatctgatgccggaatataaggggaggacggtgctagtgagagatgcccaagagggaagtgtcactctgcagatccttgacgtgcgccttgaggaccaagggtcttaccgatgtctgatccaagttggaaatctgagtaaagaggacaccgtgatcctgcaggttgcagccccatctgtggggagtctctccccctcagcagtggctctggctgtgatcctgcctgtcctggtacttctcatcatggtgtgcctttgccttatctggaagcaaagaagagcaaaagaaaagcttctctatgaacatgtgacggaggtggacaatcttctttcagaccatgctaaagaaaaaggaaaactccataaagctgtcaagaaactccggagtgaactgaagttgaaaagagctgcagcaaactcaggctggagaagagcccggttgcattttgtggcagtgaccctggacccagacacagcacatcccaaactcatcctttctgaggaccaaagatgtgtaaggcttggagacagacggcagcctgtacctgacaacccccagagatttgatttcgttgtcagcatcctaggctctgagtacttcacgactggctgccactactgggaggtgtatgtgggagacaagaccaaatggattcttggagtatgtagtgagtcagtgagcaggaaggggaaggttactgcctcacctgccaatggacactggcttctgcgacagagtcgtgggaatgagtatgaagctctcacatccccgcagacctccttccgccttaaagagcctccacggtgtgtggggattttcctggactatgaagcaggagtcatctctttctacaatgtgaccaacaagtcccacatctttactttcacccacaatttctctggcccccttcgccctttctttgaaccttgccttcatgatggaggaaaaaacacagcacctctagtcatttgttcagaactacacaaatcagaggaatcaattgtccccaggccagaagggaaaggccatgctaatggagatgtgtccctcaaggtgaactcttctttactacccccgaaggccccagagctgaaggatataatcctgtccttgccccctgaccttggcccagcccttcaggagctcaaggctccttctttttagggatatgccacattacctgctcccatcaccatccagcccagcaccctggacttcagtcgcctggcccaaccccatgattatggaacgtctcttcaccttaacccaaatccagacccttttgtggtttctatttgtaccacttttctcccaggcctcagttctgaagcttacctttcttctaaggaattgaagctcccagtgacctggagggaggattcctggaaaccaaacaatcagtttaggtgcaggtggagatgttgaatatgtgttaccaagatacagcacaggttcagggaaaagagttcgctactccaggggttatttagaagacactttctctgcctcatcctgccctcaagctttagtcaagaagttatggcccccagtccctgacttcttacttatcccattgaggactgcctttctctctctcagttctggcctctgccccccaaagtcagctctctaaaagcaagcatgttttagaccactcactctttccctctttcttcaggaatgaattgggaaaggctgatgagtaaaacataccatccttttctattttcttgatgctgtttacaacatagtttggtgatatccagagctaatgtacatgctttcaaaagctaatctgcctgttgatggtaactaggtacagcgactttaaatacagttgctataatcctgaaaagccccaggagcacatcagggagctgggaaacacagttgcagagaactcagctgtatgttgccctctgaccttggcccagaccttcagaggctcagtctgttgagtctgttgtgactgtcttatgaatcaatctgttgtgccaaccctttctgagattcagagaggtccagctagaaaaagtggcagttttaaccaccaacgtagaagcttttttttccccacaagaccattgtactgcaatacttgagtatttgtgtagcaaacagcctcttaggttggagagtattgatttcaaataggaagttggtagactaggtgtgaggatgaaataatgaccttgatttttgggtgtgtattgcagaagcctcgtcgctttcaagtcacatcatatatgcgatctggcctaaccatggagatattggttatcagtttgcagatgaatacacagttctatccaacagaaactgtatctttctgtttgtcagaagttctccgttagttcctgtattagtcaaggttttccagagaaacagaatcaatatatattggggcaggggggcggtggttattataaggaattggctcacgtgattatggaggcggttaaatcccaagatctgcaggataagtcagcaagatggagtcccatgagagctgatggtttagttccagtctgatggcagcaggcttgacgccaaggaagagatgatgtttaattcaagtccgaaggcaaggaaaaagctgatggtcctgtccaaaggctattaggcaggaagaattctcttagggcagagttagctcttttgttctattcaggccttcaactgattcagcaaggcccgcccacatttgggaggacagtctgcattactcagtctactgatttgaatgttaatgtcattgagaaacaccctcacaggaacactcagaataatgtttgaccaaatagctgggcatcttgtgacccagttaagtggatacataagattaactatcacagtgactcagtggaattttttgtttgcttttgtacagttttaaaataaaagtttggtatttgtgtttt

SEQ ID NO: 336957 - DNA, 3423 bp, Artificial Sequence
  derived and/or modified sequence
ctcctggaggaaaatggcggtcgctggagccgccgaccaagaggcttgggagtctgtacctttcccgaccgggccactggaagttggagcctccgccgagtcgcagacaacgcctccgggagggccttcctgatgcgcttgcctgctccctggtctctctgcatggggaaggagtgttcccagcttgcaaactccagctttgcctgtgagaggaacaagcgtccctgatccagaaggtgttcggatggagatggcgagttctgctggctcctggctctctggctgcctcatccctctcgtcttcctccggctgtctgtgcatgtgtcaggccacgcaggggatgccggcaagttccacgtggccctactagggggcacagccgagctgctctgccctctctccctctggcccgggacggtacccaaggaggtgaggtggctgcggtccccattcccgcagcgctcccaggctgttcacatattccgggatgggaaggaccaggatgaagatctgatgccggaatataaggggaggacggtgctagtgagagatgcccaagagggaagtgtcactctgcagatccttgacgtgcgccttgaggaccaagggtcttaccgatgtctgatccaagttggaaatctgagtaaagaggacaccgtgatcctgcaggttgcagccccatctgtggggagtctctccccctcagcagtggctctggctgtgatcctgcctgtcctggtacttctcatcatggtgtgcctttgccttatctggaagcaaagaagagcaaaagaaaagcttctctatgaacatgtgacggaggtggacaatcttctttcagaccatgctaaagaaaaaggaaaactccataaagctgtcaagaaactccggagtgaactgaagttgaaaagagctgcagcaaactcaggctggagaagagcccggttgcattttgtggcagtgaccctggacccagacacagcacatcccaaactcatcctttctgaggaccaaagatgtgtaaggcttggagacagacggcagcctgtacctgacaacccccagagatttgatttcgttgtcagcatcctaggctctgagtacttcacgactggctgccactactgggaggtgtatgtgggagacaagaccaaatggattcttggagtatgtagtgagtcagtgagcaggaaggggaaggttactgcctcacctgccaatggacactggcttctgcgacagagtcgtgggaatgagtatgaagctctcacatccccgcagacctccttccgccttaaagagcctccacggtgtgtggggattttcctggactatgaagcaggagtcatctctttctacaatgtgaccaacaagtcccacatctttactttcacccacaatttctctggcccccttcgccctttctttgaaccttgccttcatgatggaggaaaaaacacagcacctctagtcatttgttcagaactacacaaatcagaggaatcaattgtccccaggccagaagggaaaggccatgctaatggagatgtgtccctcaaggtgaactcttctttactacccccgaaggccccagagctgaaggatataatcctgtccttgccccctgaccttggcccagcccttcaggagctcaaggctccttctttttagggatatgccacattacctgctcccatcaccatccagcccagcaccctggacttcagtcgcctggcccaaccccatgattatggaacgtctcttcaccttaacccaaatccagacccttttgtggtttctatttgtaccacttttctcccaggcctcagttctgaagcttacctttcttctaaggaattgaagctcccagtgacctggagggaggattcctggaaaccaaacaatcagtttaggtgcaggtggagatgttgaatatgtgttaccaagatacagcacaggttcagggaaaagagttcgctactccaggggttatttagaagacactttctctgcctcatcctgccctcaagctttagtcaagaagttatggcccccagtccctgacttcttacttatcccattgaggactgcctttctctctctcagttctggcctctgccccccaaagtcagctctctaaaagcaagcatgttttagaccactcactctttccctctttcttcaggaatgaattgggaaaggctgatgagtaaaacataccatccttttctattttcttgatgctgtttacaacatagtttggtgatatccagagctaatgtacatgctttcaaaagctaatctgcctgttgatggtaactaggtacagcgactttaaatacagttgctataatcctgaaaagccccaggagcacatcagggagctgggaaacacagttgcagagaactcagctgtatgttgccctctgaccttggcccagaccttcagaggctcagtctgttgagtctgttgtgactgtcttatgaatcaatctgttgtgccaaccctttctgagattcagagaggtccagctagaaaaagtggcagttttaaccaccaacgtagaagcttttttttccccacaagaccattgtactgcaatacttgagtatttgtgtagcaaacagcctcttaggttggagagtattgatttcaaataggaagttggtagactaggtgtgaggatgaaataatgaccttgatttttgggtgtgtattgcagaagcctcgtcgctttcaagtcacatcatatatgcgatctggcctaaccatggagatattggttatcagtttgcagatgaatacacagttctatccaacagaaactgtatctttctgtttgtcagaagttctccgttagttcctgtattagtcaaggttttccagagaaacagaatcaatatatattggggcaggggggcggtggttattataaggaattggctcacgtgattatggaggcggttaaatcccaagatctgcaggataagtcagcaagatggagtcccatgagagctgatggtttagttccagtctgatggcagcaggcttgacgccaaggaagagatgatgtttaattcaagtccgaaggcaaggaaaaagctgatggtcctgtccaaaggctattaggcaggaagaattctcttagggcagagttagctcttttgttctattcaggccttcaactgattcagcaaggcccgcccacatttgggaggacagtctgcattactcagtctactgatttgaatgttaatgtcattgagaaacaccctcacaggaacactcagaataatgtttgaccaaatagctgggcatcttgtgacccagttaagtggatacataagattaactatcacagtgactcagtggaattttttgtttgcttttgtacagttttaaaataaaagtttggtatttg

SEQ ID NO: 336958 - protein, 426 aa, Artificial Sequence
  derived and/or modified sequence
MLGSFSGTTVPALLNSTSNQLYLHFYSDISVSAAGFHLEYKTVGLSSCPEPAVPSNGVKTGERYLVNDVVSFQCEPGYALQGHAHISCMPGTVRRWNYPPPLCIAQCGGTVEEMEGVILSPGFPGNYPSNMDCSWKIALPVGFGAHIQFLNFSTEPNHDYIEIRNGPYETSRMMGRFSGSELPSSLLSTSHETTVYFHSDHSQNRPGFKLEYQAYELQECPDPEPFANGIVRGAGYNVGQSVTFECLPGYQLTGHPVLTCQHGTNRNWDHPLPKCEVPCGGNITSSNGTVYSPGFPSPYSSSQDCVWLITVPIGHGVRLNLSLLQTEPSGDFITIWDGPQQTAPRLGVFTRSMAKKTVQSSSNQVLLKFHRDAATGGIFAIAFSDHCRYFNQKSGKLDFTPSSTLGQLCKTLHRSLPHLRLQFLHL

SEQ ID NO: 336959 - protein, 1167 aa, Artificial Sequence
  derived and/or modified sequence
MVIVILFPAECGNSVTGTQGTLLSPNFPVNYNNNHECIYSIQTQPGKGIQLKARAFELSEGDVLKVYDGNNNSARLLGVFSHSEMMGVTLNSTSSSLWLDFITDAENTSKGFELHFSSFELIKCEDPGTPKFGYKVHDEGHFAGSSVSFSCDPGYSLRGSEELLCLSGERRTWDRPLPTCVAECGGTVRGEVSGQVLSPGYPAPYEHNLNCIWTIEAEAGCTIGLHFLVFDTEEVHDVLRIWDGPVESGVLLKELSGPALPKDLHSTFNSVVLQFSTDFFTSKQGFAIQFSVSTATSCNDPGIPQNGSRSGDSWEAGDSTVFQCDPGYALQGSAEISCVKIENRFFWQPSPPTCIAPCGGDLTGPSGVILSPNYPEPYPPGKECDWKVTVSPDYVIALVFNIFNLEPGYDFLHIYDGRDSLSPLIGSFYGSQLPGRIESSSNSLFLAFRSDASVSNAGFVIDYTENPRESCFDPGSIKNGTRVGSDLKLGSSVTYYCHGGYEVEGTSTLSCILGPDGKPVWNNPRPVCTAPCGGQYVGSDGVVLSPNYPQNYTSGQICLYFVTVPKDYVVFGQFAFFHTALNDVVEVHDGHSQHSRLLSSLSGSHTGESLPLATSNQVLIKFSAKGLAPARGFHFVYQAVPRTSATQCSSVPEPRYGKRLGSDFSVGAIVRFECNSGYALQGSPEIECLPVPGALAQWNVSAPTCVVPCGGNLTERRGTILSPGFPEPYLNSLNCVWKIVVPEGAGIQIQVVSFVTEQNWDSLEVFDGADNTVTMLGSFSGTTVPALLNSTSNQLYLHFYSDISVSAAGFHLEYKTVGLSSCPEPAVPSNGVKTGERYLVNDVVSFQCEPGYALQGHAHISCMPGTVRRWNYPPPLCIAQCGGTVEEMEGVILSPGFPGNYPSNMDCSWKIALPVGFGAHIQFLNFSTEPNHDYIEIRNGPYETSRMMGRFSGSELPSSLLSTSHETTVYFHSDHSQNRPGFKLEYQAYELQECPDPEPFANGIVRGAGYNVGQSVTFECLPGYQLTGHPVLTCQHGTNRNWDHPLPKCEVPCGGNITSSNGTVYSPGFPSPYSSSQDCVWLITVPIGHGVRLNLSLLQTEPSGDFITIWDGPQQTAPRLGVFTRSMAKKTVQSSSNQVLLKFHRDAATGGIFAIAFSGHLAAVCTL

SEQ ID NO: 336960 - DNA, 1281 bp, Artificial Sequence
  derived and/or modified sequence
atgctgggctctttcagcggtactactgtgcccgccctgctgaactcaacttcgaaccagctgtatctgcacttttactctgacatctctgtgtccgccgccggctttcacctggagtacaaaaccgtgggtctctccagttgtcctgaaccagccgtgccatcaaacggggtcaagacgggcgaacggtatctggtgaatgacgtagtgtcttttcagtgtgaaccaggctacgccttacaaggtcacgctcacatctcctgtatgccaggcacagtgaggaggtggaattaccctccaccactctgcatagcccagtgtgggggaaccgtcgaagaaatggagggtgtcattctgtcccccggcttccctggtaactacccttccaacatggattgctcttggaaaatcgctttgcctgtcggattcggcgctcacattcaattccttaacttttccactgaaccaaaccacgactacattgaaatccggaacggcccctatgagacttctagaatgatggggagatttagtggatccgagctcccctccagtctgctcagcacatctcacgagactaccgtgtatttccatagcgatcattcgcagaataggcctggatttaagttggaatatcaggcctatgagctgcaggaatgtcccgacccagaaccctttgccaatggaatcgtgagaggggcaggctacaatgtgggacagagcgtcacttttgagtgcttgccgggctatcagttgactggtcatcccgtgttaacctgtcaacacggaacgaatcgcaattgggaccacccccttcctaagtgtgaagtgccgtgtggcggcaatattaccagctccaacggtacagtgtattcccctggctttccatctccatatagctccagccaggattgcgtgtggctgatcacagtacccatcggtcatggtgttcggctaaacctatcattgttacaaaccgagccatctggcgactttatcacaatctgggacggaccacagcagaccgcgccacggctgggtgtattcacccggtctatggctaagaagacggtacagtccagttccaaccaggtgctactgaaattccaccgggacgcagcgacaggaggaatctttgctatagcgttctctgatcactgccgatacttcaatcagaagagtgggaaactggactttacccctagctccaccctcggacagctctgtaaaacgctgcacagatccttaccacacctgcggctccaatttctgcacctctag

SEQ ID NO: 336961 - DNA, 1281 bp, Artificial Sequence
  derived and/or modified sequence
atgctggggagtttctccggaactactgttcccgcactccttaattcaacaagcaaccaactctatctgcacttttattctgatatttcagtgagcgccgcaggctttcatctcgagtacaaaacagttggactgtcgtcttgtcccgagcctgccgtccctagcaatggtgtcaagacaggcgaacggtatctggtgaacgacgtagtctcgtttcagtgcgaacccgggtatgcccttcaggggcatgcacacattagctgtatgcctggaaccgtcaggcgatggaactacccaccgcctctgtgcattgctcaatgtggcggcaccgtggaagagatggagggagtgattctttccccggggttccccggtaactacccttcaaacatggattgctcctggaagatcgctctgccggtgggtttcggagcacacattcagtttttaaacttctcaacagaacctaaccacgattatatagagatccgcaacggcccatacgagactagccgtatgatgggacgcttttccgggagtgaattgcctagcagtctcctgtcaacgagtcatgagaccaccgtgtactttcactcagatcatagtcagaatcgacccggtttcaaacttgagtaccaggcgtacgagctccaagaatgtcccgatcctgagccctttgcaaacggaattgtgcgcggcgcaggctataatgtcggacaatcggtcacatttgagtgcctgcctggctaccagctcaccggccacccagtgctcacgtgccagcatgggacaaatagaaattgggatcatcccctgcccaaatgcgaagttccatgcgggggcaacatcactagcagcaatggaacggtgtactctccgggcttcccttccccgtactcctcttctcaggattgtgtctggctaattaccgtgcctatcggtcacggtgtccgtctgaatcttagtctgttgcagacggagccttctggagactttattaccatctgggatggaccccaacagactgctcccaggctcggagtcttcactagatcaatggccaaaaaaactgtgcaaagttcatccaaccaggtccttctgaagtttcaccgcgacgccgccaccggtgggatctttgccattgctttcagtgaccactgtcgatatttcaatcagaaatctggtaaattggactttaccccctcctctaccctgggtcagctctgcaagactctccatcgttctttgcctcacctccggcttcagtttttgcatctctag

SEQ ID NO: 336962 - DNA, 1281 bp, Artificial Sequence
  derived and/or modified sequence
atgctgggcagcttcagcggcaccaccgtgcctgccctgctgaacagcaccagcaaccagctgtacctgcacttctacagcgacatctctgtgtctgctgctggcttccacctggagtacaagacagtgggcctgagcagctgcccagagcctgctgtgcccagcaatggagtgaagacaggagagcgctacctggtgaatgatgtggtgtccttccagtgtgagcccggctacgccctgcagggccacgcccacatcagctgcatgcctggcaccgtgcggcgctggaactaccccccacccctgtgcatcgcccagtgtggcggcaccgtggaggagatggagggcgtcatcctgagccctggcttccctggcaactaccccagcaacatggactgctcctggaagatcgccctgcctgtgggctttggagcccacatccagttcctgaacttcagcacagagcccaaccacgactacatcgagatcagaaatggcccctatgagaccagcaggatgatgggccgcttcagcggcagcgagctgcccagcagcctgctgagcaccagccatgagaccaccgtgtacttccacagcgaccacagccagaaccggcccggcttcaagctggagtaccaggcctatgagctgcaggagtgcccagaccctgagccctttgccaacggcatcgtgcggggggccggctacaacgtgggccagagcgtgacctttgaatgtctgcccggctaccagctgaccggccaccctgtgctgacctgccagcacggcaccaacagaaactgggaccaccccctgcccaagtgtgaggtgccctgtggcggcaacatcaccagcagcaatggaacagtgtacagccctggcttccccagcccctacagcagcagccaggactgtgtgtggctgatcaccgtgcccatcggccatggagtgcggctgaacctgagcctgctgcagacagagcccagcggggacttcatcaccatctgggatggcccccagcagacagccccccggctgggcgtcttcaccaggtccatggccaagaagacagtgcagagcagcagcaaccaggtgctgctgaagttccacagagatgctgccactggaggcatctttgccatcgccttcagtgaccactgccgctacttcaaccagaagagcggcaagctggacttcacccccagcagcaccctgggccagctgtgcaagaccctgcacaggagcctgccccacctgcggctgcagttcctgcacctgtag

SEQ ID NO: 336963 - DNA, 1281 bp, Artificial Sequence
  derived and/or modified sequence
atgctgggcagcttcagcggcaccaccgtgcccgccctgctgaactctacctcaaaccaattatatctccatttctactccgatattagtgtatcagccgctggattccaccttgagtataagaccgtgggattgagttcctgtcctgaacccgcagtaccttccaatggcgttaaaacaggggaacgttatctggtgaatgacgtggtctctttccaatgcgaaccagggtatgcccttcaaggacacgcccacataagctgcatgccgggtacggtccggcggtggaactatcctccacccctctgcatcgctcagtgtggcggcacagtcgaggagatggaaggagtgattctgagtcccggttttccggggaactacccatctaatatggactgttcatggaagattgcactgccggtcggcttcggagcccatatccagttcctgaatttctccactgaaccaaaccatgattacattgaaattaggaatgggccatacgagacttcacggatgatggggaggttttctggcagtgagctgcccagtagcctactgagtacatcccacgagaccactgtttattttcactccgatcactcacagaatcgccccggtttcaagctggaatatcaggcatatgaactacaagagtgccccgatcctgaaccgtttgctaacggcatagtgaggggggctggttacaacgtgggccagtctgtaacgtttgaatgccttcccgggtatcagctcaccggccaccctgttctgacgtgccagcacggcacaaacaggaactgggatcatccgctgccgaaatgcgaagtgccttgcggcgggaatattaccagctctaatggcaccgtgtatagcccggggttcccttctccttacagttcctcgcaggattgcgtctggctgatcaccgtgccaattggtcacggagtgagactaaacctgtccttactgcagaccgagccaagtggcgatttcatcacaatttgggacggcccccagcagacagcacctcggctgggggtgttcaccagaagcatggccaaaaagaccgtgcagagttcaagcaaccaagtcctgttgaaattccaccgcgatgccgccacgggtggtatctttgctatcgccttttctgatcactgccgctactttaaccagaagtcaggtaagctggacttcacacctagctctaccctcggacagctttgcaaaaccctgcacagatctttgccacatttaaggcttcagtttctgcatttatag

SEQ ID NO: 336964 - DNA, 1281 bp, Artificial Sequence
  derived and/or modified sequence
atgctgggcagcttcagcggcaccaccgtgcccgccctgctgaactctaccagtaaccaattatatctgcatttctactcagacataagcgtgtccgccgcaggtttccatttggaatacaagaccgtgggtctgagcagctgcccagaacccgcggtgccgtcaaacggtgttaaaaccggtgagagatatctggtaaatgatgtggtttccttccagtgtgagccaggatatgcccttcagggacatgcacacattagttgcatgcctgggactgtccgcaggtggaactacccaccgccactgtgtattgcccagtgcggaggaacagtcgaagaaatggagggcgtaatattgagtcccggatttccaggcaactacccaagtaacatggactgctcctggaagatcgccctgcctgttgggtttggggctcatattcagtttctgaattttagcaccgagcctaatcatgactacatcgagatcaggaatgggccctatgagacttcccgcatgatgggacggttttctgggtctgagctaccttcttcactcctgagcacaagccacgagaccaccgtatactttcacagcgaccactcccagaatcgacctggcttcaagttggaatatcaggcctacgagctgcaggaatgccctgatcccgagccttttgccaacgggattgttaggggcgccggctataatgtaggacagagcgtcacgttcgagtgtttgcccggttaccaactgaccggacacccagtgctaacatgccaacatggaactaatcgaaattgggatcatcctctgcctaagtgcgaggttccttgcggcggaaacatcacctcctcaaacggcactgtttactctcccggatttcctagcccatattcctctagtcaggattgtgtatggctgatcactgtgcctatcggtcacggggtgcggctgaatctgtctctcctccaaacagagcccagtggcgacttcattactatctgggatgggccacaacaaaccgcccctaggctcggcgtgtttacccgctccatggctaagaagacagtgcagagttcttctaatcaggtgctcctgaaatttcatagggatgccgccacaggcgggatctttgcaattgccttttccgaccattgtagatatttcaatcaaaaaagcggcaagcttgattttacaccatcttctacactaggccagctttgtaagaccctgcacagaagcctgcctcacctgagactccaatttttgcatctgtag

SEQ ID NO: 336965 - DNA, 1281 bp, Artificial Sequence
  derived and/or modified sequence
atgttgggatccttctcagggaccacggtgccagccctgctgaatagtaccagtaaccagctttacctccatttctattcagacatctccgtgtcagccgcaggatttcacctagaatataagactgtgggcctctcctcgtgccctgagcccgctgtaccatctaacggcgttaagacgggcgagcgttatctggtcaatgatgtggtttccttccagtgtgagcccggttacgccctgcagggccacgctcacattagctgtatgcccggtaccgtgaggcgctggaactatccgcctccgttgtgtatagcccagtgcggaggcaccgttgaggaaatggaaggagtcatcttatcccctggattcccaggaaattatcctagcaatatggattgttcgtggaaaattgccctccccgtaggcttcggtgcccatatccagtttctgaacttctccaccgaacctaatcatgactatatcgagattcggaatgggccttacgagacgtctagaatgatgggaaggttctctgggagcgagttgcccagttcattgctcagtacttctcacgagaccacagtgtactttcacagcgatcatagccagaacaggcccggatttaagctcgagtatcaggcgtacgagcttcaagagtgcccagatccggaacccttcgctaacggcattgtgcgcggagcaggatataatgtgggtcagtcagtcacattcgaatgtttgcctggttaccaactgactggccatccagttctgacctgccagcatggcaccaaccgcaattgggaccatccccttccaaaatgcgaggtgccatgcggaggcaatatcaccagttccaacggaaccgtatactcccctggattcccatccccttactccagctcgcaggattgcgtttggctcatcaccgttccaattgggcacggcgtaagactcaatctgtccctcttgcagaccgaaccttccggagactttatcacaatatgggacggcccacagcagactgcgccaaggctcggagtcttcacccggagcatggctaaaaagaccgtccagtctagtagcaatcaggtgcttctgaaatttcaccgcgatgcggctacgggagggatattcgccatcgcctttagcgatcactgccggtacttcaatcagaaatctgggaagctggactttaccccctcctccaccctggggcagctgtgtaaaacattacatcgtagtctccctcacctgcgactccagtttttacacctgtag

SEQ ID NO: 336966 - DNA, 1281 bp, Artificial Sequence
  derived and/or modified sequence
atgttgggtagtttttcaggcactaccgtaccggcactgctcaacagtacctcgaaccagctgtacctgcacttctatagcgacatctcggtttcagcggcaggtttccacctggaatacaagacagtgggcctatcgagctgccccgaacctgccgttccttccaatggcgttaagacaggagaacggtatcttgtgaacgacgttgtttccttccagtgcgaacccggttacgctctgcagggccatgcacacattagttgcatgccgggtacagtgcggcgatggaactacccgccacccctctgcatcgctcagtgtgggggaactgtcgaagagatggagggcgtgatcctaagccccggttttcccggaaattacccttcaaacatggactgttcatggaagattgcgctgccggtggggtttggggcacacatccagtttcttaacttttcgacagagccgaatcacgattacattgaaattcggaacggtccatacgaaacgtccagaatgatgggacgctttagtggctccgaactcccctcgtctctcctcagtacctcccatgaaacgactgtgtattttcacagcgatcactctcagaacaggccagggttcaagctggaataccaggcctacgagctccaggaatgccctgaccccgagccgttcgcaaacggaatagttcggggtgccggttacaacgtgggacagtcagtcacctttgaatgtctaccaggctatcagctgacgggtcatccagtgctcacatgccagcacggaacaaacagaaactgggatcacccacttccaaaatgtgaggttccttgcgggggtaacataacatcgtctaatgggactgtctactcgcccggattccccagcccatacagtagtagccaagattgcgtgtggctgatcaccgtgcctattggtcacggtgtgcggcttaacctgtcactgttgcaaacagagccatccggggacttcataacaatttgggacggaccacagcagactgctcccaggctgggagtcttcaccaggtccatggcaaagaaaactgtacagtcttccagcaaccaggtcttgttgaagtttcaccgtgatgccgcaacgggcggaatcttcgcaatcgcatttagcgatcactgtcggtatttcaaccagaagagcggtaaactcgatttcacgcctagtagcacacttggtcagttgtgtaaaacgctgcaccgctctctgcctcacctgagactgcagtttctacacttgtag

SEQ ID NO: 336967 - DNA, 1281 bp, Artificial Sequence
  derived and/or modified sequence
atgctgggcagcttcagcggcaccaccgtgcccgccctgctgaacagcaccagcaaccagctgtacctgcacttctacagcgacatcagcgtgagcgccgccggcttccacctggagtacaagaccgtgggcctgagcagctgccccgagcccgccgtgcccagcaacggcgtgaagaccggcgagagatacctggtgaacgacgtggtgagcttccagtgcgagcccggctacgccctgcagggccacgcccacatcagctgcatgcccggcaccgtgagaagatggaactaccccccccccctgtgcatcgcccagtgcggcggcaccgtggaggagatggagggcgtgatcctgagccccggcttccccggcaactaccccagcaacatggactgcagctggaagatcgccctgcccgtgggcttcggcgcccacatccagttcctgaacttcagcaccgagcccaaccacgactacatcgagatcagaaacggcccctacgagaccagcagaatgatgggcagattcagcggcagcgagctgcccagcagcctgctgagcaccagccacgagaccaccgtgtacttccacagcgaccacagccagaacagacccggcttcaagctggagtaccaggcctacgagctgcaggagtgccccgaccccgagcccttcgccaacggcatcgtgagaggcgccggctacaacgtgggccagagcgtgaccttcgagtgcctgcccggctaccagctgaccggccaccccgtgctgacctgccagcacggcaccaacagaaactgggaccaccccctgcccaagtgcgaggtgccctgcggcggcaacatcaccagcagcaacggcaccgtgtacagccccggcttccccagcccctacagcagcagccaggactgcgtgtggctgatcaccgtgcccatcggccacggcgtgagactgaacctgagcctgctgcagaccgagcccagcggcgacttcatcaccatctgggacggcccccagcagaccgcccccagactgggcgtgttcaccagaagcatggccaagaagaccgtgcagagcagcagcaaccaggtgctgctgaagttccacagagacgccgccaccggcggcatcttcgccatcgccttcagcgaccactgcagatacttcaaccagaagagcggcaagctggacttcacccccagcagcaccctgggccagctgtgcaagaccctgcacagaagcctgccccacctgagactgcagttcctgcacctgtag

SEQ ID NO: 336968 - DNA, 99 bp, Artificial Sequence
  derived and/or modified sequence
atggttgagtcaatcaagcattgtatagttctgctccaaatcgcgaaggatcaaagcaacgccgagaagcacgctgatggaatgatcgtatcgctatag

SEQ ID NO: 336969 - DNA, 99 bp, Artificial Sequence
  derived and/or modified sequence
atggtggagagcatcaagcactgcatcgtgctgctgcagatcgccaaggaccagagcaatgctgagaagcatgctgatggcatgattgtgtccctgtag

SEQ ID NO: 336970 - DNA, 99 bp, Artificial Sequence
  derived and/or modified sequence
atggtggagagcatcaagcactgcatcgtgctgctgcagatcgccaaagaccagagcaatgcggagaagcacgccgacggcatgattgtgagtctttag

SEQ ID NO: 336971 - DNA, 99 bp, Artificial Sequence
  derived and/or modified sequence
atggtggagagtatcaaacactgcatcgtgcttctgcagatagcgaaggatcagtcgaatgcggagaaacacgcggacggtatgatcgtatccctatag

SEQ ID NO: 336972 - DNA, 99 bp, Artificial Sequence
  derived and/or modified sequence
atggtggagagcatcaagcactgcatcgtgctgctgcagatcgccaaggaccagagcaacgccgagaagcacgccgacggcatgatcgtgagcctgtag

SEQ ID NO: 336973 - protein, 571 aa, Artificial Sequence
  derived and/or modified sequence
MVESIKHCIVLLQIAKDQSNAEKHADGMISTINPVDAIYQPSPLEPVISTMPSQTVLPPEPVQLCKSEQRPSSLPVGPVLATLGHHQTPTPNSTGSGHSPPSSSLTSPSHVNLSPNTVPEFSYSSSEDEFYDADEFHQSGSSPKRLIDSSGSASVLTHSSSGNSLKRPDTTESLNSSLSNGTSDADLFDSHDDRDDDAEAGSVEEHKSVIMHLLSQVRLGMDLTKVVLPTFILERRSLLEMYADFFAHPDLFVSISDQKDPKDRMVQVVKWYLSAFHAGRKGSVAKKPYNPILGEIFQCHWTLPNDTEENTELVSEGPVPWVSKNSVTFVAEQVSHHPPISAFYAECFNKKIQFNAHIWTKSKFLGMSIGVHNIGQGCVSCLDYDEHYILTFPNGYGRSILTVPWVELGGECNINCSKTGYSANIIFHTKPFYGGKKHRITAEIFSPNDKKSFCSIEGEWNGVMYAKYATGENTVFVDTKKLPIIKKKVRKLEDQNEYESRSLWKDVTFNLKIRDIDAATEAKHRLEERQRAEARERKEKEIQWETRLFHEDGECWVYDEPLLKRLGAAKH

SEQ ID NO: 336974 - DNA, 630 bp, Artificial Sequence
  derived and/or modified sequence
agtcaggaccgcctgcaccgcagtccggggatcgggtcgaggggagaagaaaaaggggtgctcgggagcagcccccggctacctcccctggaggcacagagggcgggggccttggcgaatggctttcttgctggccacttgcggagtgagtagaccccgagggtctgggagaggggccggcccctacccctgagtccccggggtcccggccgccaggccggagcgcgaatgtcgtgctcaccctgcctccttcccgccgccccctgggggtttggattcaggatttgttcctagtgtccaagattttgataagaaacttacagaagctgatgcttacctacaaatcttgattgaacaattaaagctttttgatgacaagcttcaaaactgcaaagaagatgaacagagaaagaaaattgaaactctcaaagagacaacaaatagatgggattctgctatgttgcctaggctggtctcctagcctcaagcgatcctccttccttggcctaccaaagcagtgggattacagagcatggtagaatcaattaaacactgcattgtgttgctgcagattgccaaagaccagagtaatgcggagaagcacgcagatggaatgatagtaagtttaat

SEQ ID NO: 336975 - protein, 180 aa, Artificial Sequence
  derived and/or modified sequence
MGDWMTVTDPGLSSESKTISQYTSETKMSPSSLYSQQVLCSSIPLSKNVHSFFSAFCTEDNIEQSISYLDQELTTFGFPSLYEESKGKETKRELNIVAVLNCMNELLVLQRKNLLAQENVETQNLKLGSDMDHLQSCYSKLKEQLETSRREMIGLQERDRQLQCKNRNLHQLLKNEKDEV

SEQ ID NO: 336976 - protein, 504 aa, Artificial Sequence
  derived and/or modified sequence
MGDWMTVTDPESKTISQYTSETKMSPSSLYSQQVLCSSIPLSKNVHSFFSAFCTEDNIEQSISYLDQELTTFGFPSLYEESKGKETKRELNIVAVLNCMNELLVLQRKNLLAQENVETQNLKLGSDMDHLQSCYSKLKEQLETSRREMIGLQERDRQLQCKNRNLHQLLKNEKDEVQKLQNIIASRATQYNHDMKRKEREYNKLKERLHQLVMNKKDKKIAMDILNYVGRADGKRGSWRTGKTEARNEDEMYKILLNDYEYRQKQILMENAELKKVLQQMKKEMISLLSPQKKKPRERVDDSTGTVISDVEEDAGELSRESMWDLSCETVREQLTNSIRKQWRILKSHVEKLDNQVSKVHLEGFNDEDVISRQDHEQETEKLELEIQQCKEMIKTQQQLLQQQLATAYDDDTTSLLRDCYLLEEKERLKEEWSLFKEQKKNFERERRSFTEAAIRLGLEIGFLLLSVLHKKSLLGIHHSSTVSRCGVRRQCNQDYICCLKKKGI

SEQ ID NO: 336977 - DNA, 543 bp, Artificial Sequence
  derived and/or modified sequence
atgggcgattggatgactgtcacggacccaggtctgagcagtgaatctaaaactatcagccaatatacttccgagacgaagatgtctccctcttccttgtattcacaacaggtgctgtgttcttccattccgctgagcaagaacgtccacagctttttcagcgctttctgcacggaggataacatcgaacaaagtatatcttaccttgaccaggagctcaccaccttcggttttccttctctctatgaagaaagcaagggtaaggaaacaaaacgcgagctaaatattgtggcagtcttgaactgcatgaatgagttgctagttctccagcgaaagaacctgctagcacaggaaaacgttgagactcagaacctaaaactggggtccgatatggaccacctccagagctgttacagcaagctgaaggagcagcttgaaacaagccgccgggaaatgataggactgcaggaaagggaccggcagctacagtgtaaaaatcgaaatctccaccagctgctgaagaacgagaaggacgaagtgtag

SEQ ID NO: 336978 - DNA, 1515 bp, Artificial Sequence
  derived and/or modified sequence
atgggagactggatgaccgtcacagaccctgaatcaaaaaccataagccaatacaccagcgaaactaaaatgagcccctccagtttgtatagccagcaagtgctatgttcaagcataccactgtccaaaaatgtgcatagctttttttccgccttttgtacagaggataacatcgaacagtctatcagttatctggatcaggaactgaccaccttcggatttccaagtctgtacgaagaatccaagggtaaggaaacgaagcgggagctgaacatagtagcggtgctaaactgtatgaacgaactgctagtactacagcgaaagaaccttttagctcaggaaaacgtggagacacagaacttgaaactaggatccgacatggaccacctgcaaagttgctacagcaagttgaaagagcagctggaaactagtaggagagagatgattggactgcaggaaagggatcgacagttgcagtgtaaaaaccggaacctacaccaactccttaagaacgagaaggacgaggtccagaagttgcagaatatcatcgcatcgagggccacgcagtataatcacgacatgaaacgaaaagagcgtgagtacaacaagttaaaagaacggctgcaccagctggtcatgaataaaaaggataaaaaaattgcgatggacatcttgaattacgtaggccgggcagacggcaagcgggggtcttggaggaccgggaagaccgaagcccgcaacgaggacgaaatgtacaaaatcctgctgaacgattatgagtatcgccagaaacagatcttaatggagaacgcggaactgaaaaaagtcctccagcagatgaaaaaagagatgattagtctgctgtccccccagaaaaagaagcccagggagcgggttgatgactccactggaactgtgatcagcgacgtggaggaggacgccggggaattgagtcgcgagtccatgtgggacctctcttgtgaaacggtccgagagcagcttaccaatagtattagaaagcaatggcgcattctgaagtctcacgtcgagaaactggataaccaagtgagtaaggtgcacctcgaggggttcaacgatgaggatgtgatctcccgccaggaccacgagcaggagaccgagaaactggaactcgaaatccaacagtgcaaagagatgattaagacccaacaacagcttcttcagcagcagctggcgacagcttatgatgacgacactacaagcctattgcgcgactgctatctcttggaagaaaaagagcgcctgaaggaagaatggagcctattcaaggagcaaaagaaaaacttcgagagggagcgccgaagttttaccgaggctgccatccggcttgggctggaaatcggatttttactgctgagtgtgctccacaagaagtccctgcttgggatacatcactcgagcaccgtcagtaggtgtggtgtaagacggcaatgtaatcaggattacatctgctgcctgaaaaaaaagggcatctag

SEQ ID NO: 336979 - DNA, 543 bp, Artificial Sequence
  derived and/or modified sequence
atgggagactggatgacagtgacagaccccggcctgagcagcgagagcaagaccatcagccagtacaccagcgagaccaagatgagccccagcagcctgtacagccagcaggtgctgtgcagcagcatccccctgagcaagaatgtgcacagcttcttcagcgccttctgcacagaggacaacatcgagcagagcatctcctacctggaccaggagctgaccaccttcggcttccccagcctgtatgaggagagcaagggcaaggagaccaagcgggagctgaacatcgtggccgtgctgaactgcatgaatgagctgctggtgctgcagaggaagaacctgctggcccaggagaatgtggagacccagaacctgaagctgggcagtgacatggaccacctgcagagctgctacagcaagctgaaggagcagctggagaccagcagaagagagatgattggcctgcaggagcgggaccggcagctgcagtgcaagaacagaaacctgcaccagctgctgaagaatgagaaggatgaggtgtag

SEQ ID NO: 336980 - DNA, 1515 bp, Artificial Sequence
  derived and/or modified sequence
atgggagactggatgacagtgacagatcctgagagcaagaccatcagccagtacaccagcgagaccaagatgagccccagcagcctgtacagccagcaggtgctgtgcagcagcatccccctgagcaagaatgtgcacagcttcttcagcgccttctgcacagaggacaacatcgagcagagcatctcctacctggaccaggagctgaccaccttcggcttccccagcctgtatgaggagagcaagggcaaggagaccaagcgggagctgaacatcgtggccgtgctgaactgcatgaatgagctgctggtgctgcagaggaagaacctgctggcccaggagaatgtggagacccagaacctgaagctgggcagtgacatggaccacctgcagagctgctacagcaagctgaaggagcagctggagaccagcagaagagagatgattggcctgcaggagcgggaccggcagctgcagtgcaagaacagaaacctgcaccagctgctgaagaatgagaaggatgaggtgcagaagctgcagaacatcatcgccagccgggccacccagtacaaccacgacatgaagaggaaggagcgggagtacaacaagctgaaggagcggctgcaccagctggtgatgaacaagaaggacaagaagatcgccatggacatcctgaactacgtgggccgggcagatggcaagaggggctcctggaggacaggcaagacagaggccagaaatgaagatgagatgtacaagatcctgctgaatgactatgagtaccggcagaagcagatcctgatggagaatgctgagctgaagaaggtgctgcagcagatgaagaaggagatgatcagcctgctgagcccccagaagaagaagccccgggagcgggtggatgacagcactggaacagtcatcagtgatgtggaggaggatgctggggagctgagccgggagagcatgtgggacctgagctgtgaaacagtgcgggagcagctgaccaacagcatcaggaagcagtggaggatcctgaagagccacgtggagaagctggacaaccaggtgtccaaggtgcacctggagggcttcaatgatgaagatgtgatcagccggcaggaccacgagcaggagacagagaagctggagctggagatccagcagtgcaaggagatgatcaagacccagcagcagctgctgcagcagcagctggccacagcctatgatgatgacaccaccagcctgctgcgggactgctacctgctggaggagaaggagcggctgaaggaggagtggagcctcttcaaggagcagaagaagaactttgagcgggagcggcgctccttcacagaggccgccatccggctgggcctggagatcggcttcctgctgctgtctgtgctgcacaagaagagcctgctgggcatccaccacagcagcacagtgagccgctgtggggtgcggcggcagtgcaaccaggactacatctgctgcctgaagaagaagggcatctag

SEQ ID NO: 336981 - DNA, 543 bp, Artificial Sequence
  derived and/or modified sequence
atgggcgactggatgaccgtgaccgaccccggcctgagcagcgagtcaaagacaatcagccagtacacatcagaaacaaagatgtccccatcctccctctactcgcaacaggtcctctgctccagcataccactgtcaaaaaacgtacatagtttcttctctgccttctgtacagaggacaatatcgagcaatccataagctatcttgatcaagagctcacgacattcggtttcccaagtctctacgaggaaagcaagggcaaggagaccaagagagagctcaacatcgttgcagtgctgaattgtatgaatgagcttctggttctgcaacgcaaaaatctgctggcccaggaaaatgtggagacccagaacttaaagctcggatctgatatggaccatctgcaatcttgctacagcaaactcaaagaacaacttgaaacctctcggcgggagatgattgggctgcaggaaagggataggcagttgcaatgtaagaatagaaatctccaccaattactcaagaatgaaaaggatgaagtgtag

SEQ ID NO: 336982 - DNA, 1515 bp, Artificial Sequence
  derived and/or modified sequence
atgggcgactggatgaccgtgaccgaccccgagagcaagaccatctcgcagtatacctctgaaactaagatgtcaccttcttcgctctactcacaacaagtcctgtgttcgagtatcccgctcagcaagaatgtgcattcttttttttccgctttttgtaccgaagacaatatcgagcagagcatttcatatcttgatcaggagttgacaacgttcggttttccaagcctctatgaagagtctaagggaaaagagaccaaacgggaacttaatatcgtcgccgtgcttaactgcatgaacgagctgcttgtcttgcagaggaagaacctgctcgcccaggagaacgtggaaactcaaaaccttaagttgggaagtgacatggaccacttgcagagttgctattcgaagctgaaggaacagcttgagacatccaggcgggagatgatcggcctacaagaacgagaccggcagcttcagtgcaagaatagaaatttacaccagctgctgaaaaacgaaaaggacgaggttcagaagttgcagaatatcatcgcctccagggctacccagtacaatcatgatatgaaacgcaaggagcgcgaatataataaactcaaggagcggctccaccagctcgttatgaacaagaaggataaaaagatcgctatggatatcctcaactacgtaggccgtgcagacgggaagagaggcagttggagaaccggcaagaccgaagcgcggaacgaggatgagatgtataagatcttgctgaatgattacgaatatagacagaaacagattctgatggaaaacgccgaattaaagaaagtgctgcagcagatgaagaaggaaatgatcagtcttcttagcccccagaaaaagaaaccaagggagcgagtggacgactccacaggcactgtgatcagtgatgttgaggaagatgccggggaactcagcagagaaagtatgtgggatctctcttgtgaaactgtaagggagcagctgactaatagcatcaggaagcagtggcggattttgaagtctcatgtagagaaactggacaatcaggttagtaaggtgcacctagagggttttaacgatgaggatgtgatatccaggcaggaccatgaacaagagacagaaaagctggaattagagattcagcagtgcaaggagatgattaaaacccagcagcagctgctgcagcagcagcttgccactgcttatgacgatgatactacgtccctgctccgcgactgttatctgctggaagaaaaagagcgactcaaagaagaatggagcttgttcaaagaacagaagaagaatttcgagcgagagcgccgaagctttacggaggcggcgatcagactgggactcgagataggattccttctcctaagtgtgctgcataagaaatctttgctggggatacaccattcttctactgtcagccgttgcggagtgcggcgccagtgcaaccaagattacatttgctgtctgaagaaaaagggtatctag

SEQ ID NO: 336983 - DNA, 759 bp, Artificial Sequence
  derived and/or modified sequence
agaagggggcggggagcagaaaacggccgggtgaatcactgggcgtaacaggtgccgcagccgcagctgcgcccgcagcgcgcgcggaccgcagggataaggtcttctttttctccgggtttttttggaggagatgcctacatagaagagtgacagcagctagactaaatgtttaactgctgaactagttcctcaggtatcctggctctagagattgctatgggagattggatgactgttacagatccaggtctgtcttcagaaagcaaaactatctctcaatatacctcagaaacaaagatgtctccatcaagtttatactcacagcaagtgctatgttcttcaatacctttatcgaaaaatgtgcacagttttttcagtgccttctgcacagaagataatattgaacagagtatctcatatcttgatcaggaattgactacttttggttttccttcattatatgaagaatccaaaggtaaagagacaaagagagagttaaatatagtagctgtactaaattgtatgaatgagctgcttgtgcttcagcggaagaaccttctagctcaggaaaatgtggagacacagaatttgaagctgggaagtgatatggaccatctacagagctgctactcaaaacttaaggaacaactggaaacctccaggagggaaatgattgggcttcaggaaagagacagacagttacaatgtaagaacaggaatttgcatcagctactaaagaatgagaaagatgaggtg

SEQ ID NO: 336984 - DNA, 2138 bp, Artificial Sequence
  derived and/or modified sequence
gagatgcctacatagaagagtgacagcagctagactaaatgtttaactgctgaactagttcctcaggtatcctggctctagagattgctatgggagattggatgactgttacagatccagaaagcaaaactatctctcaatatacctcagaaacaaagatgtctccatcaagtttatactcacagcaagtgctatgttcttcaatacctttatcgaaaaatgtgcacagttttttcagtgccttctgcacagaagataatattgaacagagtatctcatatcttgatcaggaattgactacttttggttttccttcattatatgaagaatccaaaggtaaagagacaaagagagagttaaatatagtagctgtactaaattgtatgaatgagctgcttgtgcttcagcggaagaaccttctagctcaggaaaatgtggagacacagaatttgaagctgggaagtgatatggaccatctacagagctgctactcaaaacttaaggaacaactggaaacctccaggagggaaatgattgggcttcaggaaagagacagacagttacaatgtaagaacaggaatttgcatcagctactaaagaatgagaaagatgaggtgcaaaaattacaaaatatcattgcaagtcgagctactcagtataatcatgatatgaagagaaaagagcgtgaatataataaactgaaggaacgtctacatcaacttgttatgaacaagaaagataagaaaatagctatggacattttgaattatgtcgggagagctgatggaaaaagaggctcctggaggactggtaaaactgaagccaggaatgaagatgaaatgtataaaattctcttgaatgattatgaatatcgtcagaaacaaatcctaatggaaaatgcagaacttaagaaggttcttcaacaaatgaaaaaggaaatgatttctcttctttctccccaaaagaagaaacctagagaaagagtagatgatagtacaggaactgttatttccgatgttgaagaagatgccggggaactaagcagagagagtatgtgggacctttcctgtgaaactgtgagagagcagcttacaaacagcatcagaaaacagtggagaattttgaaaagtcatgtagaaaagcttgataaccaagtttcaaaggtacacctggaaggttttaatgatgaagatgtaatctcacgacaagaccatgaacaagaaactgaaaaactcgagttagaaattcagcagtgtaaagaaatgattaaaactcagcaacagcttttacagcagcagctcgctactgcatatgatgatgataccacttcactattacgagactgttatttgttggaagaaaaggaacgtctcaaagaagaatggtccctttttaaagagcagaaaaagaattttgagagggagagacgaagctttacagaagccgctattcgcctgggattggagattggctttctcctgctaagtgttttacacaagaaatctcttttgggtatccatcattcatccacggtcagtaggtgtggtgtcagaagacagtgcaaccaagactatatttgctgtttaaaaaagaaaggcatttgaagaagaaagagccagttggttaaagcagcagtttctaaatatgactacctttgaccaccagaactcagaaaatgtgaaacttttcagtgccttctcaggaagttctgattgggacaatcttatagtgcactcgaggcagccgcaaaagaagcctcacagtgtgtctaatgggtctccagtttgcatgtctaaacttactaaatctcttcctgcttcaccttccacttcagacttttgccagacacgttcctgcatatctgaacatagttcaatcaatgtactgaatataactgctgaagaaattaaaccaaatcaggttggaggagaatgtacaaatcaaaaatggagtgtggcatcaagacctggatcacaggaaggttgctatagtggatgctccttgagctacacaaattctcatgtagaaaaagatgacttaccttagacatgtggactggaatttttttcattaatgtgttcatcaagtttcacatctaagttgaaacagggtgtgtcataaagtcagttatctctaat

SEQ ID NO: 336985 - DNA, 543 bp, Artificial Sequence
  derived and/or modified sequence
atgggggattggatgaccgtgactgaccctggtttgtcgtccgagtctaagaccatatcccagtacacatctgagacgaaaatgtccccgtcttccctttactcccaacaggtcctgtgttcttcaataccgctcagcaagaacgtgcatagcttcttctccgcgttttgtaccgaggataatattgagcaatccatcagctacttagatcaggagctgaccacattcgggttcccttctttatacgaagagtcaaaagggaaagaaacaaagagggagctaaacatcgtggccgtgttgaattgtatgaacgaactattagtgctccagaggaaaaatctgcttgctcaagagaatgtggaaacccagaacctgaaactcggatccgatatggatcaccttcagtcttgctattccaagctgaaagaacaactcgaaaccagtaggcgggaaatgattggcttgcaagaaagagatcgccaactccagtgtaaaaatagaaatctgcaccagctcctgaagaatgagaaggacgaggtttag

SEQ ID NO: 336986 - DNA, 1515 bp, Artificial Sequence
  derived and/or modified sequence
atgggcgattggatgaccgttaccgaccccgagtcaaaaaccatcagccaatacaccagtgagacgaaaatgagcccctcaagcctctatagtcagcaagtcctctgtagctctattcctctgagtaaaaacgtccactctttcttcagcgcgttttgtacagaggataatatcgaacagtctattagctatctggaccaggaactgactacctttggtttcccttcactgtacgaagaatcgaaaggtaaggaaacgaagagggagttgaatattgtagctgtcttgaactgcatgaatgaactactggtgcttcagaggaagaatctcctcgcgcaggaaaacgtggaaactcaaaacctgaaacttggctccgatatggaccacttgcagagctgctatagcaagcttaaggagcagttggaaacctcacggagggaaatgataggtctccaggagagggataggcaactgcagtgcaaaaataggaatctgcatcaactgctaaagaacgagaaggacgaagtccagaagcttcagaacataattgcttctagagctacacaatataaccatgacatgaagagaaaggaaagagaatacaataagctcaaagagagacttcaccagcttgtcatgaataagaaagacaaaaaaatcgctatggacatcctcaattatgtcggacgggcagacggaaagcgcggatcatggaggaccggtaagaccgaagctcgtaacgaagatgagatgtacaaaattctgttgaacgattacgagtatcgacagaagcagattctgatggaaaacgctgagctgaagaaggtgctgcaacagatgaagaaggagatgatctcacttctctcgcctcagaaaaagaagcccagagagcgggtggatgactcgaccgggacagtaatctcggatgtggaggaagacgccggtgagctgtcaagggaaagcatgtgggatttgtcttgcgaaacagtccgtgaacagctgacaaattctataagaaagcagtggcgcatcctgaagtctcacgtggagaagctggataaccaggttagtaaagtacacttggagggttttaacgatgaggacgtgatcagtcgccaggatcacgagcaagaaactgagaagttggagctggagatccagcaatgtaaagaaatgatcaaaactcaacagcaactgctacagcagcaactcgcgacggcctacgatgatgacacaacttcactgttgcgcgattgctacttacttgaagagaaagaacgattaaaggaagaatggagcttgttcaaagaacagaaaaaaaatttcgagcgggaacgcagaagttttacggaggctgccattagacttggtcttgagattgggtttttgctcttaagtgtactccacaaaaaaagcctcctagggatccatcactcctcgaccgtgtccaggtgtggagtaaggcgtcagtgtaatcaggactacatctgctgcctgaaaaagaaggggatctag

SEQ ID NO: 336987 - DNA, 543 bp, Artificial Sequence
  derived and/or modified sequence
atgggcgactggatgaccgtgaccgaccccggcctgagcagcgagagcaagaccatcagccagtacaccagcgagaccaagatgagccccagcagcctgtacagccagcaggtgctgtgcagcagcatccccctgagcaagaacgtgcacagcttcttcagcgccttctgcaccgaggacaacatcgagcagagcatcagctacctggaccaggagctgaccaccttcggcttccccagcctgtacgaggagagcaagggcaaggagaccaagagagagctgaacatcgtggccgtgctgaactgcatgaacgagctgctggtgctgcagagaaagaacctgctggcccaggagaacgtggagacccagaacctgaagctgggcagcgacatggaccacctgcagagctgctacagcaagctgaaggagcagctggagaccagcagaagagagatgatcggcctgcaggagagagacagacagctgcagtgcaagaacagaaacctgcaccagctgctgaagaacgagaaggacgaggtgtag

SEQ ID NO: 336988 - DNA, 1515 bp, Artificial Sequence
  derived and/or modified sequence
atgggcgactggatgaccgtgaccgaccccgagagcaagaccatcagccagtacaccagcgagaccaagatgagccccagcagcctgtacagccagcaggtgctgtgcagcagcatccccctgagcaagaacgtgcacagcttcttcagcgccttctgcaccgaggacaacatcgagcagagcatcagctacctggaccaggagctgaccaccttcggcttccccagcctgtacgaggagagcaagggcaaggagaccaagagagagctgaacatcgtggccgtgctgaactgcatgaacgagctgctggtgctgcagagaaagaacctgctggcccaggagaacgtggagacccagaacctgaagctgggcagcgacatggaccacctgcagagctgctacagcaagctgaaggagcagctggagaccagcagaagagagatgatcggcctgcaggagagagacagacagctgcagtgcaagaacagaaacctgcaccagctgctgaagaacgagaaggacgaggtgcagaagctgcagaacatcatcgccagcagagccacccagtacaaccacgacatgaagagaaaggagagagagtacaacaagctgaaggagagactgcaccagctggtgatgaacaagaaggacaagaagatcgccatggacatcctgaactacgtgggcagagccgacggcaagagaggcagctggagaaccggcaagaccgaggccagaaacgaggacgagatgtacaagatcctgctgaacgactacgagtacagacagaagcagatcctgatggagaacgccgagctgaagaaggtgctgcagcagatgaagaaggagatgatcagcctgctgagcccccagaagaagaagcccagagagagagtggacgacagcaccggcaccgtgatcagcgacgtggaggaggacgccggcgagctgagcagagagagcatgtgggacctgagctgcgagaccgtgagagagcagctgaccaacagcatcagaaagcagtggagaatcctgaagagccacgtggagaagctggacaaccaggtgagcaaggtgcacctggagggcttcaacgacgaggacgtgatcagcagacaggaccacgagcaggagaccgagaagctggagctggagatccagcagtgcaaggagatgatcaagacccagcagcagctgctgcagcagcagctggccaccgcctacgacgacgacaccaccagcctgctgagagactgctacctgctggaggagaaggagagactgaaggaggagtggagcctgttcaaggagcagaagaagaacttcgagagagagagaagaagcttcaccgaggccgccatcagactgggcctggagatcggcttcctgctgctgagcgtgctgcacaagaagagcctgctgggcatccaccacagcagcaccgtgagcagatgcggcgtgagaagacagtgcaaccaggactacatctgctgcctgaagaagaagggcatctag

SEQ ID NO: 336989 - protein, 462 aa, Artificial Sequence
  derived and/or modified sequence
MEEFVGLREGSSGNPVTLQELWGPCPRIRRGIRGGLEWLKQKLFRLGEDWYFLMTLGVLMALVSCAMDLAVESVVRAHQWLYREIGDSHLLRYLSWTVYPVALVSFSSGFSQSITPSSGGSGIPEVKTMLAGVVLEDYLDIKNFGAKVVGLSCTLACGSTLFLGKVGPFVHLSVMMAAYLGRVRTTTIGEPENKSKPVYSALATLVLASITYPPSAGRFLASRLSMKQHLDSLFDNHSWALMTQNSSPPWPEELDPQHLWWEWYHPRFTIFGTLAFFLVMKFWMLILATTIPMPAGYFMPIFVYGAAIGRLFGETLSFIFPEGIVAGGITNPIMPGGYALAGAAAFSGAVTHTISTALLAFEVTGQIVHALPVLMAVLAANAIAQSCQPSFYDGTVIVKKLPYLPRILGRNIGSHRVRVEHFMNHSITTLAITLMNDEIGVHCHQGQAQMPSGVVWFPVRGS

SEQ ID NO: 336990 - DNA, 1389 bp, Artificial Sequence
  derived and/or modified sequence
atggaggagtttgtaggactccgggagggtagctctggcaacccagttactctgcaggagttgtggggcccctgcccaaggattaggaggggaatcagaggtggactggaatggctgaaacagaagctgttcaggttgggggaggactggtattttttaatgactcttggagttctgatggcactggtttcatgcgccatggatctcgctgtggagtccgtagtgcgcgcccaccagtggctctacagggaaatcggagactctcaccttctcaggtacttgtcgtggacagtgtacccggtcgctctcgttagttttagctcgggcttcagccagtccattacacctagcagtggcggatcaggcatccctgaggtcaaaacaatgttagctggagttgtgctggaggactacctggatataaagaatttcggagccaaagtagttggcctgtcctgcaccctcgcatgcgggagcactctattcttgggcaaagtcgggcccttcgtacaccttagtgttatgatggcagcctacttaggtcgcgttagaaccaccaccattggcgagccggaaaacaaatcgaagcctgtgtactctgccttggccacccttgtacttgccagtatcacatatcctccttctgccgggcgatttctggcatctagactcagcatgaagcagcatctggattcactgtttgataaccattcttgggccctgatgacccagaacagtagcccgccctggcccgaggagctggaccctcaacacctatggtgggaatggtaccaccctcggttcaccatcttcgggactttggcattttttttggtgatgaagttttggatgttaatactggccacaacaattcccatgcccgctggttacttcatgccgatcttcgtttacggggccgccattggccggttattcggggagacactgagctttatttttcccgagggcatagttgcaggcggcataaccaaccctattatgccagggggctacgcactcgctggagccgctgccttcagcggagcggtgacccacaccatatccacagccctcctcgctttcgaggttaccgggcagatagtccacgcactgcccgtactcatggcagtcctagcagccaacgctatcgcccagtcatgtcaaccgtccttttacgatgggacagttattgttaaaaagctcccctatctgcctaggatccttggacggaacatcggctcccaccgcgttcgcgtcgagcatttcatgaatcactcaattacaacactcgccatcactctgatgaacgacgagatcggtgtccattgccaccaaggtcaagcccagatgccaagtggcgttgtgtggtttccggtccggggctcatag

SEQ ID NO: 336991 - DNA, 1389 bp, Artificial Sequence
  derived and/or modified sequence
atggaggagtttgtgggcctgcgggagggcagcagcggcaaccctgtgaccctgcaggagctgtggggcccctgcccccgcatcagaagaggcatccggggcggcctggagtggctgaagcagaagctgttccggctgggggaggactggtacttcctgatgaccctgggcgtgctgatggccctggtgtcctgtgccatggacctggccgtggagagcgtggtgcgggcccaccagtggctgtaccgggagattggagacagccacctgctgcgctacctgtcctggacagtgtaccctgtggccctggtgtccttcagcagcggcttcagccagagcatcacccccagcagcggcggcagcggcatccctgaggtgaagaccatgctggccggcgtggtgctggaggactacctggacatcaagaactttggagccaaggtggtgggcctgagctgcaccctggcctgtggcagcaccctcttcctgggcaaggtgggcccctttgtgcacctgtctgtgatgatggccgcctacctgggccgggtgaggaccaccaccatcggggagcctgagaacaagagcaagcctgtgtacagcgccctggccaccctggtgctggccagcatcacctacccaccttctgctggccgcttcctggccagccggctgtccatgaagcagcacctggacagcctgtttgacaaccacagctgggccctgatgacccagaacagcagccccccctggccagaggagctggacccccagcacctgtggtgggagtggtaccacccccgcttcaccatcttcggcaccctggccttcttcctggtgatgaagttctggatgctgatcctggccaccaccatccccatgcctgctggctacttcatgcccatctttgtgtatggagctgccatcggccgcctgtttggagagaccctgtccttcatcttccctgagggcatcgtggccggcggcatcaccaaccccatcatgcctgggggctacgccctggccggggccgccgccttctctggagctgtgacccacaccatcagcacagccctgctggcctttgaggtgacaggccagatcgtgcacgccctgcctgtgctgatggctgtgctggccgccaatgccatcgcccagagctgccagcccagcttctatgatggcaccgtgattgtgaagaagctgccctacctgccccgcatcctgggcaggaacatcggcagccaccgggtgcgggtggagcacttcatgaaccacagcatcaccaccctggccatcaccctgatgaatgatgaaattggagtgcactgccaccagggccaggcccagatgcccagcggcgtggtgtggttccctgtgcggggcagctag

SEQ ID NO: 336992 - DNA, 1389 bp, Artificial Sequence
  derived and/or modified sequence
atggaggagttcgtgggcctgcgggagggcagcagcggcaaccccgtcacgctgcaagaactctggggtccatgtccacgcatacgccgtggaatcagaggcgggcttgagtggctgaagcaaaaactgttcaggctgggggaggattggtatttcctaatgaccctgggcgtcctaatggctttagtctcttgcgcgatggacctcgccgtggaatccgtcgtgagggcgcatcagtggctctaccgcgagatcggggattctcacctgctcaggtatctttcgtggaccgtctatcccgtcgcactcgtcagtttttccagcggtttctctcaatcaattactccgtctagcgggggttctggcatccccgaggtcaagaccatgctcgccggagtggtgttggaagattacctggatatcaagaactttggcgccaaagtggttgggttatcctgtacattggcctgtggctcgaccctgttcttgggcaaggtcggcccttttgttcacttatcagttatgatggccgcctacttgggaagagtgagaactacaaccattggagaacctgagaacaaatccaagcccgtgtattccgcacttgctactctggtcttagcttctatcacttaccccccttcagccggccgtttcctcgcctcccgacttagcatgaagcagcatctggattccctattcgataatcacagctgggccttgatgacacagaatagtagccctccttggcctgaggaactagacccccagcacctgtggtgggagtggtaccaccccaggttcacaatatttggaactcttgccttctttcttgtgatgaagttctggatgcttatcttggccaccacaatcccaatgcctgcagggtacttcatgccgattttcgtttacggtgctgccattgggaggctgttcggagaaaccctttcttttattttccctgaggggatcgtggcaggtgggatcacaaatcccattatgcccgggggttatgcgttggcgggtgccgcagctttcagcggggctgtaactcacaccatctccactgctcttttagctttcgaggtcaccggtcaaatcgtacacgcactcccagtcttgatggccgtgttggctgccaacgccatagctcagtcatgccagccaagtttctacgatggtaccgtgatcgtaaagaaactgccgtatctccctaggatcctcggtcggaatattgggtcccatagggtaagggtggagcactttatgaaccactccataaccactttggcaataacactgatgaacgatgagatcggtgtgcactgccatcagggccaggcccaaatgccaagtggcgtggtttggtttccagttcgtgggtcttag

SEQ ID NO: 336993 - DNA, 1389 bp, Artificial Sequence
  derived and/or modified sequence
atggaggagtttgtcgggctgcgcgagggatcgagcggtaatccagtcaccctgcaggagctctggggcccttgccctcgaatcagacggggaattaggggtgggctggaatggctcaagcaaaaactctttaggctgggtgaggactggtacttcctcatgactctgggagttttaatggcgctggtctcctgtgccatggacctggccgttgaatctgtcgttcgagcccaccagtggttgtatcgtgaaattggcgactcacacctgctacgatacctaagttggaccgtttatccggtggctctcgtgtcttttagctcggggttttcccagagcataactcccagctccggaggaagtgggatacccgaggtgaagacaatgttggctggcgttgtattggaggactacttggacatcaagaacttcggagcgaaagtagtcgggttatcgtgcactctcgcttgtggcagcacccttttcctcggcaaggtgggcccatttgtccacctgagtgtgatgatggcagcttaccttgggcgagttcggacgaccaccataggcgaacccgagaacaagtctaaacccgtgtacagtgccctggcaaccttggtgctcgcatccatcacctatcctccatcagcaggaagattcctggcgagccgattgagtatgaaacagcatttagattctcttttcgacaatcatagctgggctctgatgacgcagaattcaagccctccctggcctgaggagttggaccctcaacacttgtggtgggagtggtatcatccacgatttacaatattcggcactctcgctttttttttggtgatgaagttctggatgcttatcttggcaacaaccataccgatgcccgctggttattttatgccaatttttgtctatggagcggctattgggaggcttttcggcgaaacactgagcttcatattcccagaagggattgtggccggaggaatcactaatcccattatgcctggaggctacgcccttgccggagctgctgccttctccggggcagttacgcacaccattagcaccgccctcctggctttcgaggtcacaggccagattgtgcacgccctccccgtgctgatggcagtgttggcagctaatgctatcgcccaaagttgccagccaagcttctacgacggcactgtaattgtcaaaaagctgccctacttgcctagaatactgggcagaaatataggaagccaccgagtgcgggtcgaacacttcatgaaccatagcattacgacgctggccataacacttatgaacgacgaaataggggtgcactgccatcaggggcaggcgcagatgccttctggtgtggtgtggtttcctgttagaggaagttag

SEQ ID NO: 336994 - DNA, 1520 bp, Artificial Sequence
  derived and/or modified sequence
ggggggaggatgttgattgttggaacacacacctgtccaggtgcaggggagctggaggctctgtgagaggagggccagctcagccacagcaggaggactgacaggggcctgatggaggagtttgtggggctgcgtgaaggctcctcagggaaccctgtgactctgcaggagctgtggggcccctgtccccgcatccgccgaggcatccgaggtggcctggagtggctgaagcagaagctcttccgcctgggcgaggactggtacttcctgatgaccctcggggtgctcatggccctggtcagctgtgccatggacttggctgttgagagtgtggtccgagcgcaccagtggctgtacagggagattggggacagccacctgctccggtatctctcctggactgtgtaccctgtggccctcgtctctttctcttcaggcttctctcagagcatcacaccctcctctggaggttctggaatcccggaggtgaagaccatgttggcgggtgtggtcttggaggactacctggatatcaagaactttggggccaaagtggtgggcctctcctgcaccctggcctgtggcagcaccctcttcctcgggaaagtgggccctttcgtgcacctgtctgtgatgatggctgcctacctgggccgtgtgcgcaccacgaccatcggggagcctgagaacaagagcaagcctgtgtactccgctctggccaccttggttctcgcctccatcacctacccacccagcgccggccgcttcctagcttctcggctgtccatgaagcagcatctggactcgctgttcgacaaccactcctgggcgctgatgacccagaactccagcccaccctggcccgaggagctcgacccccagcacctgtggtgggaatggtaccacccgcggttcaccatctttgggacccttgccttcttcctggttatgaagttctggatgctgattctggccaccaccatccccatgcctgccgggtacttcatgcccatctttgtctatggagctgctatcgggcgcctctttggggagactctctcttttatcttccctgagggcatcgtggctggagggatcaccaatcccatcatgccaggggggtatgctctggcaggggctgcagccttctcaggggctgtgacccacaccatctccacggcgctgctggccttcgaggtgaccggccagatagtgcatgcactgcccgtgctgatggcggtgctggcagccaacgccattgcacagagctgccagccctccttctatgatggcaccgtcattgtcaagaagctgccatacctgccacggattctgggccgcaacatcggttcccaccgcgtgagggtggagcacttcatgaaccacagcatcaccacactggccatcacattaatgaatgatgagattggagtacactgtcaccaagggcaggcacagatgccttctggggttgtctggttcccagtgagaggctcctgagaaaaataaagctggttccc

SEQ ID NO: 336995 - DNA, 1389 bp, Artificial Sequence
  derived and/or modified sequence
atggaggagttcgtgggcctgagagagggcagcagcggcaaccccgtgaccctgcaggagctgtggggcccctgccccagaatcagaagaggcatcagaggcggcctggagtggctgaagcagaagctgttcagactgggcgaggactggtacttcctgatgaccctgggcgtgctgatggccctggtgagctgcgccatggacctggccgtggagagcgtggtgagagcccaccagtggctgtacagagagatcggcgacagccacctgctgagatacctgagctggaccgtgtaccccgtggccctggtgagcttcagcagcggcttcagccagagcatcacccccagcagcggcggcagcggcatccccgaggtgaagaccatgctggccggcgtggtgctggaggactacctggacatcaagaacttcggcgccaaggtggtgggcctgagctgcaccctggcctgcggcagcaccctgttcctgggcaaggtgggccccttcgtgcacctgagcgtgatgatggccgcctacctgggcagagtgagaaccaccaccatcggcgagcccgagaacaagagcaagcccgtgtacagcgccctggccaccctggtgctggccagcatcacctacccccccagcgccggcagattcctggccagcagactgagcatgaagcagcacctggacagcctgttcgacaaccacagctgggccctgatgacccagaacagcagccccccctggcccgaggagctggacccccagcacctgtggtgggagtggtaccaccccagattcaccatcttcggcaccctggccttcttcctggtgatgaagttctggatgctgatcctggccaccaccatccccatgcccgccggctacttcatgcccatcttcgtgtacggcgccgccatcggcagactgttcggcgagaccctgagcttcatcttccccgagggcatcgtggccggcggcatcaccaaccccatcatgcccggcggctacgccctggccggcgccgccgccttcagcggcgccgtgacccacaccatcagcaccgccctgctggccttcgaggtgaccggccagatcgtgcacgccctgcccgtgctgatggccgtgctggccgccaacgccatcgcccagagctgccagcccagcttctacgacggcaccgtgatcgtgaagaagctgccctacctgcccagaatcctgggcagaaacatcggcagccacagagtgagagtggagcacttcatgaaccacagcatcaccaccctggccatcaccctgatgaacgacgagatcggcgtgcactgccaccagggccaggcccagatgcccagcggcgtggtgtggttccccgtgagaggcagctag

SEQ ID NO: 336996 - protein, 362 aa, Artificial Sequence [sequence omitted]

SEQ ID NO: 336997 - DNA, 1089 bp, Artificial Sequence
  derived and/or modified sequence
atgaagtacctgaccgtgggcgacctggaggactgcctgctgaacaaggtggacctgagaagacagcagatcagccaggccgtggaggaggtgcagaaggtggtgcaccacctgaccaccaacatcagcaaccaggacatcagattccaggccgtgccctacagcgacacctacaacgagaacatcaaggtgctggcccccagccagttcctggtgaccgtgcccatcaagggcctggccggctacagagaggccagagagcagcactggagatactacaccctgcagggcaccagactgccctgccccctgagagaccccgagggcctgcagcagtggctggaggtggagcagttcatgaagagcctgtggcagtggcacgagaccgacgtgaacatcgacggcgacatcgtgcccgccaaggtgctgctggtgttcagaaagctggtggagaacgccgtgagaacctgccacctgagcggcaaggtgagcctgctgggcaacagaagcgccgtgtgggtggccgtggagaccagcgcctaccaggtggagctggagctggtgcccgccgtggagatccccaccacctggagcaagaaggccagatggcccagatgcctgcagagatggcccagccaggagagagtggagtgcatcaagagcttcggcttcaacctgctggcctgcagcaactaccactggcagctgagcttcctgagagccgagcaggtgctgctggagcagctggacgaggacggcggctgcagaagaaagtgcttccaggtgatgagacacctgaaggaggacatctggtgccccggcaacagacccgtgatcaccagccaccacctgcagaccgtgctgttctggacctgcgagaagtacccccacttcaaggactggcaggtgttcagcaaggccttcctgagactggtgagaaagctgcacaagtgcgtgagccagcacttcctgaagcactacttcgtgagaaacagcaacctgttccagtgcaccaaccccaccgagctggacaccgtggcccagaagctggccaccttcctgaagaacccccagatcggccccccctag

SEQ ID NO: 336998 - DNA, 1089 bp, Artificial Sequence
  derived and/or modified sequence
atgaagtatctcacggtcggggacctggaggactgtctgctgaataaggttgatctgcgtcgacagcagatttctcaggctgtagaggaagtgcagaaggttgttcaccacctaactactaatatttctaaccaggacatccgctttcaggctgtgccctattcggatacttataatgagaacatcaaagtcctggctcctagtcagttcctggttaccgtgcccatcaaggggctggcaggctatcgtgaggcccgcgagcaacactggagatactataccctgcagggcacccgcctcccctgccctctgagagaccccgaggggctgcagcagtggcttgaagtcgagcagttcatgaagtccctctggcaatggcatgagacagatgtgaacattgacggtgatatagtccccgccaaggtcctgcttgtgttcaggaaactggttgagaatgctgtgaggacatgtcacctttccggcaaagtgtccctccttggcaaccggagcgccgtatgggttgctgtcgagacctcagcctatcaggtggagctggagttagttcctgctgtggagattcctacaacatggtcaaagaaagccaggtggcctagatgcttacagcgctggccaagtcaggagagggtcgagtgcattaaaagcttcggtttcaacctgttagcatgttcaaattatcactggcagctgtcctttctgcgcgcggaacaggtgctcctggagcagttggatgaagacggcggatgccgccgcaagtgctttcaggtgatgaggcatctgaaagaggacatttggtgcccaggcaacagacccgtgatcactagtcatcatctgcagactgtgctgttttggacctgcgaaaaatacccccacttcaaagactggcaggtgttctccaaagcctttctgagacttgtgaggaagttacacaagtgtgtgagccagcactttctgaaacattacttcgtgaggaattcaaatctcttccagtgtaccaatcccacagaattagacaccgtggcgcagaaactggctaccttcctcaagaatcctcagatcggcccaccctag

SEQ ID NO: 336999 - DNA, 1089 bp, Artificial Sequence
  derived and/or modified sequence
atgaagtacctgactgtgggggacctggaggactgcctgctgaacaaggtggacctgcggcggcagcagatcagccaggccgtggaggaggtgcagaaggtggtgcaccacctgaccaccaacatcagcaaccaggacatccgcttccaggccgtgccctacagcgacacctacaatgaaaacatcaaggtgctggcccccagccagttcctggtgacagtgcccatcaagggcctggccggctaccgggaggcccgggagcagcactggagatactacaccctgcagggcacccggctgccctgccccctgcgggaccctgagggcctgcagcagtggctggaggtggagcagttcatgaagagcctgtggcagtggcatgaaacagatgtgaacattgatggagacatcgtgcctgccaaggtgctgctggtgttcaggaagctggtggagaatgctgtgaggacctgccacctgagcggcaaggtgtccctgctgggcaacagatctgctgtgtgggtggccgtggagaccagcgcctaccaggtggagctggagctggtgcctgctgtggagatccccaccacctggagcaagaaggcccgctggccccgctgcctgcagcgctggcccagccaggagcgggtggagtgcatcaagagctttggcttcaacctgctggcctgcagcaactaccactggcagctgtccttcctgcgggcagagcaggtgctgctggagcagctggatgaagatggcggctgcaggaggaagtgcttccaggtgatgaggcacctgaaggaggacatctggtgccccggcaacagacctgtgatcaccagccaccacctgcagacagtgctcttctggacctgtgagaagtacccccacttcaaggactggcaggtgttcagcaaggccttcctgcggctggtgaggaagctgcacaagtgtgtgtcccagcacttcctgaagcactactttgtgaggaacagcaacctcttccagtgcaccaaccccacagagctggacacagtggcccagaagctggccaccttcctgaagaacccccagatcggccccccatag

SEQ ID NO: 337000 - DNA, 3229 bp, Artificial Sequence
  derived and/or modified sequence
atttttactgccagctttcaagttggaagagggaaattacgtttaaaggtcagcagatgacagatggattttcacaatttggaaataaaaacatgagtgaagggttcggaaggcaagtctctggtccattacacacttccagaaaaacttagtacccagagactcacattactgggagtgctatctactcacaagtgttgcactccattgagaaaaaaaaaaaaaccaggaagttgctgttctactgaggactgaccaagaagccatgaaataccttactgtgggagacttagaagattgcctactgaataaggtggacttgaggcgccagcagatttcccaggctgtggaggaggtgcagaaagtcgttcatcatttgaccacaaacatcagcaaccaagacattagatttcaagctgtgccttactctgacacgtacaatgaaaatattaaggttttggctcccagtcagttcctcgtcacagtcccaataaaaggcctggccgggtacagggaggccagggagcagcactggcggtactacacactgcagggcaccaggctgccctgcccgttgcgggaccctgagggtctgcagcagtggctggaggtggaacagtttatgaagagcctgtggcagtggcatgagacagatgtgaacatcgacggagacattgtgcctgccaaggtcctcctagtgttccggaagctggtggaaaatgcagttagaacctgtcacctctcaggtaaggtcagcctgctaggaaaccgctctgcagtttgggttgctgtggaaacatctgcatatcaggtggaactggagctggtccccgcagtggagatccccaccacctggtccaagaaagcccggtggcctcgatgtctgcagcgctggccttcccaagagagagtggagtgcatcaagtcgtttggatttaacttgttggcctgttcaaattatcactggcagctgagcttcctccgtgctgagcaggtgttactggaacagctggatgaagatgggggctgccgtaggaagtgttttcaggtcatgaggcacctgaaggaggacatctggtgcccagggaacaggccggttatcacgtcccaccatctgcagactgtgctcttttggacctgcgagaaatatccccactttaaagactggcaggtcttcagcaaagcatttctgcgcctggtgaggaaactgcacaagtgcgtgagccagcacttcctgaaacactatttcgtccggaacagcaacctctttcagtgcaccaacccgactgaactggacactgtggcccaaaagctggccaccttcctgaagaacccccagatcggcccgccctgatggttgccccggcctgggaggctcttggacattttattctggcttaacattgttctttggatggttcctcagtcaggtgccaggatcctgcctaggagaaaggccacgaatggcagcggaaattacatcaaaccagaaacacttcagcagggggaaaactgtgccccaggatgtctggcccaggcctccctggagcccagcaagcatttctgccctagctaattctcctggagacagctctcatcaggcttccccaggcacagatttggaactggtgacagttctgaacttagtttcccttgttcaggctgtgatcgtctcacagtgaagatggagacagaacccctggaagtctggacatgagcctgctggccaatactgtgcccagcccactgatcatgggcacattctcctgccatttgtaaaatgggaatgttaacgtgcctacctctgagcagggctgtgtgcctatgaaactgtgctggcgccttttcaaggggaaggcattggatcaacacaaagtgttcctggttggttgagtagctggtgtttgcatcctggatcggtacccacagcactgacgcaaaattgcacctgatgagttagtgagcctgtgcttccttgctgccctccagcttccttagcatgtgggtcagtggctcctgatgttctgtctgcttcgctggtattctctaagcagggaggggaatggttttgatgataagtgtaagtcaaagatgaaagtacaactcttggcctgatcccaaccatagccctctctttgcttcccatgccatgggccatggatggaacttccttatatatttatgtaaataacctagtactatgatctgcatggagtgaccttaggtgtctgtcactgctcagtgtgttcctttgctcacttcattcactcactcactcattgacaaataatgctcattaggcaccgggaacacagcaaagagcaaagtggatgaggacctccccctggggatgccacctaatggtggagacaagaaatgaacgacagataaacacgcacagttattacagatggaagcaagtgcttcaaaggaaataaacagaatgttgaagtagagtccacagaaaggtccccgaaggatgaaaatgcaaatagctgaaggggaaggaaaagtgaccaaaggcaggcatggtggggctggcatgagtcagagcacctggccttgtaaagccaggaaggaatcagtattttattctaagatcaaaggtgtgacatttggcctctccagaagcagaagagtatcacgatctgactgcattttaaacaattgttctggtaactgcatgaagaaggtctggggactcacacaggagctgggcactgagtgctcttgagccacccatttggaatttcacagaggcccacaaggcaacatattctgtgtggcacaaccgatcaggaattctaggagttctcggtgagatcaatggtttttttctggcgtttatgtaatgcttctcaactcaaggggctcctttattacttttgaatgtttttgcccaaatgtctataccaaagataaatttctaaagcatgaactactgattttgttttcatgaaaattcacatttgaaaatgaaaatgattacttttcaaaagtactgtaaacggcaggaaagatccaaaattgacaccctaacatcacaattaaaagaactagaaaagcaagagcaaacacattcaaaagctagcagaaggcaagaaataactaaaatcagagcagaactgaaggaaatagagacacaaaaaacccttcaaaaaattaatagatccaggagctggttttttgaaaggatcaacaaaattgatagactgctagcaagactaat

SEQ ID NO: 337001 - DNA, 1089 bp, Artificial Sequence
  derived and/or modified sequence
atgaagtacctgaccgtgggcgacctggaggactgcctgctgaacaaggtggacttacggagacagcagattagtcaggctgtggaagaagtgcagaaggtcgtccaccacctgacaactaacatctctaatcaggatatcagattccaggccgtcccatattccgatacatataatgaaaacataaaagttttggcacctagccagttcttggttaccgtgcctattaaaggtctcgcgggatatagagaggccagagaacaacattggaggtattacaccttacagggcaccaggctgccttgccctttgcgcgatcccgaaggcctacaacagtggctggaagtcgagcagttcatgaaaagcctttggcagtggcacgagacagacgtaaatattgacggcgacattgtgcctgctaaggttcttctcgtgtttcgaaagctggtcgaaaatgccgtgaggacatgccacctctctggcaaggtgtcattgcttggaaataggtctgcagtttgggtggccgtggaaaccagcgcttaccaggtggagctggaacttgtcccggcggtggaaatccctaccacctggtctaagaaagctagatggccacgttgtctgcagaggtggccaagccaggaaagagtggagtgtataaaatcattcggattcaatctgcttgcctgcagcaattatcactggcagctgtcctttctccgcgccgaacaggtgctcttggagcagctggacgaggacggggggtgtcgtagaaagtgttttcaggtcatgaggcatcttaaggaggatatctggtgtcccggaaaccgcccggttattaccagccatcacttgcagacagtgctgttctggacctgtgaaaagtacccgcacttcaaagattggcaggtcttctcgaaagcgttccttcgtctggtccgcaagctgcacaaatgtgtttctcagcactttctgaaacactattttgtgcgaaatagtaaccttttccaatgtaccaatcccactgagttagacactgtcgcgcaaaagctcgccactttcctcaagaatcctcaaattgggcctccttag

SEQ ID NO: 337002 - DNA, 1089 bp, Artificial Sequence
  derived and/or modified sequence
atgaagtacctcaccgttggcgacttggaggattgcctgctgaacaaagttgacctccgcagacagcagataagccaggcagtagaggaagtccagaaagtagtgcatcacctgactaccaatatctcaaatcaggatattaggtttcaagcagtgccgtattccgatacttacaacgagaatattaaggtgttagcaccttcccaatttctcgtcacagtccctataaagggtctcgccggatatagggaggcaagagagcaacattggcgatattatactctgcaaggcactcggctcccatgtcccctcagagacccagagggtttgcagcagtggttggaggtcgaacagttcatgaagtcgctgtggcaatggcacgagacagatgtgaatattgacggggacattgtgcccgctaaggtgcttttagtgtttcggaaactagttgagaatgcggtgcgaacctgtcacctgagtggcaaggtatcgcttctgggcaacaggagtgccgtgtgggtcgctgtggaaacctcagcctaccaggtcgagttagaactagtgcctgccgttgagatcccaacgacttggagcaagaaagcaagatggcctcgttgcctgcagcggtggcctagccaggaacgagtggaatgcataaagtcttttggatttaatctgctggcctgttctaattatcactggcagctgtcatttctgcgagcagagcaggtgctcctggaacaacttgacgaagatgggggttgcaggcgaaaatgcttccaggtcatgcggcacctcaaagaggacatttggtgcccaggtaatcgccctgtgataacatctcatcacctgcaaaccgttttgttttggacctgcgagaaatatcctcattttaaggattggcaggtcttctctaaggcattcctccggcttgtgcggaagctacataaatgtgtgtcccaacattttctgaaacattactttgtgcgtaactctaatctcttccagtgtaccaatcccaccgaactggacaccgtggcccagaagctagcgacctttctgaagaatccccagatcggccctccttag

SEQ ID NO: 337003 - protein, 360 aa, Artificial Sequence
  derived and/or modified sequence
MEECWVTEIANGSKDGLDSNPMKDYMILSGPQKTAVAVLCTLLGLLSALENVAVLYLILSSHQLRRKPSYLFIGSLAGADFLASVVFACSFVNFHVFHGVDSKAVFLLKIGSVTMTFTASVGSLLLTAIDRYLCLRYPPSYKALLTRGRALVTLGIMWVLSALVSYLPLMGWTCCPRPCSELFPLIPNDYLLSWLLFIAFLFSGIIYTYGHVLWKAHQHVASLSGHQDRQVPGMARMRLDVRLAKTLGLVLAVLLICWFPVLALMAHSLATTLSDQVKKAFAFCSMLCLINSMVNPVIYALRSGEIRSSAHHCLAHWKKCVRGLGSEAKEEAPRSSVTETEADGKITPWPDSRDLDLSDC

SEQ ID NO: 337004 - DNA, 1083 bp, Artificial Sequence
  derived and/or modified sequence
atggaggaatgttgggtgacagagattgccaatggtagcaaagacggcttagatagtaatccaatgaaagactacatgatactcagcggtcctcaaaagactgccgtggctgtgctttgcacattgttaggactactctctgctcttgagaacgtggctgtcctttacctcattctctcttcgcaccaacttcggcggaaaccatcctacctcttcatcggaagtctagcaggcgccgacttcctggcctccgtcgtctttgcttgttcttttgtcaactttcacgtcttccacggagtcgactccaaagccgttttcctactgaagatcggctctgtcaccatgaccttcaccgcttctgtggggagcttgttgctcaccgctattgataggtatttgtgcctgagatatccgccttcctataaggctctgcttactcggggcagggcattagtgaccctgggaatcatgtgggtactgagtgccctcgtgtcatatcttcctctgatggggtggacgtgctgtccacggccctgctctgagctgttcccccttatacctaatgattacctgctgtcttggctgctctttattgccttcctgtttagcggaatcatttacacttacgggcatgttctttggaaggcccaccagcacgttgcatcattatccggacaccaggatagacaggtacccgggatggcacgtatgcgcctggatgtgagattagccaagacacttggtttggttttggcagtgctgcttatttgctggtttcccgtcctcgcattgatggcccactccttggccactacacttagtgatcaagtgaaaaaagcctttgccttctgctccatgctgtgtctcattaattcaatggtaaatcccgtcatatatgcactgagaagcggagagatcaggtcttccgcacaccactgccttgcccactggaagaagtgcgtgcgcggtctgggtagtgaagccaaggaagaggccccgcgttcgtccgtaacagagactgaggctgacggcaaaatcactccctggcccgacagtcgggacctggacctgagcgattgttag

SEQ ID NO: 337005 - DNA, 1083 bp, Artificial Sequence
  derived and/or modified sequence
atggaggaatgttgggtcaccgagattgccaacggatcgaaggatgggctcgacagtaaccctatgaaagactacatgattttgtccggtccccagaaaacagctgttgccgtcctctgtaccctgctaggcttgctctccgcccttgaaaatgtagccgtactgtacctgatcttgtcgagtcatcaactcaggcggaaacctagttatctgttcatcgggtctttggcaggggccgattttttagcctccgtagtatttgcatgcagcttcgttaacttccatgtctttcatggcgtggacagcaaggctgtctttctgctgaagatcggatccgtgactatgacattcactgcctctgtgggctccctgctgctgaccgcgattgacagatatttatgtcttaggtaccctccaagctataaagctctgttaactagaggccgggcgctagttacgctcggcatcatgtgggtcctttcggccctggtgagttatctccctcttatgggatggacttgttgcccgcggccgtgctcagaactcttcccgcttataccaaacgattatctgctctcctggctactatttatcgcattcctattcagcggcatcatctatacttatggacacgtcctctggaaggcacatcaacacgtggctagcctgagcggccatcaggacagacaagtgcctgggatggcccgcatgcgcttagacgtccgcttagccaagaccctgggactggtgttggctgtcttactgatatgctggttccctgtgctcgccctcatggcacacagcctggccacgactttgagtgatcaggtcaagaaggcctttgctttctgctctatgctatgcctgatcaactcaatggtcaacccagtcatatatgctctccgcagcggcgagattcgcagctccgcccatcactgtctggctcattggaagaaatgcgtgcggggccttggcagcgaagcaaaggaggaagcacctcgctctagcgtcacagagacagaagcagacggaaagatcacaccctggcccgattcccgggatctggacctcagtgattgttag

SEQ ID NO: 337006 - DNA, 1083 bp, Artificial Sequence
  derived and/or modified sequence
atggaggagtgctgggtgacagaaattgccaacggcagcaaggatggcctggacagcaaccccatgaaggactacatgatcctgagcggcccccagaagacagctgtggccgtgctgtgcaccctgctgggcctgctgagcgccctggagaatgtggccgtgctgtacctgatcctgagcagccaccagctgcggaggaagcccagctacctgttcatcggcagcctggccggggctgacttcctggcctctgtggtgtttgcctgcagctttgtgaacttccacgtgttccacggcgtggacagcaaggctgtgttcctgctgaagattggctctgtgaccatgaccttcaccgcctctgtgggcagcctgctgctgacagccatcgaccgctacctgtgcctgcgctacccacccagctacaaggccctgctgacccggggccgggccctggtgaccctgggcatcatgtgggtgctgagcgccctggtgtcctacctgcccctgatgggctggacctgctgcccccggccctgcagcgagctgttccccctcatccccaatgactacctgctgtcctggctgctcttcatcgccttcctgttcagcggcatcatctacacctacggccacgtgctgtggaaggcccaccagcacgtggccagcctgagcggccaccaggaccggcaggtgcccggcatggccaggatgaggctggatgtgcggctggccaagaccctgggcctggtgctggccgtgctgctgatctgctggttccctgtgctggccctgatggcccacagcctggccaccaccctgagtgaccaggtgaagaaggcctttgccttctgcagcatgctgtgcctgatcaacagcatggtgaaccctgtgatctatgccctgcggtctggagagatccgcagcagcgcccaccactgcctggcccactggaagaagtgtgtgcggggcctgggcagcgaggccaaggaggaggcccccaggagctctgtgacagaaacagaagcagatggcaagatcaccccctggccagacagccgggacctggacctgagtgactgctag

SEQ ID NO: 337007 - DNA, 1083 bp, Artificial Sequence
  derived and/or modified sequence
atggaggagtgctgggtgaccgagatcgccaacggcagcaaggacgggcttgacagtaaccctatgaaagactatatgatcctgtcgggcccccaaaagacagctgtggcggtcttgtgtacactgttagggctgttgagcgcactggagaacgtcgctgtcttatacctgatcctgagcagtcaccaactgagacggaagccatcatacctgttcattggttctctcgctggagcagacttcctggcctccgtagtcttcgcttgttcgtttgtgaacttccacgtcttccatggggtggacagcaaagcagtgttcttgctgaagatcggaagcgtcactatgacattcacagcctctgtgggatcactgttactgactgcaatcgatcgttatctgtgcctgcggtatccgccttcttataaagccctcctcacgcggggaagagcactggtcacactggggataatgtgggtgctgtcggcgctggtatcctatctcccactgatgggttggacgtgttgtccccgaccttgcagcgagttgttcccactgattcctaacgactacctgctatcatggcttctgtttatcgcatttcttttcagcggaatcatttacacctatggccatgttctgtggaaagcacaccaacatgtggcttctctgtcaggacatcaggaccggcaagtccccggcatggcccggatgcgtttggacgttcgcctggcgaagaccctagggttagtgctggccgtcttgcttatctgctggttcccagtgttggccttaatggctcactcactggccacaactctgagtgaccaggtgaaaaaggccttcgctttctgtagcatgctttgtctgataaatagcatggtgaatccggttatctatgcacttcggtccggagagattcggtcatctgcccaccactgcctggcacactggaaaaaatgtgtgcggggtcttggatctgaggcaaaagaagaggctccccgatccagcgtcactgagaccgaagcagacgggaaaattaccccgtggccagactcaagggaccttgacctgagtgattgctag

SEQ ID NO: 337008 - DNA, 1083 bp, Artificial Sequence
  derived and/or modified sequence
atggaggagtgctgggtgaccgagatcgccaacggcagcaaggacggcctggactctaatcccatgaaggactacatgatacttagtggccctcagaaaactgccgtggctgtgctctgcactctcctgggtctgctgagcgccctggagaacgtcgccgtgctgtacctcatcctatcctcacaccagcttcgacggaaacctagttatctgttcatcgggagcctggcaggggccgatttcttagcaagtgtcgtctttgcgtgtagctttgttaatttccacgtattccacggggtcgacagcaaggcggtgtttctactgaagatagggtcggtgaccatgacattcacggcctctgtgggttcgctcctgcttaccgcgatcgacagatacctgtgtttgcgctatcctccatcctacaaagccctcttgacccgcggtagggccctggtcacccttggcatcatgtgggtacttagcgccctcgtaagttacctaccactgatgggctggacttgctgcccacgtccatgcagcgaactattccccctcatccccaatgactatttgctttcatggctcctcttcatcgcttttttgttttcaggcatcatttacacctatggccacgtgttgtggaaagcgcaccagcatgtggcctccctgagcggccaccaggacagacaggtgcccggaatggcccgcatgcgcctggacgtgaggctcgcaaagacccttggactcgtcctggcagttctgctaatttgttggtttcccgttttagccctcatggcgcacagtctggcgaccacactttcggaccaggtcaaaaaagccttcgctttctgcagtatgttgtgtctgattaattccatggtcaatcctgtgatatacgcattgcgctctggagaaatccggagctctgcccatcattgtctcgcccattggaaaaaatgcgtgcgaggcttgggatcagaggctaaagaagaagcccctcgctcatccgtaactgagacggaagccgacgggaaaatcactccttggccggattccagagatctcgatctgtcagactgctag

SEQ ID NO: 337009 - DNA, 1083 bp, Artificial Sequence
  derived and/or modified sequence
atggaagagtgttgggtgacagagatagccaatggatctaaagatggacttgacagcaatcctatgaaagattacatgatccttagtggtcctcagaaaacagccgtggctgtgctctgtaccttactgggactgctttcggccctggaaaatgtggcagtattataccttatcctgagcagccatcagctgaggcggaaaccatcctacctcttcatcggcagcttagccggagccgactttctggcttctgtggtatttgcttgctccttcgtgaatttccacgtttttcatggagtagatagtaaagctgtgtttctgctgaaaattgggagcgttaccatgacattcaccgcatccgtggggtcgttactcctgaccgctatcgatcggtatttgtgtctccggtatccaccaagctataaagctctcctcacaagggggagagccctagtgacgctgggcatcatgtgggtgctgtctgccttagtgtcatatctccccctcatgggatggacttgttgcccacgcccatgttctgaattattccctttgatccccaacgactatctcctctcctggttgctgttcatagccttcctgttcagcggaataatctacacctacggacacgtgctgtggaaggctcaccagcacgttgcaagtctgtcaggacatcaagatcgccaagtgccaggcatggctcggatgagacttgatgtgcggctcgctaaaacgcttgggctggtgctggcagttctcctcatttgttggtttccagtactggctctgatggcccatagcctcgcaactacactatctgaccaggtgaagaaagctttcgctttctgttccatgctgtgcctgatcaattccatggtgaatcccgtgatctatgctttacgtagtggggaaatacggtcatcagctcaccactgcctggcccactggaaaaaatgtgtccgtggtttaggctccgaggcaaaggaggaagctcccagatcttctgtgacagagaccgaggccgatggcaagataacaccttggccggactcccgcgatctggatctaagtgactgttag

SEQ ID NO: 337010 - DNA, 1083 bp, Artificial Sequence
  derived and/or modified sequence
atggaggagtgttgggtgacggagatcgcaaacggaagcaaagacggcctggactctaatccaatgaaggattatatgatattgagtgggcctcaaaaaacagctgtcgctgtcctgtgtacactattaggacttctgtccgcactggagaatgtggctgtgctgtacctcatattgagctctcaccagctgcggagaaaacctagttatctgttcatcgggtccttggcgggagcagacttcctcgccagtgtggtctttgcatgttctttcgtgaattttcacgtgttccacggcgttgattctaaggcagtattcttactgaagatcgggagtgtgacaatgacattcactgccagcgtaggaagccttctcttaaccgcaatcgatcggtacctgtgcctgcgttacccacctagctacaaagctttactgacccgcggtagggcactcgtgacactcggcatcatgtgggttctttctgctctggtctcctacttgcccctcatggggtggacatgctgccctaggccatgttcagagctatttcccctcatacccaatgactatctgctgtcttggctcctgttcatcgcctttcttttttccggcataatatacacctatgggcacgtgctttggaaggcccatcagcatgttgcgtcactgagcggccaccaggatcgacaggtgcctggaatggcacgcatgcggctggatgtgcgcctcgcgaagaccctgggccttgtactcgccgtcctccttatttgttggtttccggtcctggctctgatggcccacagtctcgcgacaaccctgtcagaccaagtgaagaaggcattcgctttctgctccatgctctgcctgatcaattctatggtgaaccccgtgatctacgctctgcggagtggagagatcagaagcagtgcacaccactgcctcgcccactggaaaaagtgtgtcagaggcttggggtcagaggctaaagaggaggcacccaggagttcggtaaccgaaaccgaagcagacggaaaaatcactccctggcctgacagcagagatctggacctgtctgattgctag

SEQ ID NO: 337011 - DNA, 5254 bp, Artificial Sequence
  derived and/or modified sequence
ggcactcaacaggtgctctgagtggcacccacggccaggtcctgggagaggacagaaaacaactgggactcctcagcccccggcagctcccagtgcccagccacccacaacacaacccaaagccttctagacaagctcagtggaatctgaagggcccaccccatggaggaatgctgggtgacagagatagccaatggctccaaggatggcttggattccaaccctatgaaggattacatgatcctgagtggtccccagaagacagctgttgctgtgttgtgcactcttctgggcctgctaagtgccctggagaacgtggctgtgctctatctgatcctgtcctcccaccaactccgccggaagccctcatacctgttcattggcagcttggctggggctgacttcctggccagtgtggtctttgcatgcagctttgtgaatttccatgttttccatggtgtggattccaaggctgtcttcctgctgaagattggcagcgtgactatgaccttcacagcctctgtgggtagcctcctgctgaccgccattgaccgatacctctgcctgcgctatccaccttcctacaaagctctgctcacccgtggaagggcactggtgaccctgggcatcatgtgggtcctctcagcactagtctcctacctgcccctcatgggatggacttgctgtcccaggccctgctctgagcttttcccactgatccccaatgactacctgctgagctggctcctgttcatcgccttcctcttttccggaatcatctacacctatgggcatgttctctggaaggcccatcagcatgtggccagcttgtctggccaccaggacaggcaggtgccaggaatggcccgaatgaggctggatgtgaggttggccaagaccctagggctagtgttggctgtgctcctcatctgttggttcccagtgctggccctcatggcccacagcctggccactacgctcagtgaccaggtcaagaaggcctttgctttctgctccatgctgtgcctcatcaactccatggtcaaccctgtcatctatgctctacggagtggagagatccgctcctctgcccatcactgcctggctcactggaagaagtgtgtgaggggccttgggtcagaggcaaaagaagaagccccgagatcctcagtcaccgagacagaggctgatgggaaaatcactccgtggccagattccagagatctagacctctctgattgctgatgaggcctcttcccaatttaaacaactcaagtcagaaatcagttcactccctggaagagagagaggggtcttggcactctcttcttacttaaaccagtcccagacacctagacacggacccctttttgctgatgagtgttgggactgactcctggaagacagcctggccttgcccacctgcacacagtctgttggataggtagggccacgaggagtagccaggtaggcgagacacaaaaggcctgggacagggtcagtacaagtcaggtcaggcttcatgcctgcatcctccagagaccacaggagccaaagcgagcctccaggcccagcaatgagggacttgggagaaatctgagaagaatgggttgttctcttgggaagtcagggtatcagatgggatggacatccaggtcttctctctgcctaattgtcaaggcctccttggctctggagctatgaaaggccccactttcaagtcacccttgccactgaggaccgaggactatgctatgatgaggattaaggtgttgacttgcctctttcagagataaatgacaagccttcagtttggggcatcctgttgtttgggcgaggaccctctctgatattctgataatccccacctgtaacctcaggtccctggaaatacagaggaggctgggatcgcctgagacacaaaaatctttggagaattttcttgaccctctgaagtccttccagcagcagtcctggtggtgctgctggaagcaggcaatgtcctagtctaacctaactcgaagaaaaaaaggaagatattcacaaagattgtataaatctccaaactgttcccctatctgcccccaattcagctcccttgcctcctccacacccctattacatataataagcagagcaagtgggaggaggggaaatgtccttcctatatgccaggtatggggctgacatttcagtctattgaccccagctagaatatagctccatgattttaaagatctcaggggccaggcatggtagctcatgcctgtaatcccagcactttgggaggccaaggcaggtggatcacctgaggtcaggagtttgagaccagcctgaccaatatggtgaaaccctgtctctactaaaaatacaaaaattagcagggcatggtggcaggcacctgtagtcccagctactcgggaggctgagacaggagaattgcttgaaccctggaggcagaggttgcagtgagccgagattgcaccactgcactccagcctgggtgacagagcaagactgtctcaaaaaaataaaataaaatagatcccagggtactcatttttcatatgagggaggctgggttcctcccagaggagcctaaaacagccaacaagagaaattgttggcggcaggaagattgcagaggaattctaatgcaattatttgggacctcaaatggaataaaatgaaagatattggttaaacatgtcttcgtttaatactttcaagacaaaatatccactagctattcacttattcattcatctcataaacatgagccaggctctgtgcagggtcctgagtacccagccataaatgagactgtgcccctgtctcatggggcttacagtctatatcctgcttgcaagacagccaataagtcaataaagaagataattacaggcagtacaacaaaggaaatatgcaggttcatgtcatgtaatagggattaattgagttaactcaataaacggtaggatagacctaccatgtgccggctcacttttattgagcctttactatgtgccaggcagggggctaagtgtttttaaatgccttatttcacttcatgtttcccaacaacctaataagaaggtcttagttatcttcattttacagatgtggcaacctcaaagatgcaaagtcacttgtctaaggtcaccctgctaagtaccagagctgaggtctccaacctagttctgtttgacttcaaagcctgccctcttaaccactaaccttttgtcctagttcagtcaaattctgcttgattattgctcattagggataatattagctatctgtagcatcagattgctgcaaagttaactcatcgtagattctcaatatactccattttattaaatggccccgtattaatctcctgtaataaatttcacaaatccagtggcttatcaacagaaatttactgtctcataattctggaggccagaagtcaaaatcaagatgtggtagggccctgctccctccaaaagtttaaggggagaattattccttgactctttcaacttctggcagtccctgtcattccttggcttgtggaaacatcactcctacctctgactctgtcttcatatggcatttcctctgtgtctcttggtgtcttttttttttttttttttttttttgagacggaatctcattctgttgtccaggcaggagtgcagtgacatgatcttggctcactgcaacctccacctctcaggttcaagtgattctcctgcctcagcctcccaaatagctgggactacaggcacccgccaccacactcagctaatttttgtatttttagtagagatggggtttcaccatcttgcccaggctggtcttgaactcctgacctcaagtgatccgcccaccttggcctcctaaattgctgggattacagacgtgagccaccatacccggcctggtgtcttttttaaagaatatcagtcactggatttgggcccaccctaatcctaatagtatgacttcatcttaatttaaccaattatatctgtagagaccctgtttccaaataaggtcacattcacagattccaggtggacaagaagtttaggcggacactattcaactcagtacagacccaggaacaaagtccacccactgggctgtgttgagtggcagtcactagtttatcctccctcaacaagatgagctccaggttgacctctgcatccccagtgctcagtcaggacccagcagagcatctgaagggatctggtcaatatgtgtggaactgaactgtttctgaaaagctctgacgtatgttttggaaaatcaaatcttgttttaatccagacaccaatctttttgtaaggcaaacaagtagcataaatgtttaaaagtgaatttgcatgtttatatactgtcattccttaaagttgaagcatgcctttctttattcatcggtggaatcctttctcattttggcaaagaaaatgcccaagtgcctggcacaaacaagcactgagtaaatacttcttgaatgaataaaactagattctaaaaatcatttgatcaaacgcaactccacactttctacttctcttcttttagaaccacactgtatttctgctttttttttttttttttttttttttgacatagaatctcactctgtcacccaggttggagtgcagtggcatgcaatcttggctcactgcaacctctgcctcctgggttcaagcagttctcctgccttagcctcccatgtagctgggattacaggtacccgccaccatgcccagctaatttttgtattgttagtagagatggaatttcaccatattggccaggctggtcttgaactcctgacttcaagtgatccacccaccttagcctcccaaagtgctaggattacaggtgtgagccaccactcccagcccctatgtctgctttaagtggagaagcagagcttatgagggaggagaacaagggtgcaaaagggacctagatatcactgagaactgcccttgttgtttggttgaggaaatgggcccagacagtggacaagacttgctcagggagacaaacgagatggtgtccagtgcaacaaacctaggtttcctaacttccagttctgtccactctacatcagtgcctctcacctgtccctgcaggttcacattttggttatgtggataaggagaaataaattgaagatcacaatgtcccattttatcttccccaagacaagctctgtaacattaaagaccactatgcaaaccga

SEQ ID NO: 337012 - DNA, 5350 bp, Artificial Sequence
  derived and/or modified sequence
cgccttcgcgcgttgtaagtgcacagtaagtttgctgaaagaatgaggactgctctcctcccctttctgccccacttgtaagtgaaaaaggggaagaaagagaatattgttcagttgattatgccagccagatgcagccgccgccgctccactgtcactctccaaggccagcgccacctctcactcaccgagctccagccgaaggagaagggggcaaagccttctagacaagctcagtggaatctgaagggcccaccccatggaggaatgctgggtgacagagatagccaatggctccaaggatggcttggattccaaccctatgaaggattacatgatcctgagtggtccccagaagacagctgttgctgtgttgtgcactcttctgggcctgctaagtgccctggagaacgtggctgtgctctatctgatcctgtcctcccaccaactccgccggaagccctcatacctgttcattggcagcttggctggggctgacttcctggccagtgtggtctttgcatgcagctttgtgaatttccatgttttccatggtgtggattccaaggctgtcttcctgctgaagattggcagcgtgactatgaccttcacagcctctgtgggtagcctcctgctgaccgccattgaccgatacctctgcctgcgctatccaccttcctacaaagctctgctcacccgtggaagggcactggtgaccctgggcatcatgtgggtcctctcagcactagtctcctacctgcccctcatgggatggacttgctgtcccaggccctgctctgagcttttcccactgatccccaatgactacctgctgagctggctcctgttcatcgccttcctcttttccggaatcatctacacctatgggcatgttctctggaaggcccatcagcatgtggccagcttgtctggccaccaggacaggcaggtgccaggaatggcccgaatgaggctggatgtgaggttggccaagaccctagggctagtgttggctgtgctcctcatctgttggttcccagtgctggccctcatggcccacagcctggccactacgctcagtgaccaggtcaagaaggcctttgctttctgctccatgctgtgcctcatcaactccatggtcaaccctgtcatctatgctctacggagtggagagatccgctcctctgcccatcactgcctggctcactggaagaagtgtgtgaggggccttgggtcagaggcaaaagaagaagccccgagatcctcagtcaccgagacagaggctgatgggaaaatcactccgtggccagattccagagatctagacctctctgattgctgatgaggcctcttcccaatttaaacaactcaagtcagaaatcagttcactccctggaagagagagaggggtcttggcactctcttcttacttaaaccagtcccagacacctagacacggacccctttttgctgatgagtgttgggactgactcctggaagacagcctggccttgcccacctgcacacagtctgttggataggtagggccacgaggagtagccaggtaggcgagacacaaaaggcctgggacagggtcagtacaagtcaggtcaggcttcatgcctgcatcctccagagaccacaggagccaaagcgagcctccaggcccagcaatgagggacttgggagaaatctgagaagaatgggttgttctcttgggaagtcagggtatcagatgggatggacatccaggtcttctctctgcctaattgtcaaggcctccttggctctggagctatgaaaggccccactttcaagtcacccttgccactgaggaccgaggactatgctatgatgaggattaaggtgttgacttgcctctttcagagataaatgacaagccttcagtttggggcatcctgttgtttgggcgaggaccctctctgatattctgataatccccacctgtaacctcaggtccctggaaatacagaggaggctgggatcgcctgagacacaaaaatctttggagaattttcttgaccctctgaagtccttccagcagcagtcctggtggtgctgctggaagcaggcaatgtcctagtctaacctaactcgaagaaaaaaaggaagatattcacaaagattgtataaatctccaaactgttcccctatctgcccccaattcagctcccttgcctcctccacacccctattacatataataagcagagcaagtgggaggaggggaaatgtccttcctatatgccaggtatggggctgacatttcagtctattgaccccagctagaatatagctccatgattttaaagatctcaggggccaggcatggtagctcatgcctgtaatcccagcactttgggaggccaaggcaggtggatcacctgaggtcaggagtttgagaccagcctgaccaatatggtgaaaccctgtctctactaaaaatacaaaaattagcagggcatggtggcaggcacctgtagtcccagctactcgggaggctgagacaggagaattgcttgaaccctggaggcagaggttgcagtgagccgagattgcaccactgcactccagcctgggtgacagagcaagactgtctcaaaaaaataaaataaaatagatcccagggtactcatttttcatatgagggaggctgggttcctcccagaggagcctaaaacagccaacaagagaaattgttggcggcaggaagattgcagaggaattctaatgcaattatttgggacctcaaatggaataaaatgaaagatattggttaaacatgtcttcgtttaatactttcaagacaaaatatccactagctattcacttattcattcatctcataaacatgagccaggctctgtgcagggtcctgagtacccagccataaatgagactgtgcccctgtctcatggggcttacagtctatatcctgcttgcaagacagccaataagtcaataaagaagataattacaggcagtacaacaaaggaaatatgcaggttcatgtcatgtaatagggattaattgagttaactcaataaacggtaggatagacctaccatgtgccggctcacttttattgagcctttactatgtgccaggcagggggctaagtgtttttaaatgccttatttcacttcatgtttcccaacaacctaataagaaggtcttagttatcttcattttacagatgtggcaacctcaaagatgcaaagtcacttgtctaaggtcaccctgctaagtaccagagctgaggtctccaacctagttctgtttgacttcaaagcctgccctcttaaccactaaccttttgtcctagttcagtcaaattctgcttgattattgctcattagggataatattagctatctgtagcatcagattgctgcaaagttaactcatcgtagattctcaatatactccattttattaaatggccccgtattaatctcctgtaataaatttcacaaatccagtggcttatcaacagaaatttactgtctcataattctggaggccagaagtcaaaatcaagatgtggtagggccctgctccctccaaaagtttaaggggagaattattccttgactctttcaacttctggcagtccctgtcattccttggcttgtggaaacatcactcctacctctgactctgtcttcatatggcatttcctctgtgtctcttggtgtcttttttttttttttttttttttttgagacggaatctcattctgttgtccaggcaggagtgcagtgacatgatcttggctcactgcaacctccacctctcaggttcaagtgattctcctgcctcagcctcccaaatagctgggactacaggcacccgccaccacactcagctaatttttgtatttttagtagagatggggtttcaccatcttgcccaggctggtcttgaactcctgacctcaagtgatccgcccaccttggcctcctaaattgctgggattacagacgtgagccaccatacccggcctggtgtcttttttaaagaatatcagtcactggatttgggcccaccctaatcctaatagtatgacttcatcttaatttaaccaattatatctgtagagaccctgtttccaaataaggtcacattcacagattccaggtggacaagaagtttaggcggacactattcaactcagtacagacccaggaacaaagtccacccactgggctgtgttgagtggcagtcactagtttatcctccctcaacaagatgagctccaggttgacctctgcatccccagtgctcagtcaggacccagcagagcatctgaagggatctggtcaatatgtgtggaactgaactgtttctgaaaagctctgacgtatgttttggaaaatcaaatcttgttttaatccagacaccaatctttttgtaaggcaaacaagtagcataaatgtttaaaagtgaatttgcatgtttatatactgtcattccttaaagttgaagcatgcctttctttattcatcggtggaatcctttctcattttggcaaagaaaatgcccaagtgcctggcacaaacaagcactgagtaaatacttcttgaatgaataaaactagattctaaaaatcatttgatcaaacgcaactccacactttctacttctcttcttttagaaccacactgtatttctgctttttttttttttttttttttttttgacatagaatctcactctgtcacccaggttggagtgcagtggcatgcaatcttggctcactgcaacctctgcctcctgggttcaagcagttctcctgccttagcctcccatgtagctgggattacaggtacccgccaccatgcccagctaatttttgtattgttagtagagatggaatttcaccatattggccaggctggtcttgaactcctgacttcaagtgatccacccaccttagcctcccaaagtgctaggattacaggtgtgagccaccactcccagcccctatgtctgctttaagtggagaagcagagcttatgagggaggagaacaagggtgcaaaagggacctagatatcactgagaactgcccttgttgtttggttgaggaaatgggcccagacagtggacaagacttgctcagggagacaaacgagatggtgtccagtgcaacaaacctaggtttcctaacttccagttctgtccactctacatcagtgcctctcacctgtccctgcaggttcacattttggttatgtggataaggagaaataaattgaagatcacaatgtcccattttatcttccccaagacaagctctgtaacattaaagaccactatgcaaaccg

SEQ ID NO: 337013 - DNA, 1083 bp, Artificial Sequence
  derived and/or modified sequence
atggaggagtgctgggtgaccgagatcgccaacggcagcaaggacggcctggacagcaaccccatgaaggactacatgatcctgagcggcccccagaagaccgccgtggccgtgctgtgcaccctgctgggcctgctgagcgccctggagaacgtggccgtgctgtacctgatcctgagcagccaccagctgagaagaaagcccagctacctgttcatcggcagcctggccggcgccgacttcctggccagcgtggtgttcgcctgcagcttcgtgaacttccacgtgttccacggcgtggacagcaaggccgtgttcctgctgaagatcggcagcgtgaccatgaccttcaccgccagcgtgggcagcctgctgctgaccgccatcgacagatacctgtgcctgagatacccccccagctacaaggccctgctgaccagaggcagagccctggtgaccctgggcatcatgtgggtgctgagcgccctggtgagctacctgcccctgatgggctggacctgctgccccagaccctgcagcgagctgttccccctgatccccaacgactacctgctgagctggctgctgttcatcgccttcctgttcagcggcatcatctacacctacggccacgtgctgtggaaggcccaccagcacgtggccagcctgagcggccaccaggacagacaggtgcccggcatggccagaatgagactggacgtgagactggccaagaccctgggcctggtgctggccgtgctgctgatctgctggttccccgtgctggccctgatggcccacagcctggccaccaccctgagcgaccaggtgaagaaggccttcgccttctgcagcatgctgtgcctgatcaacagcatggtgaaccccgtgatctacgccctgagaagcggcgagatcagaagcagcgcccaccactgcctggcccactggaagaagtgcgtgagaggcctgggcagcgaggccaaggaggaggcccccagaagcagcgtgaccgagaccgaggccgacggcaagatcaccccctggcccgacagcagagacctggacctgagcgactgctag

SEQ ID NO: 337014 - protein, 461 aa, Artificial Sequence
  derived and/or modified sequence
MALAFGCPPGGGGGGCPGGGGGGGGAGPGPSPVTAALRDDLGSNIHLLKGLNVRFRCFLAKVHELERRNRLLEKQLEQQQSERERRLRYKTFSREQAVQTGPELLRPPAPGGGHGLSSGAAAGANANAVALGGLPPGGGSHPQHYGRLPGTIWSYTQVRRTGGGGVETVQGPGVSWVHPDGVGVQIDTITPEIRALYNVLAKVKRERDEYKRRWEEELAKRMNLQTMVDTLQEAAQEADAIQEEMNEKIERLKAELVVFKGLMSDVVPKKKERKVASDDDISEQDGEVNRFSDDEVGSMNITDEMKRMFNQLRETFDFDDDCDSLTWEENEDTLLLWEDFTNCNPTIDLQGEQEENLGNLIHETESFFKTRDKEYQETIGQIELELATAKSDMNRHLHEYMEMCSMKRGLDVQMETCRRLIKGSADRNSPSPSSVASSDSGSTDEIQDEFEREADVEPMVS

SEQ ID NO: 337015 - DNA, 1386 bp, Artificial Sequence
  derived and/or modified sequence
atggccctggccttcggctgcccccccggcggcggcggcggcggctgccccggcggcggcggcggcggcggcggcgccggccccggccccagccccgtgaccgccgccctgagagacgacctgggcagcaacatccacctgctgaagggcctgaacgtgagattcagatgcttcctggccaaggtgcacgagctggagagaagaaacagactgctggagaagcagctggagcagcagcagagcgagagagagagaagactgagatacaagaccttcagcagagagcaggccgtgcagaccggccccgagctgctgagaccccccgcccccggcggcggccacggcctgagcagcggcgccgccgccggcgccaacgccaacgccgtggccctgggcggcctgccccccggcggcggcagccacccccagcactacggcagactgcccggcaccatctggagctacacccaggtgagaagaaccggcggcggcggcgtggagaccgtgcagggccccggcgtgagctgggtgcaccccgacggcgtgggcgtgcagatcgacaccatcacccccgagatcagagccctgtacaacgtgctggccaaggtgaagagagagagagacgagtacaagagaagatgggaggaggagctggccaagagaatgaacctgcagaccatggtggacaccctgcaggaggccgcccaggaggccgacgccatccaggaggagatgaacgagaagatcgagagactgaaggccgagctggtggtgttcaagggcctgatgagcgacgtggtgcccaagaagaaggagagaaaggtggccagcgacgacgacatcagcgagcaggacggcgaggtgaacagattcagcgacgacgaggtgggcagcatgaacatcaccgacgagatgaagagaatgttcaaccagctgagagagaccttcgacttcgacgacgactgcgacagcctgacctgggaggagaacgaggacaccctgctgctgtgggaggacttcaccaactgcaaccccaccatcgacctgcagggcgagcaggaggagaacctgggcaacctgatccacgagaccgagagcttcttcaagaccagagacaaggagtaccaggagaccatcggccagatcgagctggagctggccaccgccaagagcgacatgaacagacacctgcacgagtacatggagatgtgcagcatgaagagaggcctggacgtgcagatggagacctgcagaagactgatcaagggcagcgccgacagaaacagccccagccccagcagcgtggccagcagcgacagcggcagcaccgacgagatccaggacgagttcgagagagaggccgacgtggagcccatggtgagctag

SEQ ID NO: 337016 - DNA, 1386 bp, Artificial Sequence
  derived and/or modified sequence
atggccctggcatttggttgtccccctggcggcgggggaggggggtgccccggaggcggagggggtggcggcggagctggccctgggccgtcaccagtgacagcagccttgcgagatgatctgggctccaatatacacttactgaaaggcctgaatgtgaggtttcgttgctttctcgctaaggtacatgagctcgaaagacgtaaccggctcctcgagaagcagcttgagcagcagcaatccgaacgggagcgccgtttgaggtataaaacctttagcagagaacaggccgtccagacgggtccagaactgctccgcccgcctgctccaggaggcggccacggtttgagttccggagcagccgcgggggccaacgcaaatgctgtggctcttggtggcctgcccccagggggcggatcccacccccaacactatggacggctgccagggactatttggagttacactcaggttaggaggaccgggggaggaggagtggagactgtgcagggtccgggtgtctcgtgggttcaccccgatggtgtgggcgttcagatagacacaattacaccagaaatccgcgcactctacaacgtacttgcaaaggtcaaaagagaacgagacgaatacaaacgcagatgggaagaggagctggctaaaagaatgaacctgcagacaatggtggacaccctacaggaggctgcccaggaggccgacgccatccaggaggagatgaacgagaagatcgaaagactgaaggccgagttggtggtgtttaaggggctgatgtccgacgtcgtacctaaaaagaaggagcggaaagtcgctagcgacgacgatatttccgagcaagatggtgaggtgaatcgcttctccgatgacgaagtcggaagtatgaacataactgatgaaatgaaacgcatgttcaatcagctgagagagacatttgactttgatgatgattgtgattccctgacctgggaggagaatgaagacacactactcctttgggaggattttacaaactgcaatccaactattgacctacagggagagcaggaggaaaacctgggcaatctcattcatgaaaccgagtcttttttcaaaactagagataaagagtaccaggaaaccatagggcaaatagaattggagctggccaccgccaaatccgatatgaatcgtcatttgcacgaatacatggaaatgtgctccatgaagcgggggttggatgtccagatggagacttgtcgccgcctgattaaaggttctgctgacagaaattcaccctctccctccagcgtcgcctcctccgatagtggaagtactgacgagattcaggatgagttcgagcgggaggcagatgtggagcctatggtctcatag

SEQ ID NO: 337017 - DNA, 1386 bp, Artificial Sequence
  derived and/or modified sequence
atggccctggccttcggctgccccccaggcggcggcggcggcggctgccctgggggcggcggcggcggcggcggggccggccctggccccagccctgtgacagctgccctgagagatgacctgggcagcaacatccacctgctgaagggcctgaatgtgcgcttccgctgcttcctggccaaggtgcatgagctggagaggaggaaccggctgctggagaagcagctggagcagcagcagagcgagcgggagcggcggctgcgctacaagaccttcagccgggagcaggccgtgcagacaggccctgagctgctgcggcccccagcccctgggggcggccacggcctgagcagcggggctgctgctggggccaatgccaatgctgtggccctgggcggcctgcccccaggcggcggcagccacccccagcactacggccgcctgcccggcaccatctggagctacacccaggtgagaagaactggaggcggcggcgtggagaccgtgcagggccctggggtgtcctgggtgcacccagatggagtgggcgtgcagattgacaccatcaccccagagatccgggccctgtacaacgtgctggccaaggtgaagcgggagagagatgagtacaagaggcgctgggaggaggagctggccaagaggatgaacctgcagaccatggtggacaccctgcaggaggccgcccaggaggctgatgccatccaggaggagatgaatgagaagattgagcggctgaaggccgagctggtggtgttcaagggcctgatgtctgatgtggtgcccaagaagaaggagaggaaggtggccagtgatgatgacatcagcgagcaggatggagaggtgaaccgcttcagtgatgatgaggtgggctccatgaacatcacagatgagatgaagaggatgttcaaccagctgcgggagacctttgattttgatgatgactgtgacagcctgacctgggaggagaatgaagacaccctgctgctgtgggaggacttcaccaactgcaaccccaccatcgacctgcagggcgagcaggaggagaacctgggcaacctgatccacgagacagagagcttcttcaagacccgggacaaggagtaccaggagaccatcggccagatcgagctggagctggccacagccaagagtgacatgaacagacacctgcacgagtacatggagatgtgcagcatgaagaggggcctggatgtgcagatggagacctgccggcggctcatcaagggcagcgctgacaggaacagccccagccccagctctgtggccagcagtgacagcggcagcacagatgagatccaggatgaatttgagcgggaggctgatgtggagcccatggtgtcctag

SEQ ID NO: 337018 - DNA, 5694 bp, Artificial Sequence
  derived and/or modified sequence
atggtgaactcgctgctgttcggggagatggccttggccttcggctgcccgccgggcggcggcggcgggggctgccctggcgggggcggcggcggcggcggggcagggccgggtccgtcgccggtgacggcggcgctgcgggacgacctgggctccaacatccacctcttgaaggggctcaacgtgcgcttccgctgcttcctggctaaggtgcacgagctggagcggcgcaaccggctgctggagaagcagctggagcagcagcagagcgagcgcgagcggcggctgcgctacaagaccttctcccgcgagcaggccgtgcagaccgggcccgagttgctgcggcccccggcgcccggcggcgggcacggcctcagcagtggcgcggcggccggcgccaacgccaatgccgtggccctgggcggcctgccccccggcggcggctcgcacccgcagcactacggccgcctgcccgggaccatctggagctacacgcaggtgcggcgcacgggcggcggcggcgtggagaccgtgcagggccccggcgtgtcgtgggtgcaccccgacggcgtgggcgtgcagatcgacaccatcacgccggagatccgcgcgctctacaacgtgctggccaaggtgaagcgcgagcgcgacgagtataagcggaggtgggaggaggagctcgccaagcgcatgaaccttcagaccatggtggacacgctgcaggaggcagcacaggaggctgatgccatccaggaggagatgaatgagaagatcgagcggctcaaggccgagctggtggtgtttaaggggcttatgagtgacgtggtccccaaaaagaaagagcgtaaggtggcttccgatgatgacatctctgagcaggacggggaggtgaaccggttctcggacgatgaggtcggctccatgaacatcaccgatgagatgaagcgcatgtttaaccagctgcgggagacctttgactttgacgacgactgtgacagcctgacgtgggaagagaatgaagacacgctgctgctctgggaggatttcaccaactgcaatccgaccatcgacctgcagggcgagcaagaggaaaacttgggcaacttgatccatgagaccgaatccttcttcaagacgagagacaaggagtaccaggaaacgataggtcagatcgagctcgagctggccacagccaaaagtgacatgaaccgacacctgcacgagtacatggagatgtgcagcatgaagcgaggcctggacgtgcagatggagacctgccgccggctcatcaaaggctccgcagacaggaattcaccgtcccccagctccgtggccagcagcgactcaggaagtacagatgagatccaggatgagttcgagcgcgaggcggatgtggagcccatggtcagctgatgactgaggccctgcgagcctggtggtcttggtgatggggccctgccacctctcctcatggggccaggaaggcccctcggagtggggttcgaagccacaccacacagactttctctgccctcccttctctggaggccctgagggactgctgcttccttccttccttccacaccaccaacgggtgccccgtctccatcccccacccacccaaggaatggtgctgtcaatttctattgttctccacattacaaatgcagacttctgtgcggactttgcagtgttaactgtgccttctcccttaagctgagccactttgagctccaaagaattattcctagcaggtgtttttatacagaactctaagctgagggccgggccaaccggccgtggtgtaatgtggtttctgccgtccgtcccacctgctcctctgattggccatgggctatgccctcccttcctcctgagccagcccagactcggcctggagcttggggtgctctgccaacccccaggaaggagccgcttgcctctgtgagctttctaggcctgggtagggaccaccccaattttctcactccctgaaggagagaaaggtggaaggaagggaaggaggacacattttaattttttggggggatcgagtggcaaagttgaagggacaaggcactgtgaggggaaggcagagcctcactgtgtttaaactactatgcaaaaaacaaaacaaacaacaaaagcagcttgccttatatcattgtggaaggcaggacctctcctgggctcctggcttccccctggagctgggagagaggccggggttagggtgatctgtgtggcagcactgactgggtagtgtgggtttggccgaggttggtcatgaggctggggttcccgcaaggcactggcctccctgaccgcttgcttccttccggacctctgggttcagggcgggggcggagggatccttgatttccctgataacttgatgttcttccctccctcgccagccaacaatagaggcttagagatctgtaatttctctgtgagaaagtctgaaggggccaggcctggtctctgctcccttctacccgccttgggttaggactgtccggcagttgcctgcttttggctgctggcaggagagaagcagggtgggctgctggcagtgcaggagctggagtgagggccatcctctttctgctcctcgacacacgcaagccgctctcagcagttccctcgactggccagtcggggtattgatctgagccagcatcccccaagacttgaatggcttgagtgggactgcgttgaagggcactgtgtggcccccttccaaatctcagcttggagccagctgagcaggctttgctttattattattttttaagcctactgcagtgggtctgttgccaattttaattttttattgtcccaggagctccctctagtggtcaaggtagcaaaatgtgcccaaggactagaacttgggtccctctgccttgcctggaggcagaaggagggggctctgggtttgactgggattgtggtccccaggggtccgtggcctttaaggctcttctctcttttctgtttcccccacctgtgttacagtcttaaaaatactgtacataaaagatatatgtagagagagagagagagcgtgagaatgtgttagtgactatgtgtgatgtaatttatcacgatttggtggccttcgtcatgagttttttcctttgttttcttttgctgggggcacctcccacgggtcccctgtggcagtctggctgtgacacttccatagtcagcatctcttgttagccaaacagttccctttgacaggtacttggagggacaatggttttggaagagagacggcccttctctctcctcactcacccttgttctaaaggttacagggttcaaacatacctgattcttgttgttattgttgttgaatttttattttaaccaaaggttatcagagccagttgggcttggacctcagctgctaaaaagattttccgtttcctcgagggcaggaaaacatccaccctcgtgggtctcctccgtccagggccgagggaggcattggacaatgtggtatgggagtttcgtgggcagcgtggaagccggccctgggttgttccccaaggtggtgggagggtgacagatatatctttagacttaagactgtaaggcagcagtgttagcatgggagtaactaaggttactgtggttatcggtgtccggcggtattatttttactttcctccttgtatacataggtcatttgtctttgaggactagggtactctagggagtttgaaaactgcaggagccagaaagagatcctggcctgagagtcccttctggctggcttttaatatctgctctcctcttgggagtgaggacttggggcaggtgggtaggagagggaaagccagagtgtgatgggcctgcctcctgggctggttcctgggtccggcctgcctgcctgcctgcctgcctctccaccacatgcttttttcagttaatgtcagtgggccctgcttgtcccctcaccatgagcccacagcttgccaagaaagaccccaacgctcgctggggcagcaccagtcctagctgggacgaattggtccatcctttgtaaagctgtaaatacttaattttgactttctatttctaagcccagtgtcatattgacactggtattttagaattttctcagatgggctctcctgcgctgccctctgtctcctgtttttgggggttttatacaaacagaggattggggagggataggaagactagcatccttttggctccctggttggttgtgaaatacacacacacacacacacacacacacacacactcgcactcctctgagactccgaacagagaaaaaaattattggcaaatcaacacatttttctttctcgtcttgagaaaatgtcttgaggtccctgaagggccaaatccatcgtggactaactctgtgggtagagctcagatgacctagggagaattaaaccacttaagcttggagtgggaggagagggggtggggtgggggagaatataagatgtaacttaagctaaatgtaatctatttataaagcaagagactctcatctatttttatgaaaggaagggttttttaatctagggtaggcagttgtggtagcccagcattttcctgtggacgagacatggtgcatgttgttgctggattgaatggaacccattcctgtcccccggcctcgtcttctgtcctcacttttggtcatccacacccatgagcagcttcagcagagtgtaggtcccacttcaccccattctcctctcctctgacccctcagctccttggaagtcttggggtggggatctgagggggtgggtgggctgcaggaaattcagaaatgtggtgggtgggggaagggacaaggcgcattagggagggaacaagctgggctctggggataggctctgattaattagttactctgactctggtctgccgagatccatttccaacccagttgcgttgggagagggttgggaggcagcagagcatgggtgacagtgggagcacacgacttccttggagcctgggcctttgcgggtcccaggtggtcaggcagctggagcagaagtggaaatggcttaagatgctcatagcccagccccggctgtgtctactccaggccaagcctgggctgcagtccttgctatgttccccccagggccctggggggagggatcagggtgctgggggtttcctaggacaggggtcttcccccttgagacaccaagctctggctctagaagagctctctcctggagtggggagtctggaggggactgggtgggtgcaggtaaagccagattctctctggaagggaattttctatgaatggatgatttccaggctcagggtgggctgtgtgttagttctgagcaaatccctcaccaagacccttccctcccaagccctcaaagaaatgaggcaaagcccttccctgcaagaccccttgtggatgtttttgcatctacctgatttttagccccacccagggagactttataccccatgatcctgccccaccgttgctgttgtctgccagctgggtctagcatcacagggaagggggggatttatactcatggaaagactactgatcctaccggaaaccaacctgtttactgtactgttgtaaatatcatgccctttatatcctgtatattggcttcttttaaataaagtgaaatgtcttagaactga

SEQ ID NO: 337019 - DNA, 1386 bp, Artificial Sequence
  derived and/or modified sequence
atggccctggccttcggctgcccccccggcggcggcggcggcggctgtccaggaggtggaggcggcggcggcggggccggccccggacccagtcctgtgactgcggccctgcgggatgatttagggtccaatattcacctgctgaagggactgaacgtgagatttcggtgctttctggccaaggttcatgagctggaaaggcgcaatagactactggaaaagcagctggaacagcagcagagcgaacgtgagagacgcctgcggtataagaccttttctcgggagcaggccgtccagactggaccagaacttttgaggcctccagctcccggtggtggccatggcctctctagcggagcagctgccggtgctaacgccaatgctgtcgcacttggagggctgccacccggggggggctcacaccctcaacactacggacgtctccccgggactatctggagttacacccaagtacgacgcaccggcggaggtggcgtggagaccgtgcaggggccaggtgtgtcatgggttcatccagacggtgtcggtgttcagatagataccataaccccggaaatccgggccctctataacgtgcttgccaaagtgaagcgcgaacgagatgagtacaaaagacggtgggaggaggaactggcaaaacgaatgaatctgcagacaatggtagacaccctgcaagaagccgcgcaggaggcggacgcaattcaggaagagatgaacgaaaagatcgagcggcttaaagcagagctcgtggtgtttaagggtctaatgagcgatgtcgtcccgaaaaagaaggaacgcaaagtggccagcgatgatgatataagcgaacaggatggggaggtgaatagattttcagacgacgaggtaggttccatgaatattacagatgaaatgaagcgcatgtttaaccaactgcgcgagacgtttgacttcgacgacgattgtgattccttgacttgggaggagaatgaggatacactgttgctctgggaagacttcacaaactgtaatcccaccattgacctacagggtgagcaagaggagaatctggggaatttgatacatgaaactgagagctttttcaaaaccagagacaaagaatatcaggagacgattggccagatcgagctggagttagctacagccaagagcgacatgaacaggcacttgcacgagtacatggagatgtgcagcatgaaacggggccttgacgttcagatggagacttgtcgccgattgattaaaggatccgccgaccgaaactctccatccccttcatctgtggcgtctagtgattctggtagcacagacgaaatccaagacgaatttgaaagggaggccgatgtcgagcccatggtttcatag

SEQ ID NO: 337020 - DNA, 1386 bp, Artificial Sequence
  derived and/or modified sequence
atggctttggccttcgggtgtccccctggcggtgggggaggagggtgtcctggcggagggggaggaggagggggagccggaccaggccctagtccagtgaccgccgctttgagagatgatcttgggagcaacattcacctgctgaagggcctgaatgtcaggttcaggtgtttccttgctaaggtgcatgagttggagcgcagaaaccggcttctcgagaagcagctcgaacagcagcagtcagaaagagaaaggagattgcgatataaaacattcagccgcgaacaagcagtacagaccggcccagagctactccggcctcccgcaccagggggtggacatggcctatcctcaggtgccgcagccggagctaacgccaacgccgtagctttggggggtcttcctcccggtggcggaagccacccacagcactatggacggctcccgggtacaatttggtcatacacccaggtgcggaggacaggtggaggaggtgtcgagaccgtgcagggtcctggggtgtcatgggtgcatcctgacggtgtaggggttcaaattgacaccatcacccctgaaatacgagcgctctacaacgtgctggccaaagtaaagagggagcgagatgagtacaaaaggcggtgggaggaagagctggccaagcggatgaacctgcagacaatggtcgataccctgcaggaggccgcacaagaggccgatgccattcaggaggagatgaacgagaagattgagaggctgaaagctgaactggtcgttttcaaagggctaatgagtgacgttgtgccgaaaaaaaaagaacgtaaggttgccagtgacgacgatattagtgaacaggacggtgaggtcaatcgattcagcgacgatgaagtcggtagcatgaacatcacagatgagatgaaaaggatgttcaaccaattgcgagagacctttgatttcgacgacgattgcgattctctgacgtgggaggagaatgaggacaccctccttctttgggaagacttcaccaactgcaatcccactatcgaccttcaaggagaacaggaggaaaatctaggcaacctgatccatgagaccgaatcatttttcaagacccgggacaaagaataccaggaaacaattggacagatcgagcttgagctggctactgcgaaatccgacatgaatcggcaccttcacgaatatatggaaatgtgctccatgaagaggggactggatgtgcaaatggagacatgtcggagactgattaagggcagcgccgacaggaattcaccgtctccatcctctgtggcatcaagcgattcggggtctaccgatgaaatacaggatgaatttgaacgggaagccgatgtggaaccaatggtgtcctag

SEQ ID NO: 337021 - protein, 335 aa, Artificial Sequence
  derived and/or modified sequence
MTENVVCTGAVNAVKEVWEKRIKKLNEDLKREKEFQHKLVRIWEERVSLTKLREKVTREDGRVILKIEKEEWKTLPSSLLKLNQLQEWQLHRTGLLKIPEFIGRFQNLIVLDLSRNTISEIPPGIGLLTRLQELILSYNKIKTVPKELSNCASLEKLELAVNRDICDLPQELSNLLKLTHLDLSMNDFTTIPLAVLNMPALEWLDMGSNKLEQLPDTIERMQNLHTLWLQRNEITCLPQTISNMKNLGTLVLSNNKLQDIPVCMEEMANLRFVNFRDNPLKLKVSLPPSEGTDEEEERELFGLQFMHTYIQESRRRADHQVNGSTTLPISINTDG

SEQ ID NO: 337022 - DNA, 1008 bp, Artificial Sequence
  derived and/or modified sequence
atgaccgagaacgtggtgtgcaccggcgccgtgaacgccgtgaaggaggtgtgggagaagagaatcaagaagctgaacgaggacctgaagagagagaaggagttccagcacaagctggtgagaatctgggaggagagagtgagcctgaccaagctgagagagaaggtgaccagagaggacggcagagtgatcctgaagatcgagaaggaggagtggaagaccctgcccagcagcctgctgaagctgaaccagctgcaggagtggcagctgcacagaaccggcctgctgaagatccccgagttcatcggcagattccagaacctgatcgtgctggacctgagcagaaacaccatcagcgagatcccccccggcatcggcctgctgaccagactgcaggagctgatcctgagctacaacaagatcaagaccgtgcccaaggagctgagcaactgcgccagcctggagaagctggagctggccgtgaacagagacatctgcgacctgccccaggagctgagcaacctgctgaagctgacccacctggacctgagcatgaacgacttcaccaccatccccctggccgtgctgaacatgcccgccctggagtggctggacatgggcagcaacaagctggagcagctgcccgacaccatcgagagaatgcagaacctgcacaccctgtggctgcagagaaacgagatcacctgcctgccccagaccatcagcaacatgaagaacctgggcaccctggtgctgagcaacaacaagctgcaggacatccccgtgtgcatggaggagatggccaacctgagattcgtgaacttcagagacaaccccctgaagctgaaggtgagcctgccccccagcgagggcaccgacgaggaggaggagagagagctgttcggcctgcagttcatgcacacctacatccaggagagcagaagaagagccgaccaccaggtgaacggcagcaccaccctgcccatcagcatcaacaccgacggctag

SEQ ID NO: 337023 - DNA, 1008 bp, Artificial Sequence
  derived and/or modified sequence
atgactgaaaatgtggtatgcacaggggccgtaaacgccgtgaaagaagtgtgggaaaaacgaatcaagaaactaaacgaggatctaaaacgtgagaaggaatttcagcacaagcttgtgcgcatttgggaggagagagttagtctgaccaaattgcgagagaaggtcactcgggaggacggtcgcgtgatactcaagatcgaaaaggaggaatggaagactttacctagttccctcctcaagttgaaccagctgcaagagtggcagttacacaggacgggactactgaagatccctgagttcattggcagattccagaacctaattgtgctggatctgtcccgaaatactatctccgagatcccgcccggtattggcttattgacaagactgcaagagctgatactgagctacaataagattaagacagtgccaaaggagctttctaattgtgcgtccctcgagaagctcgagttggcagtgaatcgggacatttgcgacttgccacaggagctctcgaatctcctaaagctgactcacctagatttgtctatgaatgactttacaacgatcccacttgccgtccttaatatgccggcactggagtggttggatatgggtagtaacaagttagaacaactgccggatactattgagcgaatgcagaaccttcataccttatggttgcagcgaaacgagatcacctgtctcccacagaccatttcaaacatgaaaaacctgggcactctggtgctgtccaataataagttgcaagacattccggtatgtatggaggaaatggccaacctcagatttgtgaatttccgagacaaccccctcaagctaaaagtgtcactgcccccttctgagggtaccgatgaggaggaagagcgcgagctattcggcctccagtttatgcacacatatatccaggagtctcgcagacgtgccgatcaccaggtcaatggttcaacaacgttgcccatctctataaatactgacgggtag

SEQ ID NO: 337024 - DNA, 1008 bp, Artificial Sequence
  derived and/or modified sequence
atgacggaaaatgtcgtatgtactggcgctgttaacgctgtgaaagaggtgtgggagaagcggataaagaagctgaatgaagacttgaagagggagaaagagttccagcacaaactggtaaggatctgggaggagcgagtatcgctgaccaaactgcgggagaaggttactagagaggatggtcgagttatcttaaagatagagaaggaggaatggaagaccctgcctagttcgctcctaaagttgaaccaactccaggagtggcagttgcatcggacagggctcctgaaaatcccagagttcataggaaggttccagaatcttatcgtgttggacctgtctcgcaataccatttccgagattccaccaggtattggactactgactagactccaggaacttattctgagctataataagataaaaactgttccaaaggaactttcgaattgtgcaagtctggaaaaactcgagttggctgtaaaccgggatatctgtgatcttccgcaggaactgtccaatctgctcaaattgactcacctcgacttgtctatgaacgactttaccaccatccctttagccgtgctgaacatgcccgcacttgagtggctggatatgggatccaacaaactggagcagctcccagatactatcgagcgtatgcagaacctgcataccctgtggttgcagcggaacgagataacctgcctccctcagaccatctccaatatgaagaatctggggactctggtacttagcaacaacaagcttcaggatatcccagtgtgtatggaagagatggctaacttgcggttcgtgaattttagggacaaccccctaaagctgaaggtttccctcccacccagcgaggggaccgatgaagaggaggagcgcgaactcttcggtctgcagtttatgcacacatacattcaagaaagtaggcgtagagcggatcatcaggtgaacggcagcacaacactgcccatcagcatcaacaccgacggatag

SEQ ID NO: 337025 - DNA, 1008 bp, Artificial Sequence
  derived and/or modified sequence
atgacagaaaatgtggtgtgcaccggggctgtgaatgctgtgaaggaggtgtgggagaagaggatcaagaagctgaatgaagacctgaagcgggagaaggagttccagcacaagctggtgcgcatctgggaggagcgggtgtccctgaccaagctgcgggagaaggtgaccagagaagatggccgggtcatcctgaagattgagaaggaggagtggaagaccctgcccagcagcctgctgaagctgaaccagctgcaggagtggcagctgcacaggacaggcctgctgaagatccctgagttcatcggccgcttccagaacctgattgtgctggacctgagcaggaacaccatcagcgagatccccccaggcatcggcctgctgacccggctgcaggagctgatcctgagctacaacaagatcaagacagtgcccaaggagctgagcaactgtgccagcctggagaagctggagctggccgtgaacagagacatctgtgacctgccccaggagctgagcaacctgctgaagctgacccacctggacctgtccatgaatgacttcaccaccatccccctggccgtgctgaacatgcctgccctggagtggctggacatgggcagcaacaagctggagcagctgcctgacaccatcgagaggatgcagaacctgcacaccctgtggctgcagagaaatgagatcacctgcctgccccagaccatcagcaacatgaagaacctgggcaccctggtgctgagcaacaacaagctgcaggacatccctgtgtgcatggaggagatggccaacctgcgctttgtgaacttccgggacaaccccctgaagctgaaggtgtccctgcccccatctgagggcacagatgaggaggaggagcgggagctgtttggcctgcagttcatgcacacctacatccaggagagcagaagaagagctgaccaccaggtgaatggcagcaccaccctgcccatcagcatcaacacagatggatag

SEQ ID NO: 337026 - DNA, 1396 bp, Artificial Sequence
  derived and/or modified sequence
atcatttggagccacactgaaaaaaaaatttccccctgcaatctactcttaactgatagtcgctaactttggttatgtgtgaacagtctgaaacattgctttttttctctggtacatttaggtcctttctgaaatggtatctatgattcagctattcaaaacctaatgaagttggtgactatgacaatgtggagaaatcatgacagaaaatgtggtttgtactggggctgtcaatgctgtaaaggaagtttgggaaaaaagaataaagaaactcaatgaagacctgaagcgagagaaggaatttcaacacaagctagtgcggatctgggaagaacgagtaagcttaaccaagctaagagaaaaggtcaccagggaagatggaagagtcattttgaagatagaaaaagaggaatggaagaccctcccttcttctctgctgaaactgaatcaactacaggaatggcaacttcatagaactggtttgctgaaaattcctgaattcattggaagattccagaacctcattgtgttagatttatctcgaaacacaatttcagagataccaccagggattggactgcttactagacttcaggaactgattctcagctacaacaaaatcaagactgtccccaaggaactaagtaattgtgccagcttggagaaactagaactggctgttaacagagatatatgtgatcttccacaagagctcagcaatctgctaaaacttactcaccttgatctgagtatgaacgattttactacaatccctcttgctgtgttgaacatgcctgcccttgagtggctggacatgggaagcaacaaacttgaacaacttcctgatactatagaaagaatgcaaaatctacatacgttatggctgcaacgaaatgaaataacatgcttgcctcaaacaatcagcaatatgaaaaatctgggtactcttgttctcagcaacaataaactgcaagatattccagtatgcatggaagaaatggcaaatctgaggtttgtcaacttcagagacaacccactgaaattgaaagtatcacttcctcccagtgaaggcacagatgaagaagaggaacgggaattatttggccttcagtttatgcacacatacatacaagagtcacggagaagagcagatcaccaagtcaacggttcaactactttaccaatctccataaatacggatggataatataattcaagatgcccttctaaagaggattactttggtgaattctctaatgtttggatttctgaagtaaaaagaaaagctattaccaaagtttaatgaggccacagcattttttaaagttcatattatttgctatttaaagtatatatttttttgatataaaaatataattaaaaaattttttttggt

SEQ ID NO: 337027 - DNA, 1396 bp, Artificial Sequence
  derived and/or modified sequence
atcatttggagccacactgaaaaaaaaatttccccctgcaatctactcttaactgatagtcgctaactttggttatgtgtgtctattcagaatattacattaattgatttctcaaacaaaggtcctttctgaaatggtatctatgattcagctattcaaaacctaatgaagttggtgactatgacaatgtggagaaatcatgacagaaaatgtggtttgtactggggctgtcaatgctgtaaaggaagtttgggaaaaaagaataaagaaactcaatgaagacctgaagcgagagaaggaatttcaacacaagctagtgcggatctgggaagaacgagtaagcttaaccaagctaagagaaaaggtcaccagggaagatggaagagtcattttgaagatagaaaaagaggaatggaagaccctcccttcttctctgctgaaactgaatcaactacaggaatggcaacttcatagaactggtttgctgaaaattcctgaattcattggaagattccagaacctcattgtgttagatttatctcgaaacacaatttcagagataccaccagggattggactgcttactagacttcaggaactgattctcagctacaacaaaatcaagactgtccccaaggaactaagtaattgtgccagcttggagaaactagaactggctgttaacagagatatatgtgatcttccacaagagctcagcaatctgctaaaacttactcaccttgatctgagtatgaacgattttactacaatccctcttgctgtgttgaacatgcctgcccttgagtggctggacatgggaagcaacaaacttgaacaacttcctgatactatagaaagaatgcaaaatctacatacgttatggctgcaacgaaatgaaataacatgcttgcctcaaacaatcagcaatatgaaaaatctgggtactcttgttctcagcaacaataaactgcaagatattccagtatgcatggaagaaatggcaaatctgaggtttgtcaacttcagagacaacccactgaaattgaaagtatcacttcctcccagtgaaggcacagatgaagaagaggaacgggaattatttggccttcagtttatgcacacatacatacaagagtcacggagaagagcagatcaccaagtcaacggttcaactactttaccaatctccataaatacggatggataatataattcaagatgcccttctaaagaggattactttggtgaattctctaatgtttggatttctgaagtaaaaagaaaagctattaccaaagtttaatgaggccacagcattttttaaagttcatattatttgctatttaaagtatatatttttttgatataaaaatataattaaaaaattttttttggt

SEQ ID NO: 337028 - DNA, 1008 bp, Artificial Sequence
  derived and/or modified sequence
atgaccgagaacgtggtgtgcaccggcgccgtgaacgccgtgaaggaggtgtgggaaaagaggatcaagaagctgaacgaagacctaaaacgggagaaagagttccagcataaattggttagaatttgggaagagcgtgtatcattgactaagcttagggaaaaggtaactcgcgaggacggccgcgtgatcctgaaaattgagaaggaggaatggaagactctgcctagctctcttctgaagttgaaccagcttcaagaatggcaattgcatcggacagggctgctgaagattccagagtttattggaagattccagaatctcatagtgcttgatctctcgagaaataccattagtgagattccgccagggatcggtcttctaactaggttacaggaactgattctgtcctataataaaatcaagacagtccccaaggagctttctaactgtgcgtcactcgaaaaacttgagttggcagttaatcgggacatttgtgatttacctcaggagctctcgaatttgctcaagctgacacatctcgacttatcaatgaatgactttacaacaatccctctggctgtattgaacatgccagcactggagtggctggacatgggatccaataagctagaacagctaccagatacaattgagcgaatgcagaacctgcatacactgtggctgcagaggaatgagatcacttgtctccctcagacaattagcaatatgaagaaccttggcactcttgtactgtctaataataaactgcaagatatcccggtgtgcatggaagaaatggctaatctccgattcgtaaatttcagagacaatcccctgaaacttaaggtgagtttgccaccctcagagggcactgatgaagaagaggaaagagagctctttggactgcagtttatgcacacttacatccaagaatcacgaagacgggcggaccaccaggtgaatgggtcaaccaccctgccaattagcataaacaccgacgggtag

SEQ ID NO: 337029 - DNA, 1008 bp, Artificial Sequence
  derived and/or modified sequence
atgaccgagaacgtggtgtgcaccggcgccgtgaacgccgtgaaggaggtgtgggaaaagagaattaagaagctgaatgaggatctcaaaagggaaaaggagttccagcataagctcgttcgaatttgggaggaaagagtcagtctaaccaagctcagggagaaggtcacccgcgaggacgggagagttatcctgaaaatagagaaagaggaatggaagaccctcccctctagtcttctgaaactgaatcaattgcaagagtggcagctccaccgtacaggcctgctaaagataccggagttcattggcaggtttcaaaacctgattgtgttggacctgagcagaaatacgatcagcgagattccaccggggataggcctactgaccagactgcaggaattaatcctgagttacaacaagataaaaactgtgccaaaagagctctctaattgcgcatctcttgaaaaattggaattagcagttaatcgggacatatgcgacttgcctcaggagctaagcaatctgctcaaactgacacatctggatctatccatgaacgacttcaccacaatccctttagccgtgctaaatatgcccgccttggaatggctggacatgggaagtaataaactggagcaactcccagataccattgaaaggatgcagaatttgcacacgctgtggctccagcgcaacgagattacctgtctgccccagactatatcaaacatgaaaaacctcggtaccctggttctgtctaacaacaagctgcaggatatacctgtgtgcatggaagagatggcaaacctcagatttgtgaattttcgggataacccgcttaagctgaaggtgagcctgcccccaagcgaagggacagatgaggaagaagaacgcgaactgttcggtttgcagttcatgcacacctatatacaggagtctaggcggagagctgatcatcaggtcaacggatctactacccttcccatctccattaacactgatggctag

SEQ ID NO: 337030 - DNA, 1008 bp, Artificial Sequence
  derived and/or modified sequence
atgaccgagaatgtggtctgcaccggcgctgtgaacgccgtaaaggaggtgtgggaaaagagaatcaagaagcttaacgaggacctgaaacgggagaaggaatttcagcacaagctggtccgcatatgggaagagagggtcagcctaaccaaattgagggagaaagtgacacgagaagacggaagagtgatccttaaaattgaaaaagaagagtggaagactcttccaagttccctattaaagctgaatcagctgcaggaatggcagctgcataggactgggttgcttaagatccctgagttcattggtaggtttcaaaacctgattgtgctggatctaagcagaaacacaatatccgagattcctcctggcatagggctgctgacgcgcctccaggaactgattctgagctataataaaatcaaaacagtgccgaaggagctgtcgaattgcgccagcttggaaaagcttgagcttgccgtgaacagagatatttgcgacttgccccaggaactgagtaacctgcttaagctgacccacttagacctgtctatgaatgactttacaacaattccactcgctgtcctgaacatgccggcacttgagtggcttgacatgggttccaataagctggagcagctccctgacactattgaaagaatgcagaatctccataccttgtggcttcagagaaatgagattacttgcttaccacagactattagcaatatgaagaatttagggacgctggtcctcagcaataataaattgcaggatattcctgtgtgcatggaagaaatggctaatctacggtttgttaattttcgcgataatccactgaagctcaaagtgtctttgcctccttctgagggaactgatgaggaagaagagcgggagttgttcgggctacagtttatgcacacgtacattcaggaatccagaagacgcgctgaccaccaggtgaacggctccacgaccttacccattagcatcaacactgatggatag

SEQ ID NO: 337031 - DNA, 1008 bp, Artificial Sequence
  derived and/or modified sequence
atgactgagaacgtagtctgcacaggcgcagtgaatgccgtcaaagaagtttgggagaaacggattaaaaaactgaacgaggacctgaagcgggagaaggagttccagcataaattagttaggatttgggaagagagagtatccctgaccaagttgagagaaaaagtgacccgtgaggatggccgagtgattcttaaaattgagaaggaggagtggaaaaccctgccctcgtcactgctgaagctgaaccagctgcaggagtggcaattgcatcgaactgggctgctgaagatcccagaatttatcggcaggttccagaacctaatagtactggacctgtccagaaatacaatcagtgaaataccccctggcatcggcctccttactcggctccaggaattaatcctgtcgtataacaaaattaagacagtacccaaagagttgtcaaactgcgcttctcttgagaaattggagctggccgtgaatcgcgacatctgcgacctacctcaggaactgagtaatctgttaaagttgactcatttagacctcagcatgaacgacttcaccaccataccgctagcagtgttgaatatgccagccctcgagtggctagacatgggcagtaacaagctggagcagctccctgacactattgagcggatgcagaatctgcacacattatggttgcagcgcaacgaaatcacttgtctgccgcagaccatcagcaatatgaagaacctaggaacccttgttctctccaataataagttgcaggatattccagtgtgcatggaggagatggcaaaccttcggtttgtcaatttcagggataaccctcttaaactcaaggtgtctcttcccccttctgaaggcacggatgaagaagaagagagggaactgtttggcctgcagtttatgcacacatacatccaggagtctaggcggagggccgaccaccaagtgaacggatcgaccacattgcctatcagtatcaacactgatggctag

SEQ ID NO: 337032 - protein, 1220 aa, Artificial Sequence
  derived and/or modified sequence
MPGLLNWITGAALPLTASDVTSCVSGYALGLTASLTYGNLEAQPFQGLFVYPLDECTTVIGFEAVIADRVVTVQIKDKAKLESGHFDASHVRSPTVTGNILQDGVSIAPHSCTPGKVTLDEDLERILFVANLGTIAPMENVTIFISTSSELPTLPSGAVRVLLPAVCAPTVPQFCTKSTGTSNQQAQGKDRHCFGAWAPGSWNKLCLATLLNTEVSNPMEYEFNFQLEIRGPCLLAGVESPTHEIRADAAPSARSAKSIIITLANKHTFDRPVEILIHPSEPHMPHVLIEKGDMTLGEFDQHLKGRTDFIKGMKKKSRAERKTEIIRKRLHKDIPHHSVIMLNFCPDLQSVQPCLRKAHGEFIFLIDRSSSMSGISMHRVKDAMLVALKSLMPACLFNIIGFGSTFKSLFPSSQTYSEDSLAMACDDIQRMKADMGGTNILSPLKWVIRQPVHRGHPRLLFVITDGAVNNTGKVLELVRNHAFSTRCYSFGIGPNVCHRLVKGLASVSEGSAELLMEGERLQPKMVKSLKKAMAPVLSDVTVEWIFPETTEVLVSPVSASSLFPGERLVGYGIVCDASLHISNPRSDKRRRYSMLHSQESGSSVFYHSQDDGPGLEGGDCAKNSGAPFILGQAKNARLASGDSTTKHDLNLSQRRRAYSTNQITNHKPLPRATMASDPMPAAKRYPLRKARLQDLTNQTSLDVQRWQIDLQPLLNSGQDLNQGPKLRGPGARRPSLLPQGCQPFLPWGQETQAWSPVRERTSDSRSPGDLEPSHHPSAFETETSSDWDPPAESQERASPSRPATPAPVLGKALVKGLHDSQRLQWEVSFELGTPGPERGGAQDADLWSETFHHLAARAIIRDFEQLAEREGEIEQGSNRRYQVSALHTSKACNIISKYTAFVPVDVSKSRYLPTVVEYPNSAALRMLGSRALAQQWRGTSSGFGRPQTMLGEDSAPGNGKFQALNMEASPTALFSEARSPGREKHGASEGPQRSLATNTLSSMKASENLFGSWLNLNKSRLLTRAAKGFLSKPLIKAVESTSGNQSFDYIPLVSLQLASGAFLLNEAFCEATHIPMEKLKWTSPFTCHRVSLTTRPSESKTPSPQLCTSSPPRHPSCDSFSLEPLAKGKLGLEPRAVVEHTGKLWATVVGLAWLEHSSASYFTEWELVAAKANSWLEQQEVPEGRTQGTLKAAARQLFVLLRHWDENLEFNMLCYNPNYV

SEQ ID NO: 337033 - DNA, 3663 bp, Artificial Sequence
  derived and/or modified sequence
atgccaggattactaaactggatcacgggggcagccctccctctcaccgcaagtgacgtgacctcatgtgtctccggctatgcgctgggcttgaccgcttcactgacttatgggaatcttgaggctcaaccatttcaaggcctgtttgtataccctctggatgagtgtactaccgttattgggttcgaggcggtcattgccgaccgggtggtgaccgtccagatcaaggacaaggctaagctggaaagtggtcacttcgacgcgtcccacgtaaggtcacctaccgtgaccggcaacattctgcaggacggagtgtcaatcgcccctcattcctgtacccccggaaaggtcacccttgatgaggatctcgaacgcatcctctttgtcgctaacttgggcacgatcgctcccatggagaacgttacaattttcatcagtacttcatctgaactcccaaccttgccttcaggagctgtgagagtgctgctgcccgctgtgtgcgccccaaccgtgccacaattctgcacgaagtctactggtacttccaatcagcaggcccagggaaaagatagacattgctttggagcttgggctcctggttcatggaacaagttgtgcctggctaccctgctgaacaccgaggtgtcaaatcccatggaatacgaattcaatttccaattagagattagggggccatgcttacttgccggagtggaaagcccgactcatgagatacgcgctgatgcagcaccatccgctcgttccgcgaaatcaatcattattacgctggctaacaagcataccttcgacaggccggtggaaattctaatacaccctagcgaacctcacatgccacatgtacttatagagaaaggcgatatgacacttggagagtttgaccaacacctgaagggcaggactgatttcataaagggtatgaaaaagaaatctcgagcagagcgaaaaacagagataattcgaaagcgcctgcataaagacattccacatcacagtgtgataatgctgaatttctgtcccgatttgcagagcgtgcagccctgcttgcgcaaagcccatggggaattcatatttctcatcgaccggtcttcctcaatgtctgggatctctatgcatcgagtgaaagatgcaatgctcgtggcactgaaatctctcatgccagcttgcctctttaacattattggattcggaagcaccttcaagtctttgttcccttcctctcagacctacagcgaggactctctggccatggcctgtgatgatattcaacgaatgaaggccgacatggggggaacaaatatcctctcacctctgaaatgggtgatcaggcagcctgtccataggggccatccgcgactcctgttcgtgatcaccgatggcgcagtgaacaacactgggaaggtgctggaactggtgcggaatcacgcattttctacacgctgctattcgttcggtatcggccctaatgtgtgtcatcgcctggtcaaggggctggcatccgtttccgaaggcagtgcagagctccttatggaaggagagcgactgcagcctaagatggtaaaaagtctgaaaaaagctatggccccagtcttgtctgacgtcacagttgaatggatctttccagagactaccgaagtgctggtctcgccggtgtctgcatcatccctttttccaggggagaggcttgtggggtacggcatcgtgtgcgatgcctcccttcacataagcaaccccaggtcagacaagaggcgacgatattcaatgctacatagccaggagtcaggaagcagtgtcttctaccactctcaggacgacggacctggactggagggcggtgattgcgccaaaaacagcggcgcacccttcatactgggccaggccaagaatgcacgcttggccagcggagactctactactaagcatgatctgaatctgtcccagcgccgacgagcgtactctacgaaccaaattaccaatcacaagcccctgcccagggccactatggccagtgatccaatgcctgctgctaagcgataccctctcagaaaagccaggttacaggacctaactaaccagacctcactggatgtccagaggtggcagatcgacttgcagcctcttctcaacagcggtcaggacctgaaccaagggccaaagctccggggtcctggcgctcgccgtcccagcttgcttccccagggctgtcagcctttcctgccctgggggcaggaaactcaagcatggtccccagtgagggagcgcacaagcgactctcggtcaccgggtgacttggaaccctcccaccaccctagcgcttttgaaactgaaacgtcttccgattgggatccacccgcagagagccaggagagggctagcccatctaggcctgcaactccggcacctgttctgggaaaagccctggttaaaggcctgcacgatagtcagagattgcagtgggaagtgtcctttgagttaggaacacccggaccagaaagggggggagcccaagacgctgacctgtggagtgaaacttttcatcacttggctgcacgtgccattattcgtgattttgagcagctggctgagcgggaaggagaaattgaacaaggctcaaaccgtcgataccaggtttccgcattgcatacatccaaggcttgtaacataatcagcaagtatacagcgtttgttccagtggacgtgagcaaatcccgctacctgccaaccgtcgtggagtaccccaattccgcagctctgagaatgttgggctcccgcgcactggctcagcagtggagaggtactagcagtggttttggcagacctcagactatgctcggtgaggatagcgccccaggaaacggcaagtttcaagccttgaatatggaagcttccccaactgccctcttttctgaggccagatcgccagggagagaaaagcacggagccagtgagggacctcaaaggtctttggcgaccaataccctgtcttctatgaaagcttccgaaaacctctttggctcttggctgaacttaaacaaatccagacttctgacaagagcagccaaaggcttcctgtctaagccactgatcaaggctgtagagagcaccagcggaaaccagtccttcgactatatccccctcgtttccctccagcttgcgtcaggagcctttcttctcaatgaagcattttgtgaggccactcatatccccatggagaagctgaaatggacttcaccgttcacttgtcaccgtgtgagtctcactacccggcctagtgagtccaaaactccatctccccagctatgtacttcatcccctcccagacatccctcctgtgattctttttccctagagcccttggctaaggggaagctgggtctcgagcctcgagcagtcgtggagcacaccgggaagctgtgggctactgtcgtgggtctggcctggctcgagcactcctccgcatcgtatttcacagaatgggagctggtggcagcaaaggccaatagttggctcgagcagcaggaggtccccgaaggtagaacacaggggaccctgaaggccgctgcgaggcaactattcgtcctcctgaggcactgggacgaaaatctcgagttcaacatgctgtgctacaatcctaactacgtttag

SEQ ID NO: 337034 - DNA, 3663 bp, Artificial Sequence
  derived and/or modified sequence
atgccagggctcctaaactggatcacaggcgcagccctccctttgacagcctctgacgtcaccagctgtgtgtccgggtacgctcttggcctgaccgcttctcttacatacggaaatctcgaagctcagccttttcagggtctgtttgtgtaccctcttgacgaatgtaccaccgtcatcggattcgaggcagtcatcgctgatagagtggtcaccgtgcaaattaaagacaaggcaaaactggagagtggccattttgacgcttcccatgtccggtctcccaccgtgactggcaacatattgcaggacggcgtgtccatcgctcctcacagttgcacgcccggaaaagtaacactggacgaggacttagaacgaatactattcgtggcaaacctcggaacaatcgcccctatggagaatgtgactatattcattagcaccagttcagagcttcctaccctcccaagtggcgctgtaagagtactcctcccggctgtttgtgcccctacggtgccccagttctgtacgaagtctacaggaacgtcaaaccaacaggcacagggaaaggatcggcattgttttggagcctgggctcctggcagttggaacaagctgtgcctcgccactttactgaataccgaggtttcaaatcccatggaatacgaatttaattttcagctcgagattcgcggaccgtgtctgttggcaggtgtggagagccccacccacgagatcagagcagacgccgctcctagtgccagatctgcaaagagtatcataattactctggccaataaacacacttttgatcgtcccgtcgagattctcatccatccgtcagagccgcacatgcctcatgttctgattgagaagggcgatatgactttgggagaatttgatcagcatttgaaaggacggaccgactttattaagggcatgaaaaagaaatctagagcagagcggaagaccgagataatccggaagaggttgcacaaagatatcccgcatcacagcgtaatcatgctgaacttctgccctgatttacaaagtgtgcagccatgcctacgaaaggcccacggggaatttatttttctcatcgatagaagttcatccatgtccggaatctccatgcatcgagtgaaggatgccatgctggtggctctgaagtccctgatgcctgcatgtttatttaacatcattggcttcggctcaaccttcaagtctctattccccagttcacaaacttatagcgaagatagtctggccatggcctgcgatgacatacagagaatgaaggctgacatggggggaaccaatattttgagccccttaaagtgggttattcggcaacctgttcacagaggacacccccgactgctcttcgtgattaccgatggcgctgtgaataacactgggaaggtcctcgaactggtgcggaaccacgcattttccacacggtgctatagcttcggtatcggacccaacgtgtgtcaccggcttgtaaaaggattggcctcggtctcagaagggtctgctgaactcttgatggaaggggagaggcttcagccgaagatggtcaaatcactgaagaaagccatggcaccagtgctttctgatgttacagtagagtggatatttccagaaaccactgaggttctggtcagccccgtttcagccagcagcttgtttccaggagaacgccttgtgggttatggaatagtgtgtgacgccagcctgcacatcagcaacccacgcagcgataaacggagacggtattccatgctgcactctcaagaatctggctcctccgtgttctaccatagccaagacgatggaccaggcctcgaggggggagattgcgccaaaaatagcggcgctcctttcatcctgggacaagccaaaaacgcgcgtttagcttcaggcgacagcactacaaaacatgatctgaacctcagccagcggcgacgggcatactcgaccaatcaaatcaccaatcataaaccgctgcccagggccactatggcatcagatccgatgcctgccgctaagcgctatcctctgaggaaagcgcgtctgcaagacttgaccaaccagacttccttggacgtgcaacggtggcagatcgacctgcagcccctccttaatagtggccaggaccttaaccagggacctaagctgcgagggcctggagccagacgtccctcactcctcccacagggttgtcaaccattcctcccatgggggcaggagacacaggcctggagtccggtgagggaaagaacctccgactctagaagtcccggagatcttgagccatcccaccacccatcagcgtttgagaccgagacatcatcagactgggaccccccagccgagtcccaggagcgtgcctctccctccaggcccgctaccccagccccagtactcggcaaggccctggtgaagggcctgcatgacagccagaggctccagtgggaagtgtccttcgagttgggaacccccggacccgagcgcggtggtgcacaggacgctgatttatggtctgaaacatttcaccatctggctgctcgggctattattcgtgacttcgagcagctggcagagagagaaggcgagattgagcagggatcaaaccgtcgctatcaggtgagcgcccttcacactagcaaagcctgcaacatcatatccaagtatacagctttcgtacccgtggatgtgagcaagtcccgctacctccctaccgtcgtggaatatccaaattcggccgctctccgaatgctcggctccagagccctcgctcagcaatggaggggcacctcgtccggcttcggtaggccacagacaatgctgggtgaagacagcgcaccaggcaatgggaaattccaggccttaaatatggaagcttcccctacagcgctgttctcggaagccaggtctcccggtagggagaaacacggcgcatcagaaggccctcagcgctccttggccactaatactctttcgagcatgaaggccagtgaaaacctcttcggttcatggttaaacctgaacaagtctcgcttgctcacacgcgcagctaaggggttcctgtctaaacctctcatcaaggccgtcgagagcacttccgggaatcagagtttcgattacattccattagttagcctgcagcttgcctctggtgcctttttgttgaacgaagccttctgtgaggcaacccacattcctatggaaaaactgaaatggacttcacccttcacttgccaccgcgtatccctaacaactcgtccgtctgaatctaagactcccagcccgcagctctgcacatcctcacccccaagacatccatcctgtgactcgttctcattggagccacttgctaagggtaagttaggccttgagcctcgggctgttgttgaacataccggcaagctgtgggcaacagtggtaggcctagcgtggttggagcactcgagcgcctcatattttacagaatgggaactcgtcgcagccaaagctaattcctggctggaacagcaagaagtgcccgaaggacgcacacaggggacccttaaagccgctgcccgtcagcttttcgtgctgttgagacattgggacgagaacctggaatttaacatgttatgctataatcccaattacgtgtag

SEQ ID NO: 337035 - DNA, 3663 bp, Artificial Sequence
  derived and/or modified sequence
atgcctggcttattaaattggatcacaggagccgccttgcctttaaccgcgtctgatgtgacatcttgtgtgagcggctacgcccttggccttactgcctcccttacttacggaaatctggaggctcagccattccagggactttttgtgtaccccttagacgagtgcaccacagtgatcggatttgaggccgtgatcgcggatcgcgtggtgactgtgcagattaaagacaaggcaaaactggagtccggacattttgacgcctctcatgttagatctccgaccgtgaccggtaacattcttcaggacggcgtttcaattgcaccccattcatgcactcccggcaaggtgaccctagatgaggatctggagaggattctatttgtagccaacctcggaaccatcgctcccatggagaacgtgactatttttatctctacatcttctgagttgcctaccctaccatccggcgccgtgcgcgtccttctgcctgccgtgtgcgcgcctaccgtaccccagttttgcaccaaatcgacaggcaccagtaatcagcaagcccaggggaaggacagacactgctttggcgcctgggcacctggaagctggaacaagctatgtctggccacactgctgaacacagaggttagtaaccccatggaatatgagttcaacttccagctcgagatccgtggaccctgcttactggcaggggtcgagtctcctacccacgagatccgcgctgatgccgccccaagtgcgagaagtgccaagtcaatcattatcaccttggctaacaagcacacttttgacaggcctgtggagatcctcatccatccatccgagcctcacatgccgcacgtacttatcgagaaaggcgatatgaccctcggcgaatttgaccaacaccttaagggaaggaccgatttcattaaaggaatgaaaaaaaagtcaagagcagaacgaaagacagaaattatcagaaagagactgcataaggacattcctcatcatagcgtgataatgttgaacttctgccctgacctgcaaagcgtacagccttgcctacgaaaggctcatggggagtttatctttctgatagataggtcctcgtctatgagtgggatatctatgcatcgcgtgaaagacgccatgctcgtagctttaaagtcgttaatgcccgcctgtcttttcaacatcattgggttcggttcgacattcaagagtctttttccctcaagccagacatactcagaggattcactggctatggcttgtgacgacattcaacgcatgaaagccgatatggggggaacaaacatcttatctcccctcaaatgggtgattagacagcccgtccacagagggcatccacggctactgtttgtaattactgacggcgcagtgaataatactggaaaggtcctagagttagtcaggaaccacgcattctcaactaggtgttacagcttcggcattggccccaatgtatgccatagactggtgaaaggactcgcaagtgttagcgaggggtcggcggagttactgatggaaggtgagcgcctgcagccaaaaatggtgaagagtctgaagaaggctatggcccccgtcctgtctgatgttacggtggaatggatcttcccggaaaccaccgaagtgttagtgtcccctgttagcgctagctcgctgttcccgggagaacggctagttggatacggaattgtctgcgacgccagcctacatatcagcaatcccaggagcgataagcggcgacgatattctatgctccactcccaagagtctgggagttccgtgttctaccattcgcaggacgatggacccggcctggagggcggcgactgcgctaaaaatagcggagcgcccttcatcctcggtcaggccaagaatgctcgattagcatccggcgacagtaccactaagcacgacctgaacctgtcacagcgacgacgggcttatagtacaaaccagattacgaatcacaagcccctcccccgtgccacaatggcaagtgatcccatgccagcagcaaagaggtatcccctccggaaggccaggctacaggatttgaccaaccaaacttcccttgatgtgcagagatggcagatcgacctgcagccccttctgaattccggtcaagatctcaaccagggacccaagctccggggtcccggtgcacgccgtccatcactgctcccacagggctgccagccgttcctgccttggggtcaggaaacgcaggcctggagtcctgttagggaacggaccagtgatagtcgcagtcccggcgacctcgagccctcccaccatcctagcgcgttcgaaactgaaacctctagcgactgggatcctccggccgagtcacaggaacgagcaagcccgagccggcctgcaacaccggccccagtcctcgggaaagcactggtaaaagggctccacgatagccaaaggctgcagtgggaggtatcctttgagctgggaacccccgggccagagcgcggcggtgcacaagatgctgacctgtggtctgaaacatttcaccatctggccgcccgagctataatacgcgactttgagcagctcgccgagcgggaaggcgaaattgagcagggatccaatcgccggtaccaggtcagcgctttacatacatccaaagcctgtaatataatctcaaaatataccgcttttgttcccgttgatgtgagcaaaagcagatacctgccaactgttgtggagtatccaaactcagcggcgttacgaatgctcggatcgagggctttggcccaacagtggagaggaacctccagcggcttcggccgaccacagactatgctgggagaagactcggccccaggcaatggtaaattccaggctttgaacatggaggcgtcccctaccgcacttttttcagaggcccgaagcccaggtagagaaaaacacggcgcatctgaggggccccaaagatcactggccacaaatacgctgagttccatgaaggcatccgagaacttgtttgggagctggctgaatctcaacaaaagcaggctgttaacaagagcagcaaaaggcttcctgtctaagccactgataaaggctgtcgaatctacgagcggcaaccagtcatttgactatatacctttggtgtcactccagctggcaagcggggcgttcctcctgaacgaggccttttgtgaagctacccatatcccaatggagaagctaaaatggacttcccctttcacatgccaccgtgtatccctaaccacaagaccgtcagagtccaaaaccccttctcctcagctttgcacctcctcacctccacgccacccatcttgcgactcattctcccttgagcctctcgccaagggcaagctgggacttgaaccacgagctgtagtagagcacactggaaaactgtgggccaccgttgtgggcctcgcctggttggagcactcatcagctagctactttactgagtgggaactggtggccgcgaaggctaattcatggttggaacaacaggaggtccccgaaggacgaactcagggcacactcaaggcagcggcaagacagctgttcgtcctgctccggcattgggacgagaatttagagtttaacatgctgtgttataatcctaattatgtgtag

SEQ ID NO: 337036 - DNA, 3663 bp, Artificial Sequence
  derived and/or modified sequence
atgccaggtctgctgaattggattactggagccgcactccccttgactgcatccgatgtgacctcttgtgtgtctggttatgccctggggttaaccgcaagccttacatatgggaatcttgaggcacagccattccagggcctgttcgtctatcctctggatgagtgtactacagtcattgggttcgaagctgtgattgccgaccgcgtggttacggtccagatcaaagataaagccaaacttgaatcaggccattttgatgcgtcgcacgtaaggtccccgactgttactgggaacattctgcaggatggcgtgagcattgctccgcattcttgtactcctggcaaagtcaccctagacgaggatctggagagaatcctttttgtcgccaacctggggacgatcgctccaatggaaaatgttacgatatttatctctaccagctccgagcttccaacactgccaagcggagcagtcagggtacttctccctgcagtgtgcgcccctacagtgccccaattctgtactaagagcacgggcacatccaatcagcaggcgcagggaaaggaccgacattgcttcggcgcatgggcccccggcagttggaacaagctctgtctggccacgctccttaacaccgaggtgtctaatcctatggaatacgagttcaacttccaacttgaaattcgcgggccgtgcctgctagctggcgttgaaagtcccacacatgagatcagggccgatgccgccccttccgcgcgatcagcaaagagcataatcatcacccttgcgaacaaacacactttcgataggccagtcgagatcctcatccatcccagcgagccccatatgccgcatgtgctcatagagaagggagacatgaccctgggggagttcgaccagcacctgaagggaagaaccgacttcataaagggcatgaaaaagaagagcagggcagagaggaaaacagagataattcgtaaacgtctgcataaggacattccgcatcactccgtgatcatgcttaatttttgcccagacctgcagagcgtgcagccctgcctgaggaaggctcacggggaattcatttttctgatcgacagaagttcgtccatgagtggaattagcatgcaccgagttaaggacgccatgttggtggcactgaaatctcttatgccagcttgtctttttaacatcattggattcgggtccacttttaagtccctgttcccaagctcccaaacgtacagcgaagattcactggctatggcatgtgatgatattcagcgaatgaaagctgatatgggtggcacaaacatactcagtccgctcaaatgggtcatcagacagccagtccacagaggccatccaagacttctttttgttatcaccgacggcgccgtcaataacacaggcaaagtgctggaactggtgcggaatcacgccttcagcacgaggtgctactcgtttggcatcggacccaatgtgtgtcaccgcctggtgaagggactcgccagtgtctccgagggaagcgccgagttgctcatggagggtgaacgcctgcagccaaaaatggtgaaatctctaaaaaaagctatggccccagtactgagcgacgtaacagtggagtggatctttccagaaacaaccgaggtgcttgtgtcccccgtgtccgccagttccctttttcccggcgagaggttggtgggctatggaatagtttgcgacgcgtcactacatatcagtaacccgcgctctgacaagaggagacgttattccatgctgcactcccaggagagtggaagtagcgtgttttatcactctcaggacgatggccccggactcgagggcggagattgcgcaaaaaacagtggtgctcctttcattttagggcaagcaaaaaacgcgaggcttgcctcaggtgactctactaccaaacacgatctgaatttgtctcagcgtaggagggcatactctaccaatcagatcactaatcataagccactgcccagagctactatggccagcgatccaatgcctgcagccaagcgttatccccttaggaaggctagacttcaggacctgactaaccagaccagcctcgatgtgcagaggtggcagatcgacctgcaacccttgctgaattccggccaggaccttaatcagggtccaaaactcaggggcccaggcgcaagacggcctagcttactcccccaagggtgccagccattcctaccctggggccaggagactcaagcctggtcacccgtccgagagaggacgagcgatagtagaagccctggcgacctcgaaccttcccatcacccttctgctttcgaaacagagacatccagcgattgggacccaccagccgaatcacaggaaagggcaagcccttctcgccccgctacaccagcccctgtgctgggcaaggcccttgtcaaaggcttacacgacagccagaggcttcaatgggaggtgagttttgagttaggaaccccaggccccgagcgagggggcgcccaagacgcagacttgtggagcgagacctttcatcacttggcagccagggccattatcagggattttgaacaacttgcggagagagaaggagagatcgagcagggatctaacagaagataccaagtgagtgctcttcatacatccaaagcatgcaatatcatctcaaagtacacagctttcgtcccggtggacgtttccaaatcacgatacctcccgacagtagtcgaataccctaattctgcagctttgagaatgctggggtcccgagcactcgctcaacagtggagaggcacttccagcggtttcgggaggccgcaaactatgctgggagaggactctgcacctggtaacggaaagttccaggctctaaatatggaggcctccccgaccgccctcttctcagaggcgcgatccccaggcagagagaaacatggtgcttcagaggggccacagcggagcctagctacaaacaccctgtcctccatgaaagccagcgaaaatctgttcggtagttggttgaacctcaataagagtcgcttactgacccgggccgccaaaggcttcctttcaaagcctttgataaaggccgtcgaatccacctctggaaaccagagttttgattacatccccctggtgtcgttgcagttagctagtggcgctttcctactgaatgaggcattctgtgaggctactcatatccccatggagaagctgaagtggacatctccattcacctgccacagagtgtcgctcacaactcgtccctctgaaagtaagacgccctccccccaactttgtacatcgtcaccccccaggcatccttcatgcgactctttcagcttggaacccctcgctaaaggcaagctcgggctggaaccccgcgcggtggtcgagcatacaggcaaactatgggccaccgtcgtaggcctcgcctggctggaacattcttccgctagctacttcacagagtgggaactcgtggcggcaaaggcaaactcgtggctcgagcagcaagaggtgcccgaaggaagaactcagggcaccctgaaagcagccgccaggcagctcttcgttttactccggcactgggatgagaatcttgagtttaacatgttatgctacaatccaaactatgtttag

SEQ ID NO: 337037 - DNA, 3663 bp, Artificial Sequence
  derived and/or modified sequence
atgccaggtttgctgaattggattaccggcgctgccctacccctgactgcttctgatgtcacgtcatgtgtttcaggatatgccttaggcctcacagcgagcttgacttatggcaacctggaagctcaaccattccaaggacttttcgtgtaccccctcgacgaatgcactaccgtcatcggcttcgaagccgtgatcgctgatcgcgttgtgacggtgcagattaaggacaaggctaagttagagtcgggccacttcgacgcctcccacgttcgatcccccactgtaactggcaatatcctgcaagatggcgtgagcattgctccacactcttgtacccccggtaaagtcacactggacgaggaccttgagcgaatcttatttgttgctaatctcggcacgatcgctcccatggagaacgttacgattttcatatcaaccagcagcgaactgcccactctgccaagtggcgccgtaagggttctgctccccgccgtctgcgctcctaccgtccctcaattttgcactaaatcaacaggcactagtaatcagcaagcgcaaggaaaagacagacactgcttcggcgcctgggcaccaggttcttggaataaactgtgcctcgcaaccctacttaacacagaggtgtctaatcccatggagtatgagtttaatttccagctggagatcagaggaccttgtctcctggcaggagtagaatcgcccactcacgaaatccgggctgatgcagcaccctcggccagatccgctaaatctatcatcataaccttagccaacaaacacacttttgacaggcccgtagagatattaatacacccttctgagccacatatgccacatgtattgattgagaaaggggacatgaccctaggagagtttgaccagcatctcaaaggtcgcacagatttcatcaaagggatgaaaaaaaagtccagagctgaaagaaaaaccgaaatcatacggaaaagactccataaggatatcccccatcactccgtaattatgcttaacttctgtcctgacctgcagagtgttcaaccctgtctcagaaaggcacacggagaatttatatttctgatagatcggtcgtcatctatgtcaggtatttcaatgcaccgggtaaaggacgccatgctcgtagctctgaaatcgcttatgccagcttgtttattcaacattatcggatttggttccacgtttaagagcttatttccatctagccagacatactctgaagactccctggcgatggcatgcgacgacatccagcgaatgaaggctgacatgggaggtactaacatcctcagtccactgaaatgggtcattagacagccggtgcatagagggcacccaagacttctatttgtaatcaccgacggggcagtgaataacacaggaaaagttttagagttggttcgaaaccacgcattctctacccgatgctattctttcggcataggacccaacgtctgtcacaggctggtgaaggggttggcttctgtgtcagaagggagtgccgagcttcttatggaaggagagcgcttgcagcccaagatggttaagtccctgaaaaaagcgatggctccagtgctgagcgatgtgactgttgaatggatttttcccgagacgaccgaggtgcttgtttccccagtctctgcctcatctttgttccccggcgagaggttagtgggctatggaatcgtgtgtgatgctagcctccatatcagcaacccgagaagtgacaagaggcgacgctattctatgttgcatagtcaggagagtggaagcagtgttttctatcattcccaagacgatggacctgggctggaaggtggcgattgtgctaagaatagcggggcaccctttatcctgggtcaagccaagaacgctagactggcaagcggagactctactactaaacatgatctaaacctgtctcagcgtcgtcgcgcatactcaactaatcagattacaaatcacaaaccattgccgagagcaaccatggcctctgatcctatgcctgccgccaaaagataccctctgcgtaaagccagactccaggatttaacaaatcagacaagcctggatgtgcagcggtggcagatcgaccttcagcccctgctaaattccggacaggatttaaatcagggaccaaagttgcggggaccaggcgcaaggagaccatcactcctgcctcaagggtgtcagcctttcctcccatgggggcaagaaactcaggcctggtcaccagttcgcgaacgcaccagtgacagccgctctcctggagacctggaaccatctcatcatccctcagccttcgaaacagaaacttcttctgactgggatccacccgccgaaagccaagagcgagcaagcccatctcgccctgctaccccagctcccgttctgggcaaagccctggtgaaaggactccatgatagccagcgactccagtgggaagtgtcattcgaactcggtacgcctggaccagagcggggaggtgcacaagacgctgatttgtggagcgagacttttcatcacctcgctgccagagcaatcatccgggacttcgagcagctggccgagagagaaggcgaaattgaacagggcagcaacagaagatatcaagtgagtgcgttacataccagcaaagcctgtaacattattagtaagtacaccgcctttgttcccgtcgatgtgagtaaatctcgttatcttcctaccgtcgttgaatatcctaactcagccgcccttagaatgctcgggtcacgggccttggctcagcagtggcggggtacatcgagtggcttcggccggcctcagactatgctgggggaagatagtgctcctggcaacggaaaatttcaagccctcaatatggaagctagtcctactgcccttttcagtgaagcccgcagccccggacgagagaaacatggcgccagtgagggcccacagcgctctctagctactaacactttaagcagcatgaaagccagtgaaaatctattcggctcgtggcttaatctgaacaagtcaagactgttgaccagggccgcaaagggctttctaagcaagcctttgattaaagcagtagagtcgacttccggcaaccaatccttcgattacatcccactagtatcattgcagttagcatccggcgcctttctgttgaacgaagccttctgcgaggccacccacatcccaatggagaagctgaaatggacttctcccttcacctgccatagagtatccctaacgaccagacccagtgaatcaaaaaccccttctcctcagctttgcacctcctcacctccacgccacccatcttgcgactcattctcccttgagcctctcgccaagggcaagctgggacttgaaccacgagctgtagtagagcacactggaaaactgtgggccaccgttgtgggcctcgcctggttggagcactcatcagctagctactttactgagtgggaactggtggccgcgaaggctaattcatggttggaacaacaggaggtccccgaaggacgaactcagggcacactcaaggcagcggcaagacagctgttcgtcctgctgagacactgggacgaaaatctcgagtttaatatgttgtgctataatcctaactacgtttag

SEQ ID NO: 337038 - DNA, 3663 bp, Artificial Sequence
  derived and/or modified sequence
atgccgggcctgctgaattggataaccggagctgctctgccattgacggcatccgacgtcacgtcctgcgtctcgggctacgccttagggcttactgcttcactaacatacggtaatttggaagcccagcctttccagggattattcgtgtaccccctggatgaatgcactacagttattggttttgaagccgttatagccgacagagtggtgaccgtacagatcaaggacaaagccaaacttgaaagcggacatttcgatgcttctcacgttcgctcgccaacggtgactgggaatattttgcaggacggtgttagtattgctccccactcctgtacccctgggaaggttactcttgacgaggacctggaaagaattctgtttgttgccaatttagggactattgcccccatggaaaatgtgacaatcttcattagcactagtagcgaactcccaacactgccaagcggcgcagtgcgagtcttgctgccagccgtctgcgccccaaccgttccacagttctgcactaaaagtaccggcaccagcaatcagcaggcacagggcaaagacaggcattgctttggcgcatgggcacccggctcatggaacaaactgtgcttagccacactcttgaataccgaagtttctaatcccatggagtacgaatttaattttcagctggaaatccgaggaccatgcctactggcaggcgtggagtcacccacacacgagatacgagccgacgcagctccttctgccaggtccgccaaaagcataatcattactttggccaataaacacacctttgataggccggtcgagatccttatccacccatctgagccacacatgccacacgtattgattgaaaagggagatatgacattgggagagtttgatcagcatttgaaaggcaggactgactttattaaagggatgaagaagaaatccagagccgagcggaagacagaaatcataaggaaaagactgcacaaggacataccccaccactctgtgattatgctaaatttctgccccgacctacaaagtgtacagccatgcctccgaaaggcccacggagagttcattttcctgattgaccgtagttcctcaatgtcagggatctcaatgcacagagtgaaagacgcaatgcttgtggccctcaagagtctgatgccagcttgcctattcaatatcattggcttcggtagcacattcaagagcctgtttccaagctctcagacatattctgaagatagcctggcaatggcttgcgacgacatacagcggatgaaggcggatatgggcggcacaaatatactaagtcctttgaagtgggtgatcaggcaacccgtccaccgcggacatcctcggttactcttcgtgatcacagatggagcggttaacaataccgggaaggtcctcgagcttgtaagaaaccacgcattctcgacgcggtgctactctttcgggattgggccaaacgtttgtcataggcttgtaaagggcctcgcgtcagtatccgagggatccgcagagctgctaatggagggagagcgcttgcagcccaaaatggttaagtccttgaaaaaagccatggcaccagtgctaagtgatgtcaccgtagagtggattttccctgagaccacagaagtgctagtgtcccccgtgtcggctagtagtttgtttcccggagaaagactggttggttacggaatcgtttgtgatgcatctctgcacatctctaaccccagaagcgataaacgaaggcgatattcgatgctgcactcacaagagtccggaagttcagttttttaccattcccaggatgatggcccaggcctcgaaggaggtgactgtgccaaaaactccggagctccattcatcctcggccaagccaagaacgccagactcgcctcaggagacagcactacaaagcatgacctcaacctcagccaaaggagacgagcgtattcaactaaccagattactaatcataagccactaccacgcgccacaatggcttccgatcccatgcctgccgccaaacgttatcctctgaggaaggcaagactccaggatcttaccaaccagacaagcctcgacgtccagcgctggcaaatagacttgcaaccacttctcaactcaggccaagacctgaaccagggacctaagctccggggacctggggctagaagaccgtcattactgccacagggctgtcaaccttttcttccctgggggcaagaaacacaggcatggagtcccgtgagggagaggacctccgactcccgatctccaggagacctcgagccgtcgcaccacccgtccgcctttgagacagagacctcctccgattgggacccccctgcagagtcacaagagagagccagccctagtcgaccagctactcccgcccccgtgctgggtaaagccctagtcaagggcctgcacgatagccaacgattacaatgggaagtttctttcgagctaggcacacctggccctgaacgaggcggcgcacaggatgcagatttgtggagcgagacctttcatcacttggcagctcgcgccatcatcagggattttgagcagctcgccgaaagagagggcgaaattgagcaaggcagcaacagaagatatcaggtcagcgccctgcacacatctaaggcttgtaacatcattagcaaatacaccgccttcgttcctgttgatgtgtccaagagccgctatcttcctacagtcgtggaataccccaactccgccgctttgagaatgctgggttcgagagctcttgctcaacaatggcggggcactagctccggatttggaaggcctcagacaatgttaggcgaagattctgcccctggcaatggcaagttccaagcacttaacatggaagctagcccaaccgccttgttttcagaagccagaagccccggcagggaaaagcatggagccagtgaaggtcctcagaggtctctggccaccaacacactgagtagtatgaaagcctctgagaatctgttcggatcgtggctgaacctgaacaaatccagattgctgacccgggctgcaaaagggtttcttagtaaacctctgatcaaagccgtggaatccacctctggtaatcagtcttttgactacatcccgctagtctccctacagctggccagtggggcatttctgttgaacgaagctttttgtgaagccactcatatccctatggaaaaactgaaatggacaagccctttcacatgccatcgagtgtcacttacaacccgaccctccgagtcaaaaactccctccccgcagctctgtacatcctccccccctagacatccatcttgtgactcatttagcctggaacctcttgcaaaaggcaaattgggcctggagccaagagccgttgtggagcacacaggaaaattgtgggcaacagtagttgggcttgcctggctcgaacattccagtgcctcatactttactgaatgggaattggtcgccgccaaggccaactcctggctcgagcagcaagaggtgccggaaggacggacacaaggtacactaaaggctgctgctagacaactattcgtgctgcttagacattgggatgaaaacctagaatttaacatgctctgctacaaccctaattacgtatag

SEQ ID NO: 337039 - DNA, 3663 bp, Artificial Sequence
  derived and/or modified sequence
atgcccggcctgctgaactggatcaccggcgccgccctgcccctgaccgccagcgacgtgaccagctgcgtgagcggctacgccctgggcctgaccgccagcctgacctacggcaacctggaggcccagcccttccagggcctgttcgtgtaccccctggacgagtgcaccaccgtgatcggcttcgaggccgtgatcgccgacagagtggtgaccgtgcagatcaaggacaaggccaagctggagagcggccacttcgacgccagccacgtgagaagccccaccgtgaccggcaacatcctgcaggacggcgtgagcatcgccccccacagctgcacccccggcaaggtgaccctggacgaggacctggagagaatcctgttcgtggccaacctgggcaccatcgcccccatggagaacgtgaccatcttcatcagcaccagcagcgagctgcccaccctgcccagcggcgccgtgagagtgctgctgcccgccgtgtgcgcccccaccgtgccccagttctgcaccaagagcaccggcaccagcaaccagcaggcccagggcaaggacagacactgcttcggcgcctgggcccccggcagctggaacaagctgtgcctggccaccctgctgaacaccgaggtgagcaaccccatggagtacgagttcaacttccagctggagatcagaggcccctgcctgctggccggcgtggagagccccacccacgagatcagagccgacgccgcccccagcgccagaagcgccaagagcatcatcatcaccctggccaacaagcacaccttcgacagacccgtggagatcctgatccaccccagcgagccccacatgccccacgtgctgatcgagaagggcgacatgaccctgggcgagttcgaccagcacctgaagggcagaaccgacttcatcaagggcatgaagaagaagagcagagccgagagaaagaccgagatcatcagaaagagactgcacaaggacatcccccaccacagcgtgatcatgctgaacttctgccccgacctgcagagcgtgcagccctgcctgagaaaggcccacggcgagttcatcttcctgatcgacagaagcagcagcatgagcggcatcagcatgcacagagtgaaggacgccatgctggtggccctgaagagcctgatgcccgcctgcctgttcaacatcatcggcttcggcagcaccttcaagagcctgttccccagcagccagacctacagcgaggacagcctggccatggcctgcgacgacatccagagaatgaaggccgacatgggcggcaccaacatcctgagccccctgaagtgggtgatcagacagcccgtgcacagaggccaccccagactgctgttcgtgatcaccgacggcgccgtgaacaacaccggcaaggtgctggagctggtgagaaaccacgccttcagcaccagatgctacagcttcggcatcggccccaacgtgtgccacagactggtgaagggcctggccagcgtgagcgagggcagcgccgagctgctgatggagggcgagagactgcagcccaagatggtgaagagcctgaagaaggccatggcccccgtgctgagcgacgtgaccgtggagtggatcttccccgagaccaccgaggtgctggtgagccccgtgagcgccagcagcctgttccccggcgagagactggtgggctacggcatcgtgtgcgacgccagcctgcacatcagcaaccccagaagcgacaagagaagaagatacagcatgctgcacagccaggagagcggcagcagcgtgttctaccacagccaggacgacggccccggcctggagggcggcgactgcgccaagaacagcggcgcccccttcatcctgggccaggccaagaacgccagactggccagcggcgacagcaccaccaagcacgacctgaacctgagccagagaagaagagcctacagcaccaaccagatcaccaaccacaagcccctgcccagagccaccatggccagcgaccccatgcccgccgccaagagataccccctgagaaaggccagactgcaggacctgaccaaccagaccagcctggacgtgcagagatggcagatcgacctgcagcccctgctgaacagcggccaggacctgaaccagggccccaagctgagaggccccggcgccagaagacccagcctgctgccccagggctgccagcccttcctgccctggggccaggagacccaggcctggagccccgtgagagagagaaccagcgacagcagaagccccggcgacctggagcccagccaccaccccagcgccttcgagaccgagaccagcagcgactgggacccccccgccgagagccaggagagagccagccccagcagacccgccacccccgcccccgtgctgggcaaggccctggtgaagggcctgcacgacagccagagactgcagtgggaggtgagcttcgagctgggcacccccggccccgagagaggcggcgcccaggacgccgacctgtggagcgagaccttccaccacctggccgccagagccatcatcagagacttcgagcagctggccgagagagagggcgagatcgagcagggcagcaacagaagataccaggtgagcgccctgcacaccagcaaggcctgcaacatcatcagcaagtacaccgccttcgtgcccgtggacgtgagcaagagcagatacctgcccaccgtggtggagtaccccaacagcgccgccctgagaatgctgggcagcagagccctggcccagcagtggagaggcaccagcagcggcttcggcagaccccagaccatgctgggcgaggacagcgcccccggcaacggcaagttccaggccctgaacatggaggccagccccaccgccctgttcagcgaggccagaagccccggcagagagaagcacggcgccagcgagggcccccagagaagcctggccaccaacaccctgagcagcatgaaggccagcgagaacctgttcggcagctggctgaacctgaacaagagcagactgctgaccagagccgccaagggcttcctgagcaagcccctgatcaaggccgtggagagcaccagcggcaaccagagcttcgactacatccccctggtgagcctgcagctggccagcggcgccttcctgctgaacgaggccttctgcgaggccacccacatccccatggagaagctgaagtggaccagccccttcacctgccacagagtgagcctgaccaccagacccagcgagagcaagacccccagcccccagctgtgcaccagcagcccccccagacaccccagctgcgacagcttcagcctggagcccctggccaagggcaagctgggcctggagcccagagccgtggtggagcacaccggcaagctgtgggccaccgtggtgggcctggcctggctggagcacagcagcgccagctacttcaccgagtgggagctggtggccgccaaggccaacagctggctggagcagcaggaggtgcccgagggcagaacccagggcaccctgaaggccgccgccagacagctgttcgtgctgctgagacactgggacgagaacctggagttcaacatgctgtgctacaaccccaactacgtgtag

SEQ ID NO: 337040 - DNA, 3663 bp, Artificial Sequence
  derived and/or modified sequence
atgcccgggttactcaactggattaccggggcagcgctgcctctgaccgcatccgatgtcacttcttgcgtgtcagggtacgcactgggccttaccgcctctcttacatacgggaatctggaggcccaaccgttccaggggctgtttgtttaccctctggatgaatgcactacagtaattgggtttgaggccgttattgccgatcgcgtggtcactgtgcagatcaaagataaggctaaactcgaatctgggcacttcgacgcatcacacgtcaggtccccaacagtgacagggaatattttacaggacggagtatcaatcgctccgcactcctgtacccccggaaaggttacactcgacgaggacctggaaagaatactgtttgtcgctaaccttgggacaattgctcccatggagaatgtcactatctttatctcaacaagttccgagcttccaactctcccgtcgggagccgtgagagttttgctgcccgccgtgtgtgcacccaccgttccacagttctgtacgaaatctaccggcaccagcaaccagcaggcccaagggaaagatagacactgctttggggcctgggccccaggaagttggaacaaattgtgcttggctaccttattgaacactgaggtgtctaaccccatggaatacgaattcaacttccagctggagattcgcggcccctgtctcctcgccggggtggagagcccaacccacgagatccgggcagacgctgccccatcagctcgcagcgccaaatctattattatcaccctggctaataagcatacctttgaccgcccagtagagattctgattcatccgtccgagccacacatgcctcacgtgctgatcgagaagggtgatatgaccctcggagagtttgatcaacacctgaaaggacgcaccgacttcatcaagggtatgaagaagaagtctagagctgagcgcaaaaccgagatcattcgcaagagactgcataaggatattccacatcatagcgtgatcatgctgaacttttgccccgaccttcagagcgtccagccatgtttaaggaaagcacacggcgaattcatattcctgatagaccgaagctcctctatgtctggcattagtatgcatcgggtgaaggatgccatgctcgtagcgttaaagagcctgatgcctgcctgtctgtttaatatcatcggtttcggctccacctttaaaagtctcttcccaagcagtcaaacatattctgaagacagcctcgccatggcctgcgacgacatccagagaatgaaggctgatatgggcggcaccaacattctctcccctctgaagtgggtgatccggcaacccgtgcatcgcggacatcctcggttactgttcgtcatcacagacggcgcagtgaacaataccggcaaagtcctggagcttgtgcggaaccacgctttctcgacaagatgttactccttcggaatcggccccaacgtctgccaccgccttgttaagggtctggccagtgtcagcgagggttctgccgaactccttatggaaggcgagagactccagccaaagatggtgaaatctcttaaaaaggccatggcccctgtgctgtccgatgtgaccgtggagtggatcttcccggagactactgaggtgcttgtcagtccggtaagcgcctcctctctctttcccggcgaaagactcgtgggatacggaatcgtttgcgacgcctcattgcatatttcgaaccctcgatcagacaagcgtcgtcgatactcaatgctacattctcaggagtctgggtcatcagtattttatcactcccaggatgacgggcccggtctggaggggggcgattgcgccaaaaattcaggagcaccctttatcctcggccaagccaaaaatgcaagactggcttctggagacagcactaccaagcatgacctcaatctgtcacagagaagaagagcatactccaccaatcagataaccaaccataagccgctgccccgagcaactatggcgtctgaccccatgcctgccgccaagcggtatcctttacgaaaggccagactacaggatctgacaaatcaaacgtccctcgacgtccagcggtggcagatcgatctgcagccactcctcaattccggccaggatttgaaccagggtccgaagcttcgggggcctggagcccgcagacccagcttactgccccagggatgccagcccttcctgccgtgggggcaggagacccaagcttggagccccgtgcgggagcggacatcagattccaggtccccaggggacttggagcccagccatcacccctctgcgtttgagaccgagacctctagcgactgggatccccctgcagagtcacaagaaagggcttcaccgagtcgacccgcaaccccagcccctgttctagggaaggccctcgtgaagggtctgcatgactcccaaaggctgcagtgggaagtctccttcgagcttggaacccctggtccagagcgcggcggggcacaggacgcagatctatggtcagaaacatttcatcacctagccgcccgggctatcattcgcgacttcgaacagctggctgaaagagagggagagatcgaacaggggagcaatcggagatatcaggtgtcagccctgcacacaagcaaagcttgcaacatcatttcgaagtacaccgcctttgttcccgtcgacgtctccaaaagtagatacctgccgacagttgtcgaataccctaattctgccgccttgcgaatgttgggatcaagggctctggcccagcaatggcgcggcacctcttcagggtttggtcgtccccaaactatgctgggcgaagacagtgcccccggaaatggaaagttccaagcactaaacatggaagcaagccctacagccctgttctctgaagcaaggtcaccaggccgggaaaaacatggggcctccgaggggcctcaacgaagccttgcaacaaacaccctcagctctatgaaggcctctgaaaatctctttggaagctggttgaaccttaataagagcagactcctcacccgggccgccaaaggctttctcagtaaacccctgattaaagccgtggagagcacttctggaaatcaatcctttgattatatccccctggtttccctgcagctcgcttcaggggcctttttattgaacgaggcattctgtgaagccactcatatccctatggagaagctgaagtggacaagtccctttacatgtcatagagtttccttaactacaaggccctccgaaagtaagactcctagcccacagttgtgtacatcatcgccgccccggcacccttcgtgtgattccttcagcttagagccattggccaaagggaagctgggattggaaccccgtgccgtggtggagcacaccgggaagctttgggccacagttgtcggcctggcctggctggaacactcgagtgccagctacttcacagagtgggagctggttgccgcaaaggctaactcctggcttgagcagcaagaagtccccgaagggcgcactcagggcactctgaaagcagctgccaggcagcttttcgttttgttaaggcactgggatgagaaccttgagtttaacatgctgtgctacaaccctaactacgtgtag

SEQ ID NO: 337041 - DNA, 3663 bp, Artificial Sequence
  derived and/or modified sequence
atgcccggcctgctgaattggatcaccggcgcagctctgccgttgacggcctccgatgtcacttcatgcgtgagtggctatgccctgggactaactgcttcactcacatacgggaatctggaggcccaacctttccaagggctctttgtttaccccctggacgagtgtaccaccgttattggtttcgaggcagttatcgccgacagggtcgtgaccgtgcagatcaaggacaaagccaaactggagtcggggcacttcgacgctagccacgtcaggtcccccaccgttacaggaaatattctccaagatggagtgtctattgccccacacagttgtacccctggcaaagtgaccctcgacgaggatctcgagcggatcctcttcgtggcgaatctggggacaatagcccccatggagaacgtgacaatcttcataagcacatcttccgagctgcccaccctgcctagtggcgccgtgcgggtattgcttccggccgtgtgcgctcccacagtgcctcaattctgtacaaaaagcaccggaacctcaaaccaacaggcccaaggcaaagaccgccattgctttggcgcttgggcacctggtagctggaacaagctgtgcctggctaccctactgaacacagaagtgagcaatcccatggaatacgagtttaactttcagttggaaatccgtggaccttgcctactcgccggcgtcgaatccccaacacacgaaattcgcgctgatgctgcgccctccgcaagaagtgcaaagtcaattattattacacttgccaacaagcacaccttcgatagacctgtggagatactcatacatcccagcgagcctcatatgcctcacgtcttgatcgaaaagggcgatatgacacttggcgaatttgaccagcacctaaaaggccggacagatttcataaagggaatgaagaagaaaagccgggcggagcgcaagacagagattatacggaaaaggctccataaggatatccctcaccacagcgttattatgctgaatttttgccccgacctgcaaagcgtccagccttgcttgcgcaaggcccacggcgaatttatttttttgattgaccggagctcttccatgtctggtatctctatgcacagggtgaaggatgccatgctggtcgccctcaaatctttaatgcccgcctgcttattcaatattattggattcgggtcaacgttcaagtctctgttcccatcttcgcagacgtacagtgaggacagccttgctatggcttgtgatgacattcagagaatgaaggctgacatgggtggaactaatattttatctccactaaagtgggtcatccggcagcctgtgcaccgaggccatcctaggctgttgttcgtcatcacagacggcgctgtcaataacactgggaaagtgcttgagctcgtccgtaaccacgctttcagcactcggtgctacagttttgggattgggccaaacgtgtgccacagattggttaaaggcctggcatcagtctctgaaggaagcgccgagcttttgatggaaggggaaaggctccaaccaaagatggtgaaaagccttaaaaaggccatggccccagtcctctccgacgttactgtggagtggatcttcccggaaaccaccgaggtactcgtctcgccggtgagcgcgtctagtctatttcctggcgagcggctcgtggggtatggtatcgtctgtgacgccagcctgcacatctcaaaccccaggtccgacaagcgtaggaggtatagtatgcttcacagccaggagtccggctcctccgtgttctaccattcacaggacgatggcccgggactggagggaggcgactgtgctaaaaacagcggtgccccctttatccttggccaagctaagaatgctagactggcgtcgggagatagcactacaaaacatgatctgaacctgtcccagcggcggagagcctactcgactaatcagattaccaatcacaaaccactccctcgcgctacaatggctagtgaccccatgcccgccgccaaacgatatcctctaaggaaagcccgacttcaggacctgacgaatcagacctcattagacgtacagagatggcagatcgacctgcaaccattgctgaatagcggccaggacctaaaccaggggcccaaactgagaggcccaggagcccggcgcccttcccttttgccccagggatgccaaccctttttgccatggggccaggaaacccaggcatggtcaccggtccgggagagaacttcagacagcagatctcccggcgacctcgagccttcccaccacccaagtgccttcgagaccgaaacatcaagcgactgggatccacctgccgaatctcaagagcgcgcctccccaagccggcctgcaacgcccgcaccagtcctgggcaaagccttggtgaaagggctgcacgacagccagcggctccagtgggaggtctcattcgaattaggaacacccggacctgaacgtggcggagctcaagatgctgacctgtggagcgaaacatttcaccatttagcagcaagggcaatcattcgcgacttcgagcagctggccgaaagagagggcgaaatagagcagggttccaatagacggtatcaggtatccgcactgcacaccagtaaagcgtgtaacattatttcaaagtatacagccttcgttcctgtggatgtgagtaagtccaggtacttgccaacagtggtggaatatccgaatagtgccgctctccgaatgctcggatcgcgggccctcgctcagcagtggagaggcacgtcctccggattcggcagaccccaaaccatgttaggagaagactcagctcctggcaatggcaaatttcaagcgctaaacatggaagctagccctacagctctctttagcgaggcacggtcgcctggacgggagaagcacggcgccagtgaaggtccacaacgctccctcgcaactaacaccctaagctctatgaaagcatctgagaacctcttcggctcctggctaaacctgaataaaagtcggctactgacccgcgctgccaagggcttcttgtcgaaacctctgatcaaagctgttgagagtacgtcaggtaaccagagtttcgactatatcccactcgtgagcttgcagctagcatccggggccttcctgttaaacgaagctttctgtgaagccacccacatccctatggagaagcttaaatggacatctccatttacctgccaccgcgtgagtctgacaactcgcccctccgaatccaagacaccctcgcctcagctgtgtacatcaagcccaccaaggcatccatcatgcgattcatttagtcttgaaccactagctaaagggaaactcggtttggaaccacgcgcagtagtcgagcatacagggaagctgtgggcgaccgtcgtcggattggcctggctagagcacagctctgcatcttatttcaccgagtgggaactggtcgctgctaaggctaactcctggctcgaacagcaggaagtgcctgagggccggacacagggaacactgaaggctgctgctcgacagctattcgtgctgctgcgtcactgggatgagaacttagagttcaatatgctctgctacaaccctaactatgtgtag

SEQ ID NO: 337042 - DNA, 3663 bp, Artificial Sequence
  derived and/or modified sequence
atgcctggcctgctgaactggatcactggagctgccctgcccctgacagccagtgatgtgaccagctgtgtgtctggctacgccctgggcctgacagccagcctgacctacggcaacctggaggcccagcccttccagggcctgtttgtgtaccccctggatgaatgtaccaccgtcatcggctttgaggccgtgattgctgacagagtggtgacagtgcagatcaaggacaaggccaagctggagagcggccactttgatgccagccacgtgcgcagccccaccgtgactggaaacatcctgcaggatggagtgtccatcgccccccacagctgcacccctgggaaggtgaccctggatgaggacctggagcgcatcctgtttgtggccaacctgggcaccatcgcccccatggagaatgtgaccatcttcatcagcaccagcagcgagctgcccaccctgcccagcggggctgtgcgggtgctgctgcctgctgtgtgtgcccccaccgtgccccagttctgcaccaagagcacaggcaccagcaaccagcaggcccagggcaaggacagacactgcttcggggcctgggcccctggctcctggaacaagctgtgcctggccaccctgctgaacacagaggtgagcaaccccatggagtatgagttcaacttccagctggagatccggggcccctgcctgctggccggcgtggagagccccacccatgagatccgggcagatgctgcccccagcgcccggagcgccaagagcatcatcatcaccctggccaacaagcacacctttgacaggcctgtggagatcctgatccaccccagcgagccccacatgccccacgtgctgattgaaaaaggagacatgaccctgggggagtttgaccagcacctgaagggccgcacagacttcatcaagggcatgaagaagaagagcagagctgagaggaagacagagatcatcaggaagaggctgcacaaggacatcccccaccacagcgtcatcatgctgaacttctgcccagacctgcagagcgtgcagccctgcctgaggaaggcccatggagagttcatcttcctgattgacaggagcagctccatgagcggcatctccatgcaccgggtgaaggatgccatgctggtggccctgaagagcctgatgcctgcctgcctcttcaacatcatcggcttcggcagcaccttcaagagcctcttccccagcagccagacctacagcgaggacagcctggccatggcctgtgatgacatccagaggatgaaggctgacatgggcggcaccaacatcctgagccccctgaagtgggtgatccggcagcctgtgcaccggggccacccccggctgctgtttgtgatcacagatggagctgtgaacaacacaggcaaggtgctggagctggtgagaaatcatgccttcagcacccgctgctacagctttggcatcggccccaacgtgtgccaccggctggtgaagggcctggcctctgtgtctgagggcagcgctgagctgctgatggagggggagcggctgcagcccaagatggtgaagagcctgaagaaggccatggcccctgtgctgagtgatgtgacagtggagtggatcttccctgagaccacagaggtgctggtgtcccctgtgtctgccagcagcctcttccctggagagcggctggtgggctatggaattgtgtgtgatgccagcctgcacatcagcaaccccaggagtgacaagagaagacgctacagcatgctgcacagccaggagagcggcagctctgtgttctaccacagccaggatgatggccctggcctggagggcggggactgtgccaagaacagcggggcccccttcatcctgggccaggccaagaatgcccggctggccagcggggacagcaccaccaagcatgacctgaacctgagccagaggagaagagcctacagcaccaaccagatcaccaaccacaagcccctgccccgggccaccatggccagtgaccccatgcctgctgccaagcgctaccccctgaggaaggcccggctgcaggacctgaccaaccagaccagcctggatgtgcagcgctggcagattgacctgcagcccctgctgaacagcggccaggacctgaaccagggccccaagctgcggggccctggggcccggcggcccagcctgctgccccagggctgccagcccttcctgccctggggccaggagacccaggcctggagccctgtgcgggagaggaccagtgacagccgcagccctggggacctggagcccagccaccaccccagcgcctttgaaacagagaccagcagtgactgggaccccccagctgagagccaggagcgggccagccccagcaggcctgccaccccagcccctgtgctgggcaaggccctggtgaagggcctgcatgacagccagaggctgcagtgggaggtgtcctttgagctgggcaccccaggccctgagcggggcggggcccaggatgctgacctgtggagcgagaccttccaccacctggccgcccgggccatcatccgggactttgagcagctggccgagcgggagggggagattgagcagggcagcaacagacgctaccaggtgtctgccctgcacaccagcaaggcctgcaacatcatcagcaagtacacagcctttgtgcctgtggatgtgtccaagagccgctacctgcccaccgtggtggagtaccccaacagcgctgccctgaggatgctgggcagccgggccctggcccagcagtggaggggcaccagcagcggcttcggccggccccagaccatgctgggggaggacagcgcccctggaaatggcaagttccaggccctgaacatggaggccagccccacagccctcttcagcgaggcccggagccctggccgggagaagcatggagccagcgagggcccccagaggagcctggccaccaacaccctgagctccatgaaggccagcgagaacctgtttggctcctggctgaacctgaacaagagccggctgctgaccagggctgccaagggcttcctgagcaagcccctcatcaaggctgtggagagcaccagcggcaaccagagctttgactacatccccctggtgtccctgcagctggccagcggggccttcctgctgaatgaggccttctgtgaggccacccacatccccatggagaagctgaagtggaccagccccttcacctgccaccgggtgtccctgaccacccggcccagcgagagcaagacccccagcccccagctgtgcaccagcagccccccaagacaccccagctgtgacagcttcagcctggagcccctggccaagggcaagctgggcctggagcccagggctgtggtggagcacacaggcaagctgtgggccaccgtggtgggcctggcctggctggagcacagcagcgccagctacttcacagagtgggagctggtggccgccaaggccaacagctggctggagcagcaggaggtgcctgagggccgcacccagggcaccctgaaggctgctgcccggcagctgtttgtgctgctgcggcactgggatgagaacctggagttcaacatgctgtgctacaaccccaactacgtgtag

SEQ ID NO: 337043 - DNA, 3663 bp, Artificial Sequence
  derived and/or modified sequence
atgcccggcttgctgaattggatcacgggggcagccctgcccctcaccgcgtctgatgttacctcctgtgtcagcggttatgccctgggcctaactgcctccctcacctatggcaacctggaagcccagcccttccagggcctcttcgtgtaccccctggatgagtgcaccacggtgatcggctttgaggcagtcattgccgaccgtgtcgtgacagtacagatcaaggacaaagccaagctggagagcggccacttcgatgcctcccatgttcgatccccaacagtcacagggaacattctgcaagacggggtttccatagcccctcattcctgcacaccgggaaaggtgaccttggacgaggatttggagcggatcctgttcgtggccaacctggggaccattgcccccatggagaatgtcaccatcttcatcagcacctcctcggagctcccaacgctgcccagcggggctgtgagggtccttctgcctgctgtctgtgccccaaccgtgccccagttctgcaccaagagcactggcacctccaaccaacaggcccagggcaaagacaggcactgcttcggtgcctgggccccgggctcctggaataagttgtgcctggcgactctcctgaacaccgaagtgtccaaccccatggagtatgagttcaacttccagctggagatccgtgggccatgtctgctcgcaggggtggagagtcccactcatgagattcgtgccgacgccgccccatctgcccgctcggccaagagcatcatcatcaccttggccaacaagcacacctttgaccggcctgtggagatcctcatccaccccagcgagccccatatgccccatgtcctgatagagaaaggggacatgaccctgggagagtttgaccagcacttgaagggaagaacagatttcattaaagggatgaagaagaagagcagagcagagcggaagacagaaatcattcgaaaacgcctccacaaagacattccccaccactccgtcatcatgctcaacttctgtcccgacctccagtcagtccagccgtgcctgagaaaggcccacggggagttcatcttcctcattgacaggagcagcagcatgagcgggatcagcatgcaccgagtcaaggatgccatgttggtggcccttaagagcctcatgccagcctgcctcttcaatatcattgggtttggatccacatttaagagcctttttccttccagccagacctacagtgaggacagcttggccatggcttgtgatgacatccagagaatgaaggccgacatgggtgggaccaacatcctttcccctctcaagtgggtcatcaggcagccagtgcaccgaggccacccgcggctcctcttcgtgatcacagatggcgctgtcaacaacacagggaaggtgctggagctggtgcgaaatcacgccttctccaccaggtgctatagctttggaattggacccaacgtctgccacagactggtgaaaggactggcatctgtgtccgagggcagtgctgagctcctgatggagggggagcggctgcaacccaagatggtcaaatccttgaagaaggccatggccccagtcctgagcgatgtgactgtggagtggatcttccctgagaccactgaggtcctggtctcacccgtcagcgccagctccctcttccctggagaacggctggtggggtatggcattgtatgtgatgcttctttgcacatctccaatcccagatctgacaagaggcgccggtacagcatgctgcactctcaggagtctggcagctctgtcttctaccactctcaggatgacggacccgggctggaaggtggagactgtgccaagaactcgggggcacccttcatcctagggcaggccaaaaatgcccggctagccagcggagactctaccaccaagcacgatctgaacctctctcagcgacggagggcatacagcaccaaccagatcaccaatcacaagcccctcccaagagccaccatggcaagtgaccccatgccagctgccaagagatacccactgcggaaagccaggctgcaggacctcaccaaccagaccagcctggatgtccagcggtggcagattgatttgcagcccttgctgaacagtggtcaggacctgaaccagggccccaaactccgtggcccaggggcccgaaggccctctctgctgccccaaggctgccagcccttcctgccctggggccaggagacccaggcctggagccctgtgagagagcggacttctgacagccgaagccctggagatctggagccgtcccaccatccctctgccttcgagacagagacgtcctcggactgggaccccccagccgagtcccaggagcgagccagtcccagcaggcccgccaccccggccccggtgctgggcaaggccctggtcaaaggcctgcacgacagccaacgcctgcagtgggaggtgagcttcgagctggggacccctggaccggagcggggcggcgcgcaggatgccgacctatggagcgagaccttccaccacctggcggcccgcgccatcatccgcgacttcgagcagctggcggagcgcgagggcgagatcgagcaggggtccaaccgccgctaccaagtgagcgccttgcacaccagcaaggcctgcaacatcattagcaaatacacagccttcgtgcctgtggacgtgagcaagagccggtacctgcccaccgtggtggagtaccccaactctgctgccctgcgtatgcttggctctcgggccctggcccaacagtggaggggcacctcttctggctttggaaggccgcagacgatgcttggagaagattcggcaccaggaaatggtaaatttcaggccctaaacatggaggcaagtcccactgctctcttcagcgaggccaggtcccccggccgcgagaagcacggtgcttctgaaggtccccagcgcagcctggctacaaatactctttcttccatgaaggcctcagagaatctctttggatcctggctaaatctcaacaagtccaggctactgacgcgagcagccaagggcttcctgagcaagccactgatcaaagctgtggagtcgacctccgggaaccagagcttcgactacatacctctggtgtctctgcagctggcctccggagccttcctgctcaacgaagccttctgtgaggccacgcacatccccatggagaagctcaagtggacgtcccccttcacctgccatcgagtgtccctcaccacccgcccgtctgagtccaagaccccgagtccccagctgtgcaccagctccccgcctaggcacccgtcctgtgacagcttctccctggagcctctggccaagggcaagctgggcctggagccgagggcagtggtggagcacactgggaagctgtgggccacggtggtggggctggcatggctggagcacagttcggcctcctacttcactgagtgggagttggtggctgccaaggccaactcatggctggagcagcaggaagtacccgagggccgcacgcagggcacactcaaggccgctgcccgccagctgtttgtgcttctgcggcactgggatgagaatctcgagttcaatatgctctgctataacccgaattatgtgtag

SEQ ID NO: 337044 - DNA, 4490 bp, Artificial Sequence
  derived and/or modified sequence
atcgcaatgtgggcattgatcaagccagctgccagggcagcgggcgcagggcttgggcactggagcccagccccggaccgcacctccagcagtgctgggtgcagaaggcagtcactgtggcagtggagagacagagtgtgtacccagacacgtgttgcttctggggtaaggttctgaaggctgagtagccagcgggatgcccggcttgctgaattggatcacgggggcagccctgcccctcaccgcgtctgatgttacctcctgtgtcagcggttatgccctgggcctaactgcctccctcacctatggcaacctggaagcccagcccttccagggcctcttcgtgtaccccctggatgagtgcaccacggtgatcggctttgaggcagtcattgccgaccgtgtcgtgacagtacagatcaaggacaaagccaagctggagagcggccacttcgatgcctcccatgttcgatccccaacagtcacagggaacattctgcaagacggggtttccatagcccctcattcctgcacaccgggaaaggtgaccttggacgaggatttggagcggatcctgttcgtggccaacctggggaccattgcccccatggagaatgtcaccatcttcatcagcacctcctcggagctcccaacgctgcccagcggggctgtgagggtccttctgcctgctgtctgtgccccaaccgtgccccagttctgcaccaagagcactggcacctccaaccaacaggcccagggcaaagacaggcactgcttcggtgcctgggccccgggctcctggaataagttgtgcctggcgactctcctgaacaccgaagtgtccaaccccatggagtatgagttcaacttccagctggagatccgtgggccatgtctgctcgcaggggtggagagtcccactcatgagattcgtgccgacgccgccccatctgcccgctcggccaagagcatcatcatcaccttggccaacaagcacacctttgaccggcctgtggagatcctcatccaccccagcgagccccatatgccccatgtcctgatagagaaaggggacatgaccctgggagagtttgaccagcacttgaagggaagaacagatttcattaaagggatgaagaagaagagcagagcagagcggaagacagaaatcattcgaaaacgcctccacaaagacattccccaccactccgtcatcatgctcaacttctgtcccgacctccagtcagtccagccgtgcctgagaaaggcccacggggagttcatcttcctcattgacaggagcagcagcatgagcgggatcagcatgcaccgagtcaaggatgccatgttggtggcccttaagagcctcatgccagcctgcctcttcaatatcattgggtttggatccacatttaagagcctttttccttccagccagacctacagtgaggacagcttggccatggcttgtgatgacatccagagaatgaaggccgacatgggtgggaccaacatcctttcccctctcaagtgggtcatcaggcagccagtgcaccgaggccacccgcggctcctcttcgtgatcacagatggcgctgtcaacaacacagggaaggtgctggagctggtgcgaaatcacgccttctccaccaggtgctatagctttggaattggacccaacgtctgccacagactggtgaaaggactggcatctgtgtccgagggcagtgctgagctcctgatggagggggagcggctgcaacccaagatggtcaaatccttgaagaaggccatggccccagtcctgagcgatgtgactgtggagtggatcttccctgagaccactgaggtcctggtctcacccgtcagcgccagctccctcttccctggagaacggctggtggggtatggcattgtatgtgatgcttctttgcacatctccaatcccagatctgacaagaggcgccggtacagcatgctgcactctcaggagtctggcagctctgtcttctaccactctcaggatgacggacccgggctggaaggtggagactgtgccaagaactcgggggcacccttcatcctagggcaggccaaaaatgcccggctagccagcggagactctaccaccaagcacgatctgaacctctctcagcgacggagggcatacagcaccaaccagatcaccaatcacaagcccctcccaagagccaccatggcaagtgaccccatgccagctgccaagagatacccactgcggaaagccaggctgcaggacctcaccaaccagaccagcctggatgtccagcggtggcagattgatttgcagcccttgctgaacagtggtcaggacctgaaccagggccccaaactccgtggcccaggggcccgaaggccctctctgctgccccaaggctgccagcccttcctgccctggggccaggagacccaggcctggagccctgtgagagagcggacttctgacagccgaagccctggagatctggagccgtcccaccatccctctgccttcgagacagagacgtcctcggactgggaccccccagccgagtcccaggagcgagccagtcccagcaggcccgccaccccggccccggtgctgggcaaggccctggtcaaaggcctgcacgacagccaacgcctgcagtgggaggtgagcttcgagctggggacccctggaccggagcggggcggcgcgcaggatgccgacctatggagcgagaccttccaccacctggcggcccgcgccatcatccgcgacttcgagcagctggcggagcgcgagggcgagatcgagcaggggtccaaccgccgctaccaagtgagcgccttgcacaccagcaaggcctgcaacatcattagcaaatacacagccttcgtgcctgtggacgtgagcaagagccggtacctgcccaccgtggtggagtaccccaactctgctgccctgcgtatgcttggctctcgggccctggcccaacagtggaggggcacctcttctggctttggaaggccgcagacgatgcttggagaagattcggcaccaggaaatggtaaatttcaggccctaaacatggaggcaagtcccactgctctcttcagcgaggccaggtcccccggccgcgagaagcacggtgcttctgaaggtccccagcgcagcctggctacaaatactctttcttccatgaaggcctcagagaatctctttggatcctggctaaatctcaacaagtccaggctactgacgcgagcagccaagggcttcctgagcaagccactgatcaaagctgtggagtcgacctccgggaaccagagcttcgactacatacctctggtgtctctgcagctggcctccggagccttcctgctcaacgaagccttctgtgaggccacgcacatccccatggagaagctcaagtggacgtcccccttcacctgccatcgagtgtccctcaccacccgcccgtctgagtccaagaccccgagtccccagctgtgcaccagctccccgcctaggcacccgtcctgtgacagcttctccctggagcctctggccaagggcaagctgggcctggagccgagggcagtggtggagcacactgggaagctgtgggccacggtggtggggctggcatggctggagcacagttcggcctcctacttcactgagtgggagttggtggctgccaaggccaactcatggctggagcagcaggaagtacccgagggccgcacgcagggcacactcaaggccgctgcccgccagctgtttgtgcttctgcggcactgggatgagaatctcgagttcaatatgctctgctataacccgaattatgtgtagttgagtgacggggaggctgggtggagggaagggtggggaggagagggatgggcagggccatgtcggcctggtttcggggagcttttggagctgtaactaatatttcagttactagaaagagccctggactggcagccaggaggcctgagttcaatcccaactttgctaccatccagccatgcaactttaggccagtgcctgcccccgtctgggcctcagtttcctcatctataaaataagagggcgagatgaaggaggtggagtggatctcaaatggttcagtggttcctttctgcccattcaggcagtcccgggctgactgctgctggggctggcgagggaagatgcagtggaagcctgagccctgtctggaggtagaccacgtgggcacggagtggacacagcaatgcccactcaaataaaagggcagatgagagaacccagtgacctcaagtaaccaggcctacaggcttgcataggcacatagagactagcaagtctggtgcctgtaggacaggctcttgtctccatggtaacagccaaggaccccccctaaatcccacttaaaagccaattggagaagcatccttctcaacgctttacaaaagagtagtttgggggccttttgttt

SEQ ID NO: 337045 - DNA, 3663 bp, Artificial Sequence
  derived and/or modified sequence
atgcccggcctgctgaactggatcaccggcgccgccctgcccctgacggcttccgatgttactagttgtgtcagcggatatgcgctgggcctgaccgcatcactcacttacggcaatctggaagcccagccgtttcaggggctgttcgtgtatccactggacgaatgcactaccgtaatcggctttgaggctgtaatcgctgatcgcgtggttacggtccaaatcaaagataaagctaaactggagagcggccacttcgacgcttctcacgtgagatcaccaactgtcacaggtaatattctccaggacggtgtttcaattgcaccacattcctgcacccccggaaaggtcaccctcgatgaggacctcgagaggatcctgttcgtcgcgaatctggggacgatcgcccccatggagaacgtgactatatttatcagcactagctcagagctgcccacccttccgagcggagctgtcagggttctactgcctgctgtgtgcgctcctaccgtaccacaattctgcaccaaaagcactgggacctcaaatcagcaggcccagggcaaggaccgacattgtttcggggcctgggctcccggttcttggaacaaactgtgcctcgccacattgttgaatacggaagtctctaacccaatggagtatgagttcaacttccagctggaaatcaggggcccatgccttctggctggcgtggaatcccctacccacgagattagggccgacgcagcaccaagcgcacgttccgcaaagagtatcatcattacacttgctaacaagcacacgtttgacaggccagtagaaattctcattcatccgtcagagccgcacatgccgcatgttctgatagaaaagggggacatgactttgggggagtttgaccagcacctcaaggggcggactgactttatcaagggcatgaagaagaaaagtagagccgaaaggaaaactgagatcatccgtaagcgccttcataaggacatcccacaccattccgtgataatgttaaacttttgcccagacttacagagcgtgcaaccctgcctgcgcaaggcacatggggaatttattttcttgatagacaggagctcctccatgtctggtatttcaatgcaccgagttaaagacgcaatgttggtggccctcaagtcactgatgcctgcttgcctgtttaatataatcggtttcggaagcactttcaagtcactgtttccatcttcacagacttactccgaagatagtctcgcaatggcttgtgatgatatacagaggatgaaggccgacatgggtggcacgaacatcctgagtcctctgaagtgggtgattcgccagcccgttcacagaggccatcctcgccttctcttcgtcattactgatggcgctgtgaacaatactggcaaggtcttagaactggtgcggaatcacgccttctccacgcgatgctattctttcggcattggccccaatgtgtgtcaccggcttgtcaaggggttggccagcgtgagcgagggaagcgcagagctgttgatggaaggggagcgcctgcagccaaaaatggttaaaagcctgaaaaaagcaatggcccctgtgctctcagacgttactgttgagtggatcttccctgagactacagaggtgcttgtctctcccgtgtccgcgtcctccctgtttccgggagagagattagtgggctacggaattgtgtgtgacgcctccctccacatcagcaaccccaggagcgataagcgtcgacgctatagcatgctgcattctcaggaatccggatcaagtgttttttaccacagccaggatgacggccccggcctcgaaggaggcgattgtgccaaaaacagtggcgccccgtttatcctgggccaggccaagaacgctagactagcttccggagattccactaccaagcacgatctgaatctatctcagagaaggagagcctacagcactaaccagatcacaaatcacaaacctctgccacgcgctactatggcgtctgatcccatgcccgccgccaaacgctaccctctgaggaaggcgagactccaggacttgacaaatcagacaagtctggacgtgcagcgctggcagatcgatctccagccattgctgaattctggccaggatctgaaccaaggtcctaaactgcggggcccgggcgctaggcgcccaagtcttctgccccagggttgtcaaccctttcttccctggggccaggaaacacaggcctggtctccagttagggagcgcacctcagattccaggtctcctggcgacctcgagccctctcaccacccatcggctttcgaaactgagacatcctctgattgggatcctcctgctgaaagccaagagcgtgcaagccctagcaggcccgccacacccgcacccgttctgggcaaagccttagtgaaggggctgcatgatagccagaggttgcagtgggaggtaagcttcgaactgggaaccccaggccctgagagaggcggcgcccaggatgccgatctgtggagtgagaccttccaccacctcgccgcgcgagcaatcattcgggactttgagcaattagcagaacgtgagggggagattgagcagggttcgaacaggcggtaccaggtctcagccctccacacgagtaaggcttgcaacattatatctaaatatactgctttcgtcccagttgatgttagcaagtcacgttaccttccaacagttgtcgagtaccccaactccgccgcacttaggatgctggggagtagggcgctggcacagcagtggaggggtacaagtagcggcttcgggcgtccacagaccatgcttggagaggatagtgcccctgggaatggtaagtttcaggcgctcaacatggaagccagccctacagctctcttctctgaggcgagatctccggggagggaaaagcacggggccagtgagggcccccaaagatctttggctaccaacacgttgtcaagcatgaaggcaagcgaaaatctttttgggtcttggctgaatctaaataaatcacgccttctcacccgcgcggcgaagggatttctgagcaagcctctaattaaggcggtggagtcgacctctgggaaccagtctttcgattatatccctttggtgtctcttcagttagcatccggcgccttcctcctgaacgaagccttctgcgaggcaacacacatccctatggaaaagctgaaatggactagccccttcacatgccacagggtcagcttgactactcgcccatctgagagtaagaccccatcaccacagctctgtaccagctctcctccccgtcatccttcgtgtgatagcttctcgctggaacctctggctaagggcaaattgggactcgagccccgggctgtagttgagcacaccggaaagctgtgggccacagttgttggactcgcgtggttagagcattcatctgccagctacttcaccgaatgggagttggttgctgccaaggccaatagctggctggagcaacaagaagttcccgagggccgcacacagggaactctgaaggctgccgcccgccagctttttgttctgcttcgccactgggacgaaaacttagagttcaatatgttgtgttataaccctaattacgtgtag

SEQ ID NO: 337046 - DNA, 3663 bp, Artificial Sequence
  derived and/or modified sequence
atgcccggcctgctgaactggatcaccggcgccgccctgcccctgactgcttccgacgtcacaagctgcgtttctggctatgctttggggttaactgcaagcctcacctacggcaacttggaagctcagccattccaaggactgttcgtctatccgctagatgaatgcaccacggtaatcggctttgaggcagtaatagctgacagggtggtcactgtgcagattaaggacaaggcaaagctcgaaagcggccactttgacgcttcacatgtgagatctcccaccgttactggtaatatcctacaggacggggtgtctattgccccccatagctgtacccccggaaaggtgacccttgatgaggatctcgaaagaattctttttgtcgcaaatctgggcacaatcgctcctatggaaaatgtcaccatctttattagcacctctagtgagttgcctactctgccatctggggcagtgcgtgttctgctcccagccgtgtgtgctcccacagtcccgcaattctgcacgaagtctaccggaaccagcaaccagcaagctcaaggcaaggacaggcactgtttcggcgcttgggcaccaggttcttggaataaactctgcttggccactctcctgaacacagaagtgagcaatcccatggaatacgaattcaattttcaactggagatcagaggaccctgtcttttagcaggcgttgaaagccctacccatgaaattcgcgctgacgccgcacctagtgcacggtctgccaagtccatcattattacactggccaacaaacacaccttcgaccgacctgtcgaaattctgattcacccttccgagcctcacatgccgcatgttctaattgagaaaggcgatatgactctaggtgagttcgaccagcacctgaaaggccggactgatttcattaaaggcatgaaaaaaaagagccgcgcggaaaggaagaccgagatcatcaggaagagactgcacaaggacatcccccaccactccgtaattatgttgaatttctgcccagacttgcaaagcgtgcagccttgtttgcggaaggcacacggcgagtttattttcctcatcgatcgatcaagttccatgtcagggatttcaatgcaccgggtgaaggacgcgatgctcgtggcactgaaatcgctgatgccagcttgtctgttcaacattatcggatttggcagtacctttaaatctttgttcccaagttcacagacatattcagaagactccctggccatggcctgcgacgacattcaaaggatgaaggccgacatgggcgggactaacattctgagcccattgaaatgggtcatacgtcagcccgtgcatagaggacatccgagattgttatttgtcatcaccgatggggccgtcaataatactggcaaagtgctggagttagtgaggaaccatgccttcagtacaagatgttattcttttgggatcggccctaatgtgtgtcacagattggtgaaaggcctggcctccgtgagtgaaggcagtgctgagctcctcatggaaggagagaggctccaacctaaaatggtcaagtcccttaagaaggcaatggcccccgttctctctgacgtgacagtggagtggatcttccccgaaacgacagaggtcttggttagtcccgtttctgcctcttctctgtttcccggcgagcgcctggtagggtacggtatcgtgtgcgacgcttccttacatatcagcaatccgagatctgacaaacgcagacgttacagcatgcttcacagtcaggaatccggctcctcagttttctaccactcccaggatgatgggcccgggctggagggcggggattgcgctaaaaatagcggagctcctttcattctgggtcaagctaagaacgctagattggccagtggcgactccacaacgaagcatgaccttaatctcagccagagacggcgggcttattctacgaatcaaattactaatcacaagcctctcccacgcgcgaccatggccagcgaccccatgccggcggcaaagagatatccacttcggaaggcgcgtctacaggaccttacgaatcagacatccctggatgttcagaggtggcagattgatctgcagccattacttaactcagggcaagatcttaaccaaggtccgaagctgcgaggccccggtgccaggcggccctcgctgctgccccaggggtgtcagccatttctgccatgggggcaggaaacccaggcttggagtccagtacgtgaacggacttctgactcccgaagcccgggggatcttgaaccaagccaccacccctctgccttcgagactgaaacttcgtctgactgggaccctcctgccgagagtcaggagcgcgctagcccctcccggccagctacccccgctccagtcttgggcaaggcactggtgaagggactgcacgattcccaacggctgcagtgggaagtttcttttgaattgggtacaccaggaccggagcgggggggcgctcaggatgcagacctttggagtgaaacatttcatcacttggccgccagagccatcatccgcgacttcgagcagctggctgagagagaaggcgagatcgagcagggttctaaccgccgataccaggtgtccgcacttcatacttctaaagcctgcaacatcatttccaaatatacagcatttgtgccagtggatgtctcaaaaagccggtatctccctaccgtggtggagtaccccaactctgccgccctgcgcatgctcggaagcagggccttggcccagcagtggcggggaacatcatctggctttgggagaccccaaaccatgctgggcgaggatagcgcgcccggcaacggtaagttccaggcattaaatatggaagcaagccctactgcattgttcagcgaggccaggtccccgggccgtgaaaagcatggcgctagcgaaggcccccagaggagtcttgccacaaatacgctttcttcaatgaaggcatcagaaaacctgttcggctcctggctgaacctcaacaagtccagactactcacccgagcagcaaagggtttcctgtcaaaacccttaatcaaagctgtggaatcaacatcaggtaaccagtcatttgattacataccacttgtgagcctgcagctcgccagcggcgcgtttctactcaatgaggccttttgcgaagcgacccatatcccaatggagaaacttaaatggacctctcccttcacttgccatagggtttctcttactacccggccctcagagagtaagaccccctcaccacaactttgcacatccagcccaccgcggcatcccagctgcgactcattttctcttgaaccactcgccaaggggaaactgggactggaacctcgggccgtcgttgagcatactggaaagctgtgggccaccgttgtgggacttgcttggctcgagcattcctccgcatcttatttcaccgaatgggaactggtcgcggcaaaggccaactcatggctggaacagcaagaagtcccagagggccgcacccaaggtactcttaaggccgccgctagacaactgtttgtcttactgcgacactgggacgaaaacctcgaattcaacatgctctgctacaaccccaattacgtgtag

SEQ ID NO: 337047 - RNA, 3663 nt, Artificial Sequence
  derived and/or modified sequence
augccuggcuuauuaaauuggaucacaggagccgccuugccuuuaaccgcgucugaugugacaucuugugugagcggcuacgcccuuggccuuacugccucccuuacuuacggaaaucuggaggcucagccauuccagggacuuuuuguguaccccuuagacgagugcaccacagugaucggauuugaggccgugaucgcggaucgcguggugacugugcagauuaaagacaaggcaaaacuggaguccggacauuuugacgccucucauguuagaucuccgaccgugaccgguaacauucuucaggacggcguuucaauugcaccccauucaugcacucccggcaaggugacccuagaugaggaucuggagaggauucuauuuguagccaaccucggaaccaucgcucccauggagaacgugacuauuuuuaucucuacaucuucugaguugccuacccuaccauccggcgccgugcgcguccuucugccugccgugugcgcgccuaccguaccccaguuuugcaccaaaucgacaggcaccaguaaucagcaagcccaggggaaggacagacacugcuuuggcgccugggcaccuggaagcuggaacaagcuaugucuggccacacugcugaacacagagguuaguaaccccauggaauaugaguucaacuuccagcucgagauccguggacccugcuuacuggcaggggucgagucuccuacccacgagauccgcgcugaugccgccccaagugcgagaagugccaagucaaucauuaucaccuuggcuaacaagcacacuuuugacaggccuguggagauccucauccauccauccgagccucacaugccgcacguacuuaucgagaaaggcgauaugacccucggcgaauuugaccaacaccuuaagggaaggaccgauuucauuaaaggaaugaaaaaaaagucaagagcagaacgaaagacagaaauuaucagaaagagacugcauaaggacauuccucaucauagcgugauaauguugaacuucugcccugaccugcaaagcguacagccuugccuacgaaaggcucauggggaguuuaucuuucugauagauagguccucgucuaugagugggauaucuaugcaucgcgugaaagacgccaugcucguagcuuuaaagucguuaaugcccgccugucuuuucaacaucauuggguucgguucgacauucaagagucuuuuucccucaagccagacauacucagaggauucacuggcuauggcuugugacgacauucaacgcaugaaagccgauauggggggaacaaacaucuuaucuccccucaaaugggugauuagacagcccguccacagagggcauccacggcuacuguuuguaauuacugacggcgcagugaauaauacuggaaagguccuagaguuagucaggaaccacgcauucucaacuagguguuacagcuucggcauuggccccaauguaugccauagacuggugaaaggacucgcaaguguuagcgaggggucggcggaguuacugauggaaggugagcgccugcagccaaaaauggugaagagucugaagaaggcuauggcccccguccugucugauguuacgguggaauggaucuucccggaaaccaccgaaguguuaguguccccuguuagcgcuagcucgcuguucccgggagaacggcuaguuggauacggaauugucugcgacgccagccuacauaucagcaaucccaggagcgauaagcggcgacgauauucuaugcuccacucccaagagucugggaguuccguguucuaccauucgcaggacgauggacccggccuggagggcggcgacugcgcuaaaaauagcggagcgcccuucauccucggucaggccaagaaugcucgauuagcauccggcgacaguaccacuaagcacgaccugaaccugucacagcgacgacgggcuuauaguacaaaccagauuacgaaucacaagccccucccccgugccacaauggcaagugaucccaugccagcagcaaagagguauccccuccggaaggccaggcuacaggauuugaccaaccaaacuucccuugaugugcagagauggcagaucgaccugcagccccuucugaauuccggucaagaucucaaccagggacccaagcuccggggucccggugcacgccguccaucacugcucccacagggcugccagccguuccugccuuggggucaggaaacgcaggccuggaguccuguuagggaacggaccagugauagucgcagucccggcgaccucgagcccucccaccauccuagcgcguucgaaacugaaaccucuagcgacugggauccuccggccgagucacaggaacgagcaagcccgagccggccugcaacaccggccccaguccucgggaaagcacugguaaaagggcuccacgauagccaaaggcugcagugggagguauccuuugagcugggaacccccgggccagagcgcggcggugcacaagaugcugaccuguggucugaaacauuucaccaucuggccgcccgagcuauaauacgcgacuuugagcagcucgccgagcgggaaggcgaaauugagcagggauccaaucgccgguaccaggucagcgcuuuacauacauccaaagccuguaauauaaucucaaaauauaccgcuuuuguucccguugaugugagcaaaagcagauaccugccaacuguuguggaguauccaaacucagcggcguuacgaaugcucggaucgagggcuuuggcccaacaguggagaggaaccuccagcggcuucggccgaccacagacuaugcugggagaagacucggccccaggcaaugguaaauuccaggcuuugaacauggaggcguccccuaccgcacuuuuuucagaggcccgaagcccagguagagaaaaacacggcgcaucugaggggccccaaagaucacuggccacaaauacgcugaguuccaugaaggcauccgagaacuuguuugggagcuggcugaaucucaacaaaagcaggcuguuaacaagagcagcaaaaggcuuccugucuaagccacugauaaaggcugucgaaucuacgagcggcaaccagucauuugacuauauaccuuuggugucacuccagcuggcaagcggggcguuccuccugaacgaggccuuuugugaagcuacccauaucccaauggagaagcuaaaauggacuuccccuuucacaugccaccguguaucccuaaccacaagaccgucagaguccaaaaccccuucuccucagcuuugcaccuccucaccuccacgccacccaucuugcgacucauucucccuugagccucucgccaagggcaagcugggacuugaaccacgagcuguaguagagcacacuggaaaacugugggccaccguugugggccucgccugguuggagcacucaucagcuagcuacuuuacugagugggaacugguggccgcgaaggcuaauucaugguuggaacaacaggagguccccgaaggacgaacucagggcacacucaaggcagcggcaagacagcuguucguccugcuccggcauugggacgagaauuuagaguuuaacaugcuguguuauaauccuaauuauguguag

SEQ ID NO: 337048 - RNA, 3663 nt, Artificial Sequence
  derived and/or modified sequence
augccaggucugcugaauuggauuacuggagccgcacuccccuugacugcauccgaugugaccucuugugugucugguuaugcccugggguuaaccgcaagccuuacauaugggaaucuugaggcacagccauuccagggccuguucgucuauccucuggaugaguguacuacagucauuggguucgaagcugugauugccgaccgcgugguuacgguccagaucaaagauaaagccaaacuugaaucaggccauuuugaugcgucgcacguaagguccccgacuguuacugggaacauucugcaggauggcgugagcauugcuccgcauucuuguacuccuggcaaagucacccuagacgaggaucuggagagaauccuuuuugucgccaaccuggggacgaucgcuccaauggaaaauguuacgauauuuaucucuaccagcuccgagcuuccaacacugccaagcggagcagucaggguacuucucccugcagugugcgccccuacagugccccaauucuguacuaagagcacgggcacauccaaucagcaggcgcagggaaaggaccgacauugcuucggcgcaugggcccccggcaguuggaacaagcucugucuggccacgcuccuuaacaccgaggugucuaauccuauggaauacgaguucaacuuccaacuugaaauucgcgggccgugccugcuagcuggcguugaaagucccacacaugagaucagggccgaugccgccccuuccgcgcgaucagcaaagagcauaaucaucacccuugcgaacaaacacacuuucgauaggccagucgagauccucauccaucccagcgagccccauaugccgcaugugcucauagagaagggagacaugacccugggggaguucgaccagcaccugaagggaagaaccgacuucauaaagggcaugaaaaagaagagcagggcagagaggaaaacagagauaauucguaaacgucugcauaaggacauuccgcaucacuccgugaucaugcuuaauuuuugcccagaccugcagagcgugcagcccugccugaggaaggcucacggggaauucauuuuucugaucgacagaaguucguccaugaguggaauuagcaugcaccgaguuaaggacgccauguugguggcacugaaaucucuuaugccagcuugucuuuuuaacaucauuggauucggguccacuuuuaagucccuguucccaagcucccaaacguacagcgaagauucacuggcuauggcaugugaugauauucagcgaaugaaagcugauauggguggcacaaacauacucaguccgcucaaaugggucaucagacagccaguccacagaggccauccaagacuucuuuuuguuaucaccgacggcgccgucaauaacacaggcaaagugcuggaacuggugcggaaucacgccuucagcacgaggugcuacucguuuggcaucggacccaaugugugucaccgccuggugaagggacucgccagugucuccgagggaagcgccgaguugcucauggagggugaacgccugcagccaaaaauggugaaaucucuaaaaaaagcuauggccccaguacugagcgacguaacaguggaguggaucuuuccagaaacaaccgaggugcuugugucccccguguccgccaguucccuuuuucccggcgagagguuggugggcuauggaauaguuugcgacgcgucacuacauaucaguaacccgcgcucugacaagaggagacguuauuccaugcugcacucccaggagaguggaaguagcguguuuuaucacucucaggacgauggccccggacucgagggcggagauugcgcaaaaaacaguggugcuccuuucauuuuagggcaagcaaaaaacgcgaggcuugccucaggugacucuacuaccaaacacgaucugaauuugucucagcguaggagggcauacucuaccaaucagaucacuaaucauaagccacugcccagagcuacuauggccagcgauccaaugccugcagccaagcguuauccccuuaggaaggcuagacuucaggaccugacuaaccagaccagccucgaugugcagagguggcagaucgaccugcaacccuugcugaauuccggccaggaccuuaaucaggguccaaaacucaggggcccaggcgcaagacggccuagcuuacucccccaagggugccagccauuccuacccuggggccaggagacucaagccuggucacccguccgagagaggacgagcgauaguagaagcccuggcgaccucgaaccuucccaucacccuucugcuuucgaaacagagacauccagcgauugggacccaccagccgaaucacaggaaagggcaagcccuucucgccccgcuacaccagccccugugcugggcaaggcccuugucaaaggcuuacacgacagccagaggcuucaaugggaggugaguuuugaguuaggaaccccaggccccgagcgagggggcgcccaagacgcagacuuguggagcgagaccuuucaucacuuggcagccagggccauuaucagggauuuugaacaacuugcggagagagaaggagagaucgagcagggaucuaacagaagauaccaagugagugcucuucauacauccaaagcaugcaauaucaucucaaaguacacagcuuucgucccgguggacguuuccaaaucacgauaccucccgacaguagucgaauacccuaauucugcagcuuugagaaugcuggggucccgagcacucgcucaacaguggagaggcacuuccagcgguuucgggaggccgcaaacuaugcugggagaggacucugcaccugguaacggaaaguuccaggcucuaaauauggaggccuccccgaccgcccucuucucagaggcgcgauccccaggcagagagaaacauggugcuucagaggggccacagcggagccuagcuacaaacacccuguccuccaugaaagccagcgaaaaucuguucgguaguugguugaaccucaauaagagucgcuuacugacccgggccgccaaaggcuuccuuucaaagccuuugauaaaggccgucgaauccaccucuggaaaccagaguuuugauuacaucccccuggugucguugcaguuagcuaguggcgcuuuccuacugaaugaggcauucugugaggcuacucauauccccauggagaagcugaaguggacaucuccauucaccugccacagagugucgcucacaacucgucccucugaaaguaagacgcccuccccccaacuuuguacaucgucaccccccaggcauccuucaugcgacucuuucagcuuggaaccccucgcuaaaggcaagcucgggcuggaaccccgcgcgguggucgagcauacaggcaaacuaugggccaccgucguaggccucgccuggcuggaacauucuuccgcuagcuacuucacagagugggaacucguggcggcaaaggcaaacucguggcucgagcagcaagaggugcccgaaggaagaacucagggcacccugaaagcagccgccaggcagcucuucguuuuacuccggcacugggaugagaaucuugaguuuaacauguuaugcuacaauccaaacuauguuuag

SEQ ID NO: 337049 - RNA, 3663 nt, Artificial Sequence
  derived and/or modified sequence
augccagguuugcugaauuggauuaccggcgcugcccuaccccugacugcuucugaugucacgucauguguuucaggauaugccuuaggccucacagcgagcuugacuuauggcaaccuggaagcucaaccauuccaaggacuuuucguguacccccucgacgaaugcacuaccgucaucggcuucgaagccgugaucgcugaucgcguugugacggugcagauuaaggacaaggcuaaguuagagucgggccacuucgacgccucccacguucgaucccccacuguaacuggcaauauccugcaagauggcgugagcauugcuccacacucuuguacccccgguaaagucacacuggacgaggaccuugagcgaaucuuauuuguugcuaaucucggcacgaucgcucccauggagaacguuacgauuuucauaucaaccagcagcgaacugcccacucugccaaguggcgccguaaggguucugcuccccgccgucugcgcuccuaccgucccucaauuuugcacuaaaucaacaggcacuaguaaucagcaagcgcaaggaaaagacagacacugcuucggcgccugggcaccagguucuuggaauaaacugugccucgcaacccuacuuaacacagaggugucuaaucccauggaguaugaguuuaauuuccagcuggagaucagaggaccuugucuccuggcaggaguagaaucgcccacucacgaaauccgggcugaugcagcacccucggccagauccgcuaaaucuaucaucauaaccuuagccaacaaacacacuuuugacaggcccguagagauauuaauacacccuucugagccacauaugccacauguauugauugagaaaggggacaugacccuaggagaguuugaccagcaucucaaaggucgcacagauuucaucaaagggaugaaaaaaaaguccagagcugaaagaaaaaccgaaaucauacggaaaagacuccauaaggauaucccccaucacuccguaauuaugcuuaacuucuguccugaccugcagaguguucaacccugucucagaaaggcacacggagaauuuauauuucugauagaucggucgucaucuaugucagguauuucaaugcaccggguaaaggacgccaugcucguagcucugaaaucgcuuaugccagcuuguuuauucaacauuaucggauuugguuccacguuuaagagcuuauuuccaucuagccagacauacucugaagacucccuggcgauggcaugcgacgacauccagcgaaugaaggcugacaugggagguacuaacauccucaguccacugaaaugggucauuagacagccggugcauagagggcacccaagacuucuauuuguaaucaccgacggggcagugaauaacacaggaaaaguuuuagaguugguucgaaaccacgcauucucuacccgaugcuauucuuucggcauaggacccaacgucugucacaggcuggugaagggguuggcuucugugucagaagggagugccgagcuucuuauggaaggagagcgcuugcagcccaagaugguuaagucccugaaaaaagcgauggcuccagugcugagcgaugugacuguugaauggauuuuucccgagacgaccgaggugcuuguuuccccagucucugccucaucuuuguuccccggcgagagguuagugggcuauggaaucgugugugaugcuagccuccauaucagcaacccgagaagugacaagaggcgacgcuauucuauguugcauagucaggagaguggaagcaguguuuucuaucauucccaagacgauggaccugggcuggaagguggcgauugugcuaagaauagcggggcacccuuuauccugggucaagccaagaacgcuagacuggcaagcggagacucuacuacuaaacaugaucuaaaccugucucagcgucgucgcgcauacucaacuaaucagauuacaaaucacaaaccauugccgagagcaaccauggccucugauccuaugccugccgccaaaagauacccucugcguaaagccagacuccaggauuuaacaaaucagacaagccuggaugugcagcgguggcagaucgaccuucagccccugcuaaauuccggacaggauuuaaaucagggaccaaaguugcggggaccaggcgcaaggagaccaucacuccugccucaagggugucagccuuuccucccaugggggcaagaaacucaggccuggucaccaguucgcgaacgcaccagugacagccgcucuccuggagaccuggaaccaucucaucaucccucagccuucgaaacagaaacuucuucugacugggauccacccgccgaaagccaagagcgagcaagcccaucucgcccugcuaccccagcucccguucugggcaaagcccuggugaaaggacuccaugauagccagcgacuccagugggaagugucauucgaacucgguacgccuggaccagagcggggaggugcacaagacgcugauuuguggagcgagacuuuucaucaccucgcugccagagcaaucauccgggacuucgagcagcuggccgagagagaaggcgaaauugaacagggcagcaacagaagauaucaagugagugcguuacauaccagcaaagccuguaacauuauuaguaaguacaccgccuuuguucccgucgaugugaguaaaucucguuaucuuccuaccgucguugaauauccuaacucagccgcccuuagaaugcucgggucacgggccuuggcucagcaguggcgggguacaucgaguggcuucggccggccucagacuaugcugggggaagauagugcuccuggcaacggaaaauuucaagcccucaauauggaagcuaguccuacugcccuuuucagugaagcccgcagccccggacgagagaaacauggcgccagugagggcccacagcgcucucuagcuacuaacacuuuaagcagcaugaaagccagugaaaaucuauucggcucguggcuuaaucugaacaagucaagacuguugaccagggccgcaaagggcuuucuaagcaagccuuugauuaaagcaguagagucgacuuccggcaaccaauccuucgauuacaucccacuaguaucauugcaguuagcauccggcgccuuucuguugaacgaagccuucugcgaggccacccacaucccaauggagaagcugaaauggacuucucccuucaccugccauagaguaucccuaacgaccagacccagugaaucaaaaaccccuucuccucagcuuugcaccuccucaccuccacgccacccaucuugcgacucauucucccuugagccucucgccaagggcaagcugggacuugaaccacgagcuguaguagagcacacuggaaaacugugggccaccguugugggccucgccugguuggagcacucaucagcuagcuacuuuacugagugggaacugguggccgcgaaggcuaauucaugguuggaacaacaggagguccccgaaggacgaacucagggcacacucaaggcagcggcaagacagcuguucguccugcugagacacugggacgaaaaucucgaguuuaauauguugugcuauaauccuaacuacguuuag

SEQ ID NO: 337050 - RNA, 3663 nt, Artificial Sequence
  derived and/or modified sequence
augccgggccugcugaauuggauaaccggagcugcucugccauugacggcauccgacgucacguccugcgucucgggcuacgccuuagggcuuacugcuucacuaacauacgguaauuuggaagcccagccuuuccagggauuauucguguacccccuggaugaaugcacuacaguuauugguuuugaagccguuauagccgacagaguggugaccguacagaucaaggacaaagccaaacuugaaagcggacauuucgaugcuucucacguucgcucgccaacggugacugggaauauuuugcaggacgguguuaguauugcuccccacuccuguaccccugggaagguuacucuugacgaggaccuggaaagaauucuguuuguugccaauuuagggacuauugcccccauggaaaaugugacaaucuucauuagcacuaguagcgaacucccaacacugccaagcggcgcagugcgagucuugcugccagccgucugcgccccaaccguuccacaguucugcacuaaaaguaccggcaccagcaaucagcaggcacagggcaaagacaggcauugcuuuggcgcaugggcacccggcucauggaacaaacugugcuuagccacacucuugaauaccgaaguuucuaaucccauggaguacgaauuuaauuuucagcuggaaauccgaggaccaugccuacuggcaggcguggagucacccacacacgagauacgagccgacgcagcuccuucugccagguccgccaaaagcauaaucauuacuuuggccaauaaacacaccuuugauaggccggucgagauccuuauccacccaucugagccacacaugccacacguauugauugaaaagggagauaugacauugggagaguuugaucagcauuugaaaggcaggacugacuuuauuaaagggaugaagaagaaauccagagccgagcggaagacagaaaucauaaggaaaagacugcacaaggacauaccccaccacucugugauuaugcuaaauuucugccccgaccuacaaaguguacagccaugccuccgaaaggcccacggagaguucauuuuccugauugaccguaguuccucaaugucagggaucucaaugcacagagugaaagacgcaaugcuuguggcccucaagagucugaugccagcuugccuauucaauaucauuggcuucgguagcacauucaagagccuguuuccaagcucucagacauauucugaagauagccuggcaauggcuugcgacgacauacagcggaugaaggcggauaugggcggcacaaauauacuaaguccuuugaagugggugaucaggcaacccguccaccgcggacauccucgguuacucuucgugaucacagauggagcgguuaacaauaccgggaagguccucgagcuuguaagaaaccacgcauucucgacgcggugcuacucuuucgggauugggccaaacguuugucauaggcuuguaaagggccucgcgucaguauccgagggauccgcagagcugcuaauggagggagagcgcuugcagcccaaaaugguuaaguccuugaaaaaagccauggcaccagugcuaagugaugucaccguagaguggauuuucccugagaccacagaagugcuagugucccccgugucggcuaguaguuuguuucccggagaaagacugguugguuacggaaucguuugugaugcaucucugcacaucucuaaccccagaagcgauaaacgaaggcgauauucgaugcugcacucacaagaguccggaaguucaguuuuuuaccauucccaggaugauggcccaggccucgaaggaggugacugugccaaaaacuccggagcuccauucauccucggccaagccaagaacgccagacucgccucaggagacagcacuacaaagcaugaccucaaccucagccaaaggagacgagcguauucaacuaaccagauuacuaaucauaagccacuaccacgcgccacaauggcuuccgaucccaugccugccgccaaacguuauccucugaggaaggcaagacuccaggaucuuaccaaccagacaagccucgacguccagcgcuggcaaauagacuugcaaccacuucucaacucaggccaagaccugaaccagggaccuaagcuccggggaccuggggcuagaagaccgucauuacugccacagggcugucaaccuuuucuucccugggggcaagaaacacaggcauggagucccgugagggagaggaccuccgacucccgaucuccaggagaccucgagccgucgcaccacccguccgccuuugagacagagaccuccuccgauugggaccccccugcagagucacaagagagagccagcccuagucgaccagcuacucccgcccccgugcuggguaaagcccuagucaagggccugcacgauagccaacgauuacaaugggaaguuucuuucgagcuaggcacaccuggcccugaacgaggcggcgcacaggaugcagauuuguggagcgagaccuuucaucacuuggcagcucgcgccaucaucagggauuuugagcagcucgccgaaagagagggcgaaauugagcaaggcagcaacagaagauaucaggucagcgcccugcacacaucuaaggcuuguaacaucauuagcaaauacaccgccuucguuccuguugauguguccaagagccgcuaucuuccuacagucguggaauaccccaacuccgccgcuuugagaaugcuggguucgagagcucuugcucaacaauggcggggcacuagcuccggauuuggaaggccucagacaauguuaggcgaagauucugccccuggcaauggcaaguuccaagcacuuaacauggaagcuagcccaaccgccuuguuuucagaagccagaagccccggcagggaaaagcauggagccagugaagguccucagaggucucuggccaccaacacacugaguaguaugaaagccucugagaaucuguucggaucguggcugaaccugaacaaauccagauugcugacccgggcugcaaaaggguuucuuaguaaaccucugaucaaagccguggaauccaccucugguaaucagucuuuugacuacaucccgcuagucucccuacagcuggccaguggggcauuucuguugaacgaagcuuuuugugaagccacucauaucccuauggaaaaacugaaauggacaagcccuuucacaugccaucgagugucacuuacaacccgacccuccgagucaaaaacucccuccccgcagcucuguacauccucccccccuagacauccaucuugugacucauuuagccuggaaccucuugcaaaaggcaaauugggccuggagccaagagccguuguggagcacacaggaaaauugugggcaacaguaguugggcuugccuggcucgaacauuccagugccucauacuuuacugaaugggaauuggucgccgccaaggccaacuccuggcucgagcagcaagaggugccggaaggacggacacaagguacacuaaaggcugcugcuagacaacuauucgugcugcuuagacauugggaugaaaaccuagaauuuaacaugcucugcuacaacccuaauuacguauag

SEQ ID NO: 337051 - protein, 1189 aa, Artificial Sequence
  derived and/or modified sequence
MPGLLNWITGAALPLTASDVTSCVSGYALGLTASLTYGNLEAQPFQGLFVYPLDECTTVIGFEAVIADRVVTVQIKDKAKLESGHFDASHVRSPTVTGNILQDGVSIAPHSCTPGKVTLDEDLERILFVANLGTIAPMENVTIFISTSSELPTLPSGAVRVLLPAVCAPTVPQFCTKSTGTSNQQAQGKDRHCFGAWAPGSWNKLCLATLLNTEVSNPMEYEFNFQLEIRGPCLLAGVESPTHEIRADAAPSARSAKSIIITLANKHTFDRPVEILIHPSEPHMPHVLIEKGDMTLGEFDQHLKGRTDFIKGMKKKSRAERKTEIIRKRLHKDIPHHSVIMLNFCPDLQSVQPCLRKAHGEFIFLIDRSSSMSGISMHRVKDAMLVALKSLMPACLFNIIGFGSTFKSLFPSSQTYSEDSLAMACDDIQRMKADMGGTNILSPLKWVIRQPVHRGHPRLLFVITDGAVNNTGKVLELVRNHAFSTRCYSFGIGPNVCHRLVKGLASVSEGSAELLMEGERLQPKMVKSLKKAMAPVLSDVTVEWIFPETTEVLVSPVSASSLFPGERLVGYGIVCDASLHISNPRSDKRRRYSMLHSQESGSSVFYHSQDDGPGLEGGDCAKNSGAPFILGQAKNARLASGDSTTKHDLNLSQRRRAYSTNQITNHKPLPRATMASDPMPAAKRYPLRKARLQDLTNQTSLDVQRWQIDLQPLLNSGQDLNQGPKLRGPGARRPSLLPQGCQPFLPWGQETQAWSPVRERTSDSRSPGDLEPSHHPSAFETETSSDWDPPAESQERASPSRPATPAPVLGKALVKGLHDSQRLQWEVSFELGTPGPERGGAQDADLWSETFHHLAARAIIRDFEQLAEREGEIEQGSNRRYQVSALHTSKACNIISKYTAFVPVDVSKSRYLPTVVEYPNSAALRMLGSRALAQQWRGTSSGFGRPQTMLGEDSAPGNGPQRSLATNTLSSMKASENLFGSWLNLNKSRLLTRAAKGFLSKPLIKAVESTSGNQSFDYIPLVSLQLASGAFLLNEAFCEATHIPMEKLKWTSPFTCHRVSLTTRPSESKTPSPQLCTSSPPRHPSCDSFSLEPLAKGKLGLEPRAVVEHTGKLWATVVGLAWLEHSSASYFTEWELVAAKANSWLEQQEVPEGRTQGTLKAAARQLFVLLRHWDENLEFNMLCYNPNYV

SEQ ID NO: 337052 - DNA, 3570 bp, Artificial Sequence
  derived and/or modified sequence
atgcctggcctgttaaactggattaccggggcagccttgccactgaccgcctccgacgtcacatcttgcgtctctggatacgcactgggactgactgctagcctgacttatggcaatttagaagcccagccttttcagggtttatttgtatatcccctcgatgagtgcacaactgtaatcggctttgaggcagtgatcgccgacagggtggtgaccgtccaaatcaaggacaaagccaagctggagagcggccatttcgacgcttctcatgtaaggtctcctactgtgacgggtaatattcttcaggacggtgttagcatcgcaccgcacagctgtacacctggaaaggtaacactcgatgaggatcttgaacgtatactgtttgtggccaacctcggcacgatagccccaatggagaacgtaactatcttcatctcaaccagctccgagctccccactttgcctagcggcgcagttcgggtactccttccggctgtgtgcgcccctaccgtgccgcagttctgtactaaaagtacggggacctccaatcagcaggcccagggcaaggaccgtcattgcttcggggcttgggctcctgggtcatggaataagctttgccttgctacgctgctgaacactgaggtgtctaaccctatggaatatgagtttaacttccaattggagattaggggcccatgtctgttggccggagtggaaagcccaacacatgagatccgagctgacgcggctccaagcgccaggagcgccaaatcaatcatcatcactctagcaaacaaacatacttttgaccgcccagtcgaaatcctgattcatccctctgagccgcatatgccacacgtgctcattgaaaaaggcgatatgaccttgggagagtttgaccagcatctgaaaggcagaactgacttcataaaaggaatgaaaaagaagagtcgagccgagaggaagaccgaaattatacgaaagcggttgcataaggacataccacatcactccgttattatgctgaatttctgcccagaccttcaaagcgtacagccctgcctccggaaagcacatggagagtttatcttcctgatcgataggtcttccagcatgtccggcataagcatgcaccgtgtcaaagacgctatgttggtggcgctcaaatcgcttatgccagcctgcttatttaacattattggatttggtagcaccttcaaaagccttttcccctcctcccagacctacagtgaggattccctggcaatggcttgcgacgacattcagagaatgaaagcagacatggggggaaccaatatcctctcacccctgaagtgggtgataaggcagcccgtgcaccggggtcatcccagactgctctttgtcattactgatggcgcagtcaataatacaggcaaggtgcttgaactggtgcgaaaccatgcgttcagcactcgctgctacagctttggcatcggacctaacgtctgtcaccgattagtcaagggcctagccagcgtctcagaaggctcagctgaactcttgatggaaggagagaggttgcaacctaaaatggttaagtctctgaaaaaggctatggcaccagtcctgagcgacgtgactgtcgagtggattttcccagaaacaacagaagtcttggtcagtcccgtgagtgcttccagtctgtttccaggagagcgcttagtcgggtatggtatcgtgtgtgatgcttccctgcacatctctaacccacggagcgataagcgtcgtaggtactcaatgctgcatagccaagagagtggcagctctgtcttttatcacagtcaggatgacggacccggtctggaaggaggtgattgcgctaaaaacagtggcgctcctttcattttgggccaggctaaaaatgcaagactcgctagcggagacagtactactaaacacgacctgaatctgtctcaaaggcgaagagcgtactccacaaatcagattaccaatcacaagccactacctcgcgctaccatggccagtgatccaatgcctgctgctaaacggtaccctctgcgtaaagcccgacttcaagatctgaccaatcagacatctctggacgttcagcgctggcaaatcgacttgcagccgctcctgaactccggccaggacctgaatcaaggacctaaactgagagggcctggcgctcggaggccttcgctcttgccccaaggttgtcaacccttcctcccttggggccaagaaacacaagcatggagtcctgtcagagaacgaaccagtgactcccggagccccggagacctggagccaagtcaccaccctagtgcgtttgaaacagagacatcttcagattgggacccgccagccgagtcccaagagcgcgctagtccatcccggccagcaactcctgccccagtccttggcaaggctctcgtgaagggcctacacgactcacagcggctgcaatgggaagtttcctttgaactcggaacacctggaccggagcgaggaggcgctcaggacgccgatttatggtctgagacatttcaccaccttgccgctcgggcaatcattcgggacttcgagcaactggctgaacgagagggcgaaatcgaacagggctccaatcggagatatcaggtgtctgccctccacacctcaaaagcctgcaacataatttccaagtatacagcattcgtgccagtcgacgtttccaagagtaggtatctcccaaccgttgttgaatatccgaatagcgcagctctccggatgcttgggagtcgggctctggcacagcagtggcgtggcactagctcaggcttcggcaggcctcagactatgcttggtgaggactcggcaccgggtaatgggcctcagcgatccttagctactaataccctgtctagtatgaaagcttccgaaaacctgttcggtagctggctcaacctgaacaagtcccggctgctgacccgcgcagccaaaggcttcttgagcaagccccttatcaaggccgtggaaagcacctctggaaatcagtctttcgattacatcccccttgtatcgctgcaactagcgtcgggggcattcctgctcaatgaggccttttgcgaggccacgcacattccgatggaaaagctgaagtggacctcaccttttacttgccacagagtcagcctgaccacacggcctagtgagtctaagactccctctccacagctctgcacgtctagtcctccacgtcatcctagctgcgatagcttttcccttgagcccttggctaaagggaagctggggctggagcccagagccgtagtcgaacataccggcaaactgtgggcaactgtcgtcggcttggcctggctcgagcattctagtgcaagttatttcaccgaatgggaactggtggcagctaaagcaaactcgtggctagagcagcaggaggtgcctgaaggcaggactcaagggacactaaaggcggcagctcgccaactattcgtgctgctccgacactgggacgaaaatcttgagtttaatatgttatgttacaaccccaactacgtgtag

SEQ ID NO: 337053 - DNA, 3570 bp, Artificial Sequence
  derived and/or modified sequence
atgccaggactccttaattggataacgggagcagctctccccctgactgcaagtgatgtgacttcttgtgtgagtggctatgctctgggactgaccgccagtctcacctacggtaatttggaagcccagcctttccaagggctattcgtgtaccccctggatgaatgcaccacggtgatcggcttcgaggctgttatcgctgatcgtgtagtgacagtgcaaatcaaggataaagccaaactggaatccggtcatttcgatgcttcccacgtgcgctcacccactgttaccgggaatattctccaggatggagtgtccattgccccccactcttgcacgccaggcaaagtgactctcgacgaggacctcgagcgcatcctgttcgtggctaatcttggtacaatcgcccccatggagaacgtgaccattttcatcagtaccagtagcgaactgcctaccttaccgtctggggcagtcagagtgttactgcccgctgtctgtgcgccaacagtcccccaattctgtacaaaatctactgggacctctaatcagcaagcgcagggcaaggacaggcactgctttggcgcgtgggcaccgggtagctggaacaagctgtgtctcgctacactgttgaacactgaagtgtcaaacccgatggagtacgagtttaattttcagctggagattcgtggaccatgccttctagccggagtggagtccccaacacacgagattcgcgcggatgccgccccaagcgcacgtagcgccaaatctattatcatcacgctggccaacaaacacacttttgacaggcccgtcgaaattctgatccaccccagtgaaccacacatgccacatgtgctgatagagaaaggcgacatgaccttgggcgagttcgatcagcatctgaaggggcggaccgatttcattaaaggaatgaaaaaaaagtcaagggccgagaggaagaccgaaatcatacgcaaacgattacacaaggacattccacatcattccgtcatcatgcttaatttttgccccgatctacagagtgtgcagccctgtcttcgcaaggctcacggagaatttattttcttgatcgaccgctccagttctatgtccggcatatccatgcaccgggtgaaagatgccatgctggtggcacttaagtctctgatgcctgcttgtcttttcaatatcattggcttcggttctactttcaaatcactgttcccttcgtcacagacttactccgaggactccctggccatggcatgtgatgatatccaacgtatgaaagccgatatgggcggtaccaacattctatccccgttgaaatgggtgatccgccagcctgttcacagaggacatccacggttactattcgtgatcactgacggggcagtgaataataccggcaaagttctggaactggtacggaaccacgccttcagtaccaggtgctattccttcggcataggccctaatgtctgccacagactggtgaagggactagcatcggtgtcagaggggtctgccgagctgctcatggagggagagcggctgcagcctaagatggttaagtctctaaagaaagccatggccccagtgctatccgacgtgacggtggaatggatctttcctgagacgacagaagtcctcgtgagtcccgtttctgcctcttccctttttccgggcgaacggctagtcggttacggaattgtgtgcgatgcctccttgcatatttcaaaccctaggtccgataagaggagacggtattcaatgttgcatagtcaggaaagcggaagttcagtattctatcattcacaggatgatggcccgggactcgagggtggcgattgcgctaagaattctggggcccccttcatcctcgggcaggcaaagaacgctcgtctcgcttctggggactctacaacaaaacatgacttaaacctgtcccaacgacgccgtgcttactctacaaaccaaatcaccaatcacaagcccctaccacgggctacgatggcatccgacccaatgcccgccgctaagcgttaccccttaagaaaggcccgcctacaggatttaacgaatcagacttcgttagacgtgcaacgctggcaaatcgacctgcaacccttactcaactccggccaggatctgaatcagggtccaaaacttcgtggaccgggtgcccggaggcctagcttgctgccacaggggtgccagccttttcttccctggggacaagagactcaggcctggtcgccagtgcgcgagcgtacatctgacagtaggtcccccggtgatcttgagcctagccaccatccaagcgcgtttgagacggaaaccagctctgactgggacccacccgccgagtcacaagagagagcctcacctagccgcccagcaaccccagcacctgttcttgggaaagctctggtgaaaggtctgcatgattcccagcgactgcagtgggaggtgtcgtttgaactcggtacccctggacctgagcgcggaggggctcaggatgccgatctgtggagcgaaacctttcaccacttggccgcccgggcgatcattcgtgactttgagcagctggcggagagggaaggagaaattgagcagggctccaatcgaaggtatcaagtatcagcgctacataccagtaaagcgtgcaacatcatctccaaatacacagcattcgtgcccgtagatgtctcaaaatcacggtacctgcccactgtggttgagtatcctaattccgccgctttacgaatgctcgggagccgtgcgcttgcccagcagtggagaggcacttcttcaggttttggccgaccccagacaatgctgggtgaggacagcgcccccggcaatgggccacaacgcagcctcgcgactaatactctgtcttccatgaaggcgagcgagaatctgttcgggtcttggctgaatcttaataaaagccgcttactaacccgtgccgcaaaaggcttcttaagcaaaccattgattaaggccgtcgagtctacttctggcaatcaaagcttcgactacattccactagtctccctccagttagcttcaggcgcctttctgctaaatgaagccttctgcgaggccacgcatatccccatggagaagttgaagtggacaagccctttcacatgtcacagagttagtttgacaaccaggccgtccgagtccaaaacaccttcgccccagttgtgtacttcttcccccccaaggcaccccagctgcgattcattctctctcgaaccactggctaagggaaaactgggcctggaaccacgggctgtggttgaacatactggcaagctttgggccactgttgtcggtcttgcttggctcgaacattctagcgcttcttactttactgagtgggagctggtcgccgccaaggcaaacagttggctcgaacagcaagaagtccccgaggggaggacacaggggactttaaaggccgcagcaaggcagctgtttgtgctactccggcattgggacgagaacctggagttcaacatgctatgttataaccctaattacgtttag

SEQ ID NO: 337054 - DNA, 3570 bp, Artificial Sequence
  derived and/or modified sequence
atgccaggtcttctcaactggataaccggagccgccctgcccctaactgcctcggacgtaacttcatgcgtatcaggttacgccctcggcctgaccgcatcattaacttatggcaatctggaagcccaaccattccaaggactcttcgtttatcctctagacgagtgtactaccgtgataggtttcgaggctgtcattgctgaccgcgtcgttactgtccaaatcaaagataaagctaagctggaatccggacactttgacgcctcacacgtgaggtccccgactgttaccggcaacattttgcaggatggagtctcaatagcccctcattcctgtacacccggcaaagtcaccctcgacgaggatctagaacgtatcctgtttgtggccaatttgggcaccatagcccccatggaaaacgtaaccatctttattagcacttcttctgagcttcctacactgccttctggagccgtgagagtgctgctcccagccgtgtgcgcccccactgtaccacagttctgtaccaagagtactggaacctctaaccagcaagcacaaggcaaggacagacattgttttggcgcatgggccccgggctcttggaataaactttgtcttgctaccttgttaaatactgaagtttcaaacccaatggagtacgaatttaacttccagctagagatccgggggccttgcttattggccggtgtcgaatctcctactcatgaaattcgggctgacgcagctcccagcgcccgatccgctaagtctatcattataacattagcgaacaaacacaccttcgatcgaccggtagaaatcttgatccaccccagcgaaccccacatgcctcacgtactgatcgagaaaggcgacatgacattgggcgagtttgatcaacacctaaagggacggactgactttatcaagggaatgaagaaaaagtccagggctgaaagaaaaaccgaaatcatcaggaagagactacacaaggatatcccccaccactcagtgataatgcttaacttttgtccggatctccagtcagtgcagccatgcctacggaaagcacacggtgaattcatctttttaatcgacaggtcctctagtatgtcaggcatttccatgcatagggttaaggacgcaatgctcgttgctctgaagtctttgatgccagcgtgtcttttcaatataatcgggttcgggtcaacctttaagtcattgttcccctcgtctcaaacttactccgaggactctctggccatggcgtgtgacgatatccagcgaatgaaggccgatatgggaggcacaaacattctctcccccctgaagtgggtaattagacagcccgttcataggggccatcctaggctgttattcgtgattactgatggtgccgtaaacaacaccggtaaagtcctcgagctcgtgagaaaccacgccttcagtaccagatgttactctttcggaatcggtcccaacgtttgtcaccgtctcgtgaaaggattggccagcgtgtctgagggctcagccgaactgttgatggagggggagagactgcagcccaagatggtgaaaagtttaaagaaagccatggccccggtccttagcgacgttacagttgaatggatttttcccgagacaacagaggttctggtgtcaccggtgagtgcttcttctttattccctggcgaacgtctagtgggctacggcattgtgtgtgacgcatctttacacatcagcaatccaaggtccgacaagcggcgcagatactcaatgcttcacagtcaggagagcggcagctcggttttttaccacagccaggatgatgggcccgggctcgagggaggggactgtgctaaaaactccggggcgccatttattcttggacaggccaaaaatgcacggcttgcatctggcgactcaacgactaaacacgatttaaacttatcccagcggagaagggcctatagtacgaaccagatcaccaatcacaagccgttaccacgcgccacaatggcctctgacccaatgcccgccgccaagagatacccgctcagaaaggctagacttcaggacctcactaaccagacaagcttggacgtccagcgttggcagatagacttacagcccctcctcaactctgggcaggatctgaatcaaggccctaaacttcgaggtcctggagcacggcgcccatcccttctgccacaaggatgtcagccgtttttgccatggggccaggaaacccaggcctggtctcccgttcgtgagcgcactagtgactcaagatcccctggggatctggagccttcccaccatccatccgctttcgagactgaaacaagttctgactgggacccacccgccgaatcccaggaacgagcttcacctagccggcctgcaacaccagcaccagtcctcggcaaagcacttgtaaagggtttgcatgattcgcagaggctccaatgggaggtttccttcgagctaggtaccccaggcccagagaggggaggagcccaggatgctgatttatggtccgaaactttccatcatttggcagcacgagccatcattagagacttcgaacagttggccgaacgggagggtgagattgagcaggggagtaatcgtaggtatcaagttagtgcacttcacacgagtaaggcttgcaacataatatctaagtacacagccttcgtcccagtggatgtgagtaaaagcaggtatcttcccacagtggtcgaataccccaattccgctgcccttcgcatgttaggctctagggccctcgctcaacaatggcggggtacttccagcggattcggccgtccacaaaccatgttgggggaggactccgctcccggaaatggaccccagcgaagcttggccacaaataccctgtcttcaatgaaagcttctgaaaacctgttcgggtcctggcttaacctgaataaatctcgcttactgacccgggccgcaaaagggttcctgagcaaaccgctgatcaaggccgtagaaagcaccagtggaaatcaatcctttgactacatcccccttgtttcactgcagctagcaagtggcgcttttttattgaacgaagctttctgtgaggctactcacattcccatggaaaaactgaaatggacatccccattcacgtgccaccgtgtctctctgacaactcgcccgtccgaaagtaagacaccttctcctcagctctgcacctcatcaccacccagacacccctcttgtgattcattctctctggaacctctggcgaagggaaaacttggcttggaacctcgtgctgtggttgagcacaccggaaaattgtgggctaccgtggttggcctagcctggttagagcactcctcggcttcatactttactgagtgggaactggttgccgctaaagcaaattcatggctggagcagcaggaggtgccagaaggaagaacccagggcacattaaaggcggccgctaggcagctgtttgttttactccgacactgggatgaaaatcttgaattcaatatgttgtgttacaatccgaactacgtgtag

SEQ ID NO: 337055 - DNA, 4397 bp, Artificial Sequence
  derived and/or modified sequence
atcgcaatgtgggcattgatcaagccagctgccagggcagcgggcgcagggcttgggcactggagcccagccccggaccgcacctccagcagtgctgggtgcagaaggcagtcactgtggcagtggagagacagagtgtgtacccagacacgtgttgcttctggggtaaggttctgaaggctgagtagccagcgggatgcccggcttgctgaattggatcacgggggcagccctgcccctcaccgcgtctgatgttacctcctgtgtcagcggttatgccctgggcctaactgcctccctcacctatggcaacctggaagcccagcccttccagggcctcttcgtgtaccccctggatgagtgcaccacggtgatcggctttgaggcagtcattgccgaccgtgtcgtgacagtacagatcaaggacaaagccaagctggagagcggccacttcgatgcctcccatgttcgatccccaacagtcacagggaacattctgcaagacggggtttccatagcccctcattcctgcacaccgggaaaggtgaccttggacgaggatttggagcggatcctgttcgtggccaacctggggaccattgcccccatggagaatgtcaccatcttcatcagcacctcctcggagctcccaacgctgcccagcggggctgtgagggtccttctgcctgctgtctgtgccccaaccgtgccccagttctgcaccaagagcactggcacctccaaccaacaggcccagggcaaagacaggcactgcttcggtgcctgggccccgggctcctggaataagttgtgcctggcgactctcctgaacaccgaagtgtccaaccccatggagtatgagttcaacttccagctggagatccgtgggccatgtctgctcgcaggggtggagagtcccactcatgagattcgtgccgacgccgccccatctgcccgctcggccaagagcatcatcatcaccttggccaacaagcacacctttgaccggcctgtggagatcctcatccaccccagcgagccccatatgccccatgtcctgatagagaaaggggacatgaccctgggagagtttgaccagcacttgaagggaagaacagatttcattaaagggatgaagaagaagagcagagcagagcggaagacagaaatcattcgaaaacgcctccacaaagacattccccaccactccgtcatcatgctcaacttctgtcccgacctccagtcagtccagccgtgcctgagaaaggcccacggggagttcatcttcctcattgacaggagcagcagcatgagcgggatcagcatgcaccgagtcaaggatgccatgttggtggcccttaagagcctcatgccagcctgcctcttcaatatcattgggtttggatccacatttaagagcctttttccttccagccagacctacagtgaggacagcttggccatggcttgtgatgacatccagagaatgaaggccgacatgggtgggaccaacatcctttcccctctcaagtgggtcatcaggcagccagtgcaccgaggccacccgcggctcctcttcgtgatcacagatggcgctgtcaacaacacagggaaggtgctggagctggtgcgaaatcacgccttctccaccaggtgctatagctttggaattggacccaacgtctgccacagactggtgaaaggactggcatctgtgtccgagggcagtgctgagctcctgatggagggggagcggctgcaacccaagatggtcaaatccttgaagaaggccatggccccagtcctgagcgatgtgactgtggagtggatcttccctgagaccactgaggtcctggtctcacccgtcagcgccagctccctcttccctggagaacggctggtggggtatggcattgtatgtgatgcttctttgcacatctccaatcccagatctgacaagaggcgccggtacagcatgctgcactctcaggagtctggcagctctgtcttctaccactctcaggatgacggacccgggctggaaggtggagactgtgccaagaactcgggggcacccttcatcctagggcaggccaaaaatgcccggctagccagcggagactctaccaccaagcacgatctgaacctctctcagcgacggagggcatacagcaccaaccagatcaccaatcacaagcccctcccaagagccaccatggcaagtgaccccatgccagctgccaagagatacccactgcggaaagccaggctgcaggacctcaccaaccagaccagcctggatgtccagcggtggcagattgatttgcagcccttgctgaacagtggtcaggacctgaaccagggccccaaactccgtggcccaggggcccgaaggccctctctgctgccccaaggctgccagcccttcctgccctggggccaggagacccaggcctggagccctgtgagagagcggacttctgacagccgaagccctggagatctggagccgtcccaccatccctctgccttcgagacagagacgtcctcggactgggaccccccagccgagtcccaggagcgagccagtcccagcaggcccgccaccccggccccggtgctgggcaaggccctggtcaaaggcctgcacgacagccaacgcctgcagtgggaggtgagcttcgagctggggacccctggaccggagcggggcggcgcgcaggatgccgacctatggagcgagaccttccaccacctggcggcccgcgccatcatccgcgacttcgagcagctggcggagcgcgagggcgagatcgagcaggggtccaaccgccgctaccaagtgagcgccttgcacaccagcaaggcctgcaacatcattagcaaatacacagccttcgtgcctgtggacgtgagcaagagccggtacctgcccaccgtggtggagtaccccaactctgctgccctgcgtatgcttggctctcgggccctggcccaacagtggaggggcacctcttctggctttggaaggccgcagacgatgcttggagaagattcggcaccaggaaatggtccccagcgcagcctggctacaaatactctttcttccatgaaggcctcagagaatctctttggatcctggctaaatctcaacaagtccaggctactgacgcgagcagccaagggcttcctgagcaagccactgatcaaagctgtggagtcgacctccgggaaccagagcttcgactacatacctctggtgtctctgcagctggcctccggagccttcctgctcaacgaagccttctgtgaggccacgcacatccccatggagaagctcaagtggacgtcccccttcacctgccatcgagtgtccctcaccacccgcccgtctgagtccaagaccccgagtccccagctgtgcaccagctccccgcctaggcacccgtcctgtgacagcttctccctggagcctctggccaagggcaagctgggcctggagccgagggcagtggtggagcacactgggaagctgtgggccacggtggtggggctggcatggctggagcacagttcggcctcctacttcactgagtgggagttggtggctgccaaggccaactcatggctggagcagcaggaagtacccgagggccgcacgcagggcacactcaaggccgctgcccgccagctgtttgtgcttctgcggcactgggatgagaatctcgagttcaatatgctctgctataacccgaattatgtgtagttgagtgacggggaggctgggtggagggaagggtggggaggagagggatgggcagggccatgtcggcctggtttcggggagcttttggagctgtaactaatatttcagttactagaaagagccctggactggcagccaggaggcctgagttcaatcccaactttgctaccatccagccatgcaactttaggccagtgcctgcccccgtctgggcctcagtttcctcatctataaaataagagggcgagatgaaggaggtggagtggatctcaaatggttcagtggttcctttctgcccattcaggcagtcccgggctgactgctgctggggctggcgagggaagatgcagtggaagcctgagccctgtctggaggtagaccacgtgggcacggagtggacacagcaatgcccactcaaataaaagggcagatgagagaacccagtgacctcaagtaaccaggcctacaggcttgcataggcacatagagactagcaagtctggtgcctgtaggacaggctcttgtctccatggtaacagccaaggaccccccctaaatcccacttaaaagccaattggagaagcatccttctcaacgctttacaaaagagtagtttgggggccttttgttt

SEQ ID NO: 337056 - DNA, 3570 bp, Artificial Sequence
  derived and/or modified sequence
atgcccggcctgctgaactggatcaccggcgccgccctgcccctgaccgccagcgacgtgaccagctgcgtgagcggctacgccctgggcctgaccgccagcctgacctacggcaacctggaggcccagcccttccagggcctgttcgtgtaccccctggacgagtgcaccaccgtgatcggcttcgaggccgtgatcgccgacagagtggtgaccgtgcagatcaaggacaaggccaagctggagagcggccacttcgacgccagccacgtgagaagccccaccgtgaccggcaacatcctgcaggacggcgtgagcatcgccccccacagctgcacccccggcaaggtgaccctggacgaggacctggagagaatcctgttcgtggccaacctgggcaccatcgcccccatggagaacgtgaccatcttcatcagcaccagcagcgagctgcccaccctgcccagcggcgccgtgagagtgctgctgcccgccgtgtgcgcccccaccgtgccccagttctgcaccaagagcaccggcaccagcaaccagcaggcccagggcaaggacagacactgcttcggcgcctgggcccccggcagctggaacaagctgtgcctggccaccctgctgaacaccgaggtgagcaaccccatggagtacgagttcaacttccagctggagatcagaggcccctgcctgctggccggcgtggagagccccacccacgagatcagagccgacgccgcccccagcgccagaagcgccaagagcatcatcatcaccctggccaacaagcacaccttcgacagacccgtggagatcctgatccaccccagcgagccccacatgccccacgtgctgatcgagaagggcgacatgaccctgggcgagttcgaccagcacctgaagggcagaaccgacttcatcaagggcatgaagaagaagagcagagccgagagaaagaccgagatcatcagaaagagactgcacaaggacatcccccaccacagcgtgatcatgctgaacttctgccccgacctgcagagcgtgcagccctgcctgagaaaggcccacggcgagttcatcttcctgatcgacagaagcagcagcatgagcggcatcagcatgcacagagtgaaggacgccatgctggtggccctgaagagcctgatgcccgcctgcctgttcaacatcatcggcttcggcagcaccttcaagagcctgttccccagcagccagacctacagcgaggacagcctggccatggcctgcgacgacatccagagaatgaaggccgacatgggcggcaccaacatcctgagccccctgaagtgggtgatcagacagcccgtgcacagaggccaccccagactgctgttcgtgatcaccgacggcgccgtgaacaacaccggcaaggtgctggagctggtgagaaaccacgccttcagcaccagatgctacagcttcggcatcggccccaacgtgtgccacagactggtgaagggcctggccagcgtgagcgagggcagcgccgagctgctgatggagggcgagagactgcagcccaagatggtgaagagcctgaagaaggccatggcccccgtgctgagcgacgtgaccgtggagtggatcttccccgagaccaccgaggtgctggtgagccccgtgagcgccagcagcctgttccccggcgagagactggtgggctacggcatcgtgtgcgacgccagcctgcacatcagcaaccccagaagcgacaagagaagaagatacagcatgctgcacagccaggagagcggcagcagcgtgttctaccacagccaggacgacggccccggcctggagggcggcgactgcgccaagaacagcggcgcccccttcatcctgggccaggccaagaacgccagactggccagcggcgacagcaccaccaagcacgacctgaacctgagccagagaagaagagcctacagcaccaaccagatcaccaaccacaagcccctgcccagagccaccatggccagcgaccccatgcccgccgccaagagataccccctgagaaaggccagactgcaggacctgaccaaccagaccagcctggacgtgcagagatggcagatcgacctgcagcccctgctgaacagcggccaggacctgaaccagggccccaagctgagaggccccggcgccagaagacccagcctgctgccccagggctgccagcccttcctgccctggggccaggagacccaggcctggagccccgtgagagagagaaccagcgacagcagaagccccggcgacctggagcccagccaccaccccagcgccttcgagaccgagaccagcagcgactgggacccccccgccgagagccaggagagagccagccccagcagacccgccacccccgcccccgtgctgggcaaggccctggtgaagggcctgcacgacagccagagactgcagtgggaggtgagcttcgagctgggcacccccggccccgagagaggcggcgcccaggacgccgacctgtggagcgagaccttccaccacctggccgccagagccatcatcagagacttcgagcagctggccgagagagagggcgagatcgagcagggcagcaacagaagataccaggtgagcgccctgcacaccagcaaggcctgcaacatcatcagcaagtacaccgccttcgtgcccgtggacgtgagcaagagcagatacctgcccaccgtggtggagtaccccaacagcgccgccctgagaatgctgggcagcagagccctggcccagcagtggagaggcaccagcagcggcttcggcagaccccagaccatgctgggcgaggacagcgcccccggcaacggcccccagagaagcctggccaccaacaccctgagcagcatgaaggccagcgagaacctgttcggcagctggctgaacctgaacaagagcagactgctgaccagagccgccaagggcttcctgagcaagcccctgatcaaggccgtggagagcaccagcggcaaccagagcttcgactacatccccctggtgagcctgcagctggccagcggcgccttcctgctgaacgaggccttctgcgaggccacccacatccccatggagaagctgaagtggaccagccccttcacctgccacagagtgagcctgaccaccagacccagcgagagcaagacccccagcccccagctgtgcaccagcagcccccccagacaccccagctgcgacagcttcagcctggagcccctggccaagggcaagctgggcctggagcccagagccgtggtggagcacaccggcaagctgtgggccaccgtggtgggcctggcctggctggagcacagcagcgccagctacttcaccgagtgggagctggtggccgccaaggccaacagctggctggagcagcaggaggtgcccgagggcagaacccagggcaccctgaaggccgccgccagacagctgttcgtgctgctgagacactgggacgagaacctggagttcaacatgctgtgctacaaccccaactacgtgtag

SEQ ID NO: 337057 - DNA, 3570 bp, Artificial Sequence
  derived and/or modified sequence
atgccgggattgctcaattggataaccggagccgctttacccctcacagctagtgatgtcacctcctgtgtgtctgggtatgccttaggattaacagcctccctgacatatgggaatctagaggcccagccgttccaggggctttttgtgtatccgcttgatgagtgtacaaccgtgataggcttcgaagccgtaatcgctgatagagtggttactgttcagattaaagataaggcaaagctggaatccggacattttgacgcttcgcatgtgaggtcccccacagttactggtaacattctgcaggacggtgtttcaattgccccacactcatgtacccctggtaaagtgacccttgacgaagatctagagcgtattctgtttgtcgctaatctagggaccatagcgcctatggaaaatgtcaccatctttatctctaccagtagtgaactgcctactctaccttccggtgccgtccgtgtgttgttacccgccgtatgcgcccccaccgttcctcagttttgcacgaaaagtaccggaactagcaatcagcaggctcagggtaaggaccgacactgcttcggcgcatgggcccctggatcgtggaacaagctttgcctagccacactactcaataccgaggtgagtaatccaatggagtacgagttcaactttcagctcgaaattaggggaccctgcctgctggctggtgtcgaatctccaacacacgagatccgcgcagacgctgcaccttccgctcgaagcgcaaaaagtatcattatcacgctcgctaataagcacacattcgacagacctgtagaaatcttgatccacccatctgagcctcatatgccacacgtgctaattgagaagggcgacatgacattgggtgaattcgatcaacatcttaaggggcgaactgattttattaagggaatgaagaagaagagtagggcggagcgcaaaaccgagattattaggaagcgactacacaaagacatacctcaccactccgtgataatgttgaacttctgccccgatttgcagtccgtgcagccatgtctccgcaaagcccacggggagttcatctttcttattgaccggtcctcatccatgtccggcatcagcatgcaccgcgtgaaggacgcaatgctagttgcactcaagagcctgatgccagcctgcctctttaatataatcggttttggaagcacatttaagtcactgttcccctccagccagacgtactccgaggactccttggcgatggcctgtgacgacatccagcggatgaaagccgatatgggtggcacaaacatcctcagccctctgaaatgggtgatcagacagcccgtgcaccggggacatcctcgcctcttgttcgtgattaccgacggcgcggtcaacaatacgggtaaggtgttggaacttgtgcggaaccatgcattctcaactcggtgttactcatttggaattgggccgaatgtgtgccaccgccttgtgaaggggctcgccagtgtgagtgagggctcagcggaacttctcatggagggcgagaggctgcagccaaaaatggtcaagtcgctcaagaaagcaatggctccagttctgtcagacgttacagtggaatggattttccctgagacaacagaggtgctggtatccccagtttctgccagttcattgttcccaggggaaagactcgtcgggtacggaatagtgtgtgacgccagtcttcacatcagcaatcctcgctccgataaaaggagacgctacagcatgttgcatagtcaggagagtgggagctccgtcttctatcattcacaagacgatgggccagggttagagggtggggactgtgcgaagaactctggggctccattcatcctaggtcaggcgaaaaatgcccggcttgcatcaggggacagtactactaagcacgatctgaatctgtcacagaggcgccgagcttactccaccaaccagataactaatcataagccactgccccgtgctaccatggcgtccgacccgatgccagccgctaagcggtaccccttgcgcaaagccaggttgcaggatctgaccaatcaaactagcctggacgtgcagaggtggcaaatcgacctacagcccctgctcaacagcgggcaggacctgaaccaagggccaaagctgcgcggaccgggtgcccgacgtccatccctgttgccccaaggatgccagcctttccttccctggggtcaggagacccaggcttggtcccctgtgagagagcgtacatcagattctagatccccaggggaccttgaacctagccatcatccttcagccttcgagacggagacaagctctgattgggatccgccagccgaaagtcaggaaagggcttcacccagtcgccccgctactccagctccagttctgggaaaggcactagtaaaaggactccatgattcacaaagactgcagtgggaggtgtctttcgagttaggaacaccagggccagaacgtgggggagcacaggacgctgatctgtggagcgaaacattccaccatttggccgcaagggccattatcagggacttcgaacaactcgccgagagggagggcgaaatcgagcagggatctaacaggcgataccaggtctccgctttgcatacctcaaaagcctgtaacatcatctctaaatatacggccttcgttcccgttgacgtgtcaaagagcaggtacctgcccacagttgtggagtatcccaatagtgcggctcttcgaatgctgggtagccgtgccttggctcagcagtggaggggcacctcgtccggttttgggcgaccgcagaccatgctcggggaggactctgcccctggcaacggcccccagaggagtctggctacaaacaccttgtcttccatgaaggcttcagagaatttattcggatcatggttaaaccttaacaaaagtcgcctacttacaagggccgccaagggattcctgtccaaacccctgattaaggccgtagagagtacaagtggtaatcagtctttcgattatataccccttgtctcattgcaactggccagcggggcttttctgcttaatgaggctttctgcgaagccacacatatccctatggaaaaactgaaatggactagtcccttcacctgtcatagggtatctctcaccacgaggccttcggagtcaaaaacccctagtcctcagctctgcaccagtagccccccgcggcatccgtcttgtgacagcttcagcctcgaacctctcgcgaaagggaagttaggactggagccaagggcggtcgtggagcacacgggcaagctgtgggctaccgtggtgggacttgcgtggctcgagcactctagcgcttcctatttcacagagtgggagcttgtcgccgccaaagcgaattcctggctggagcaacaagaggttccagagggacgcacccaggggaccttaaaagctgccgcaagacagttattcgtgctgttacgccattgggatgagaacctggaatttaatatgctctgttacaatcctaattacgtttag

SEQ ID NO: 337058 - DNA, 3570 bp, Artificial Sequence
  derived and/or modified sequence
atgcctggcctgctgaactggatcactggagctgccctgcccctgacagccagtgatgtgaccagctgtgtgtctggctacgccctgggcctgacagccagcctgacctacggcaacctggaggcccagcccttccagggcctgtttgtgtaccccctggatgaatgtaccaccgtcatcggctttgaggccgtgattgctgacagagtggtgacagtgcagatcaaggacaaggccaagctggagagcggccactttgatgccagccacgtgcgcagccccaccgtgactggaaacatcctgcaggatggagtgtccatcgccccccacagctgcacccctgggaaggtgaccctggatgaggacctggagcgcatcctgtttgtggccaacctgggcaccatcgcccccatggagaatgtgaccatcttcatcagcaccagcagcgagctgcccaccctgcccagcggggctgtgcgggtgctgctgcctgctgtgtgtgcccccaccgtgccccagttctgcaccaagagcacaggcaccagcaaccagcaggcccagggcaaggacagacactgcttcggggcctgggcccctggctcctggaacaagctgtgcctggccaccctgctgaacacagaggtgagcaaccccatggagtatgagttcaacttccagctggagatccggggcccctgcctgctggccggcgtggagagccccacccatgagatccgggcagatgctgcccccagcgcccggagcgccaagagcatcatcatcaccctggccaacaagcacacctttgacaggcctgtggagatcctgatccaccccagcgagccccacatgccccacgtgctgattgaaaaaggagacatgaccctgggggagtttgaccagcacctgaagggccgcacagacttcatcaagggcatgaagaagaagagcagagctgagaggaagacagagatcatcaggaagaggctgcacaaggacatcccccaccacagcgtcatcatgctgaacttctgcccagacctgcagagcgtgcagccctgcctgaggaaggcccatggagagttcatcttcctgattgacaggagcagctccatgagcggcatctccatgcaccgggtgaaggatgccatgctggtggccctgaagagcctgatgcctgcctgcctcttcaacatcatcggcttcggcagcaccttcaagagcctcttccccagcagccagacctacagcgaggacagcctggccatggcctgtgatgacatccagaggatgaaggctgacatgggcggcaccaacatcctgagccccctgaagtgggtgatccggcagcctgtgcaccggggccacccccggctgctgtttgtgatcacagatggagctgtgaacaacacaggcaaggtgctggagctggtgagaaatcatgccttcagcacccgctgctacagctttggcatcggccccaacgtgtgccaccggctggtgaagggcctggcctctgtgtctgagggcagcgctgagctgctgatggagggggagcggctgcagcccaagatggtgaagagcctgaagaaggccatggcccctgtgctgagtgatgtgacagtggagtggatcttccctgagaccacagaggtgctggtgtcccctgtgtctgccagcagcctcttccctggagagcggctggtgggctatggaattgtgtgtgatgccagcctgcacatcagcaaccccaggagtgacaagagaagacgctacagcatgctgcacagccaggagagcggcagctctgtgttctaccacagccaggatgatggccctggcctggagggcggggactgtgccaagaacagcggggcccccttcatcctgggccaggccaagaatgcccggctggccagcggggacagcaccaccaagcatgacctgaacctgagccagaggagaagagcctacagcaccaaccagatcaccaaccacaagcccctgccccgggccaccatggccagtgaccccatgcctgctgccaagcgctaccccctgaggaaggcccggctgcaggacctgaccaaccagaccagcctggatgtgcagcgctggcagattgacctgcagcccctgctgaacagcggccaggacctgaaccagggccccaagctgcggggccctggggcccggcggcccagcctgctgccccagggctgccagcccttcctgccctggggccaggagacccaggcctggagccctgtgcgggagaggaccagtgacagccgcagccctggggacctggagcccagccaccaccccagcgcctttgaaacagagaccagcagtgactgggaccccccagctgagagccaggagcgggccagccccagcaggcctgccaccccagcccctgtgctgggcaaggccctggtgaagggcctgcatgacagccagaggctgcagtgggaggtgtcctttgagctgggcaccccaggccctgagcggggcggggcccaggatgctgacctgtggagcgagaccttccaccacctggccgcccgggccatcatccgggactttgagcagctggccgagcgggagggggagattgagcagggcagcaacagacgctaccaggtgtctgccctgcacaccagcaaggcctgcaacatcatcagcaagtacacagcctttgtgcctgtggatgtgtccaagagccgctacctgcccaccgtggtggagtaccccaacagcgctgccctgaggatgctgggcagccgggccctggcccagcagtggaggggcaccagcagcggcttcggccggccccagaccatgctgggggaggacagcgcccctggaaatggcccccagaggagcctggccaccaacaccctgagctccatgaaggccagcgagaacctgtttggctcctggctgaacctgaacaagagccggctgctgacccgggccgccaagggcttcctgagcaagcccctcatcaaggctgtggagagcaccagcggcaaccagagctttgactacatccccctggtgtccctgcagctggccagcggggccttcctgctgaatgaggccttctgtgaggccacccacatccccatggagaagctgaagtggaccagccccttcacctgccaccgggtgtccctgaccacccggcccagcgagagcaagacccccagcccccagctgtgcaccagcagcccccccaggcaccccagctgtgacagcttcagcctggagcccctggccaagggcaagctgggcctggagcccagggctgtggtggagcacacaggcaagctgtgggccaccgtggtgggcctggcctggctggagcacagcagcgccagctacttcacagagtgggagctggtggccgccaaggccaacagctggctggagcagcaggaggtgcctgagggccgcacccagggcaccctgaaggccgccgcccggcagctgtttgtgctgctgcggcactgggatgagaacctggagttcaacatgctgtgctacaaccccaactacgtgtag

SEQ ID NO: 337059 - DNA, 3570 bp, Artificial Sequence
  derived and/or modified sequence
atgcccggcctgctgaactggatcaccggcgccgccctgcccctgacggcttctgacgtgaccagttgtgtatctggctatgcgctgggtttgacggccagtctcacatatggaaacctggaggcacagccatttcaaggtctgtttgtgtacccactcgatgagtgcacaaccgttatcggattcgaagcggtgatcgcagaccgcgtagtgaccgtccagatcaaggataaggctaagctggaatcaggacatttcgatgcctctcacgtgcggtctccaaccgtgaccggcaatatcctccaggacggcgtgagcatcgctcctcattcctgcactccaggcaaggtgaccttggatgaggatctcgagcggattctctttgtagcaaacttggggaccatcgcccccatggagaatgtgacgatcttcatatcaacaagcagcgagctgcctactttgccttcaggggccgtgcgcgttttgctaccagctgtttgtgcgcctactgtgccccagttctgcacaaagtctactggcacttccaatcagcaggcacagggcaaagatcggcattgctttggagcctgggctcctggctcctggaacaagctgtgtctcgccaccctgctgaataccgaggtatcaaacccgatggaatacgaattcaactttcagcttgagattcgaggcccttgtttactggctggtgtggagtcaccaacccatgagattagagcggacgctgctcctagcgcccgctccgcaaagtctattattatcaccttagcgaataagcacacatttgacaggcccgtggagattctgatccacccaagcgagccccacatgccacacgttctgatcgaaaagggtgatatgactctgggagaatttgatcaacatctgaaggggcgcaccgatttcataaaaggaatgaaaaaaaaaagcagggccgagcggaaaacggaaatcattagaaagcgcttgcataaggacataccacaccattcagtcataatgctgaacttctgccctgatttgcagagtgtgcaaccatgcttgcgcaaggcacacggcgagtttatctttctaatagacagatcttccagtatgtccggaatcagcatgcatagagtgaaagatgccatgctggtggcccttaaaagtttgatgcctgcttgtctgtttaatattattggctttggatcgacttttaaaagcctctttccttctagtcagacttattccgaggatagccttgcaatggcctgtgatgatatccaacggatgaaggctgacatggggggaaccaatatcctgtcccctttaaagtgggtgatcaggcagccagttcaccggggacatccacgcttactgtttgtgatcacagacggcgcagtgaataacaccggcaaagtgctagagctggtgcgcaaccatgcttttagtacccgctgctactcctttggcattggcccgaacgtgtgtcaccggttggtcaagggcctcgcctcagtgtccgaaggctctgctgaattgctgatggaaggtgagcgcctgcagcctaagatggttaaatcgctcaaaaaggcaatggcccctgttctctcggatgtgacggttgagtggatcttcccggagacaaccgaggtgctggtgagccccgtctctgcgagcagtctgttcccaggagagaggttggtcgggtacggcattgtgtgcgacgcttcattgcacatctcaaacccacggtccgataagagaaggcggtactccatgctgcatagccaggagtcggggtccagtgtgttttaccactctcaggacgatggtcctggactggaaggtggggattgtgctaagaattccggagcccctttcatcctaggccaggcaaagaacgctcgtcttgctagcggtgattcgaccacaaagcatgacttgaacctgtctcaacgcagacgtgcatactccacaaatcagatcacaaatcataagccactgccaagggctactatggcttccgacccaatgcccgcggccaaaagatacccgcttcgtaaggcccgcctccaggacttaactaaccagacaagcctggacgtacagcgatggcagatagacctccagcctctcctgaactccggacaggacctgaatcagggcccaaagctgcggggtccgggagctcgtcggccatcactcttgccccagggatgccaaccattccttccctggggccaggagactcaggcatggtcaccagtacgggagcgtacctcagattctagaagcccgggggatctggagccatcccatcacccgtcagcttttgagaccgaaaccagcagtgactgggacccccctgctgagtcgcaagagcgagcctccccttctagaccggcaaccccagctcctgtgctcgggaaggccctcgttaagggattacatgatagccagaggctacagtgggaggtcagcttcgaacttggaactccaggacctgagcgaggaggcgctcaggacgccgacctctggtcagagacatttcaccacctagcagcccgggccatcatccgagactttgagcagcttgcggaacgtgaaggtgaaattgaacagggatcgaatagacgttaccaggtcagtgccctacacactagtaaggcctgcaacattatctccaaatatacagcattcgtccccgtggatgttagcaaatcccgatatctgcctacggtggtagaatatccaaattccgcggccctgaggatgctcgggtcacgcgctcttgcccagcagtggaggggtactagctcagggttcggaaggcctcagacaatgttaggtgaggatagtgcccctggaaatggccctcagcggtcactggcaaccaatacattgtcatccatgaaagcctccgagaacctgttcggaagttggctgaacctgaacaagtctaggctcctcacccgtgctgccaaaggctttctttccaagccactgatcaaggctgtggagagcacgagcgggaatcagagcttcgactatatcccgctggttagcctgcagctggccagcggagctttccttctgaatgaggcattctgcgaggctactcatattcccatggaaaagctcaagtggacaagcccctttacttgtcacagagtgagccttaccactagacccagtgagagtaagacaccaagtccacagctatgtacttcctcacctcctcgccatccctcctgtgactccttcagcctagaaccattggctaagggcaagctggggcttgagccacgcgcggtggtggaacacacaggtaagttgtgggcaactgtggtaggattagcttggctggaacattcaagtgcctcctatttcacggagtgggagcttgtggctgcgaaggcaaattcctggctggagcaacaggaagtgccagaagggaggactcaggggactctgaaagcggccgctcgacagctctttgtgcttctgcggcactgggacgagaatctggaatttaatatgttgtgctacaatcctaattacgtgtag

SEQ ID NO: 337060 - RNA, 3570 nt, Artificial Sequence
  derived and/or modified sequence
augccaggacuccuuaauuggauaacgggagcagcucucccccugacugcaagugaugugacuucuugugugaguggcuaugcucugggacugaccgccagucucaccuacgguaauuuggaagcccagccuuuccaagggcuauucguguacccccuggaugaaugcaccacggugaucggcuucgaggcuguuaucgcugaucguguagugacagugcaaaucaaggauaaagccaaacuggaauccggucauuucgaugcuucccacgugcgcucacccacuguuaccgggaauauucuccaggauggaguguccauugccccccacucuugcacgccaggcaaagugacucucgacgaggaccucgagcgcauccuguucguggcuaaucuugguacaaucgcccccauggagaacgugaccauuuucaucaguaccaguagcgaacugccuaccuuaccgucuggggcagucagaguguuacugcccgcugucugugcgccaacagucccccaauucuguacaaaaucuacugggaccucuaaucagcaagcgcagggcaaggacaggcacugcuuuggcgcgugggcaccggguagcuggaacaagcugugucucgcuacacuguugaacacugaagugucaaacccgauggaguacgaguuuaauuuucagcuggagauucguggaccaugccuucuagccggaguggaguccccaacacacgagauucgcgcggaugccgccccaagcgcacguagcgccaaaucuauuaucaucacgcuggccaacaaacacacuuuugacaggcccgucgaaauucugauccaccccagugaaccacacaugccacaugugcugauagagaaaggcgacaugaccuugggcgaguucgaucagcaucugaaggggcggaccgauuucauuaaaggaaugaaaaaaaagucaagggccgagaggaagaccgaaaucauacgcaaacgauuacacaaggacauuccacaucauuccgucaucaugcuuaauuuuugccccgaucuacagagugugcagcccugucuucgcaaggcucacggagaauuuauuuucuugaucgaccgcuccaguucuauguccggcauauccaugcaccgggugaaagaugccaugcugguggcacuuaagucucugaugccugcuugucuuuucaauaucauuggcuucgguucuacuuucaaaucacuguucccuucgucacagacuuacuccgaggacucccuggccauggcaugugaugauauccaacguaugaaagccgauaugggcgguaccaacauucuauccccguugaaaugggugauccgccagccuguucacagaggacauccacgguuacuauucgugaucacugacggggcagugaauaauaccggcaaaguucuggaacugguacggaaccacgccuucaguaccaggugcuauuccuucggcauaggcccuaaugucugccacagacuggugaagggacuagcaucggugucagaggggucugccgagcugcucauggagggagagcggcugcagccuaagaugguuaagucucuaaagaaagccauggccccagugcuauccgacgugacgguggaauggaucuuuccugagacgacagaaguccucgugagucccguuucugccucuucccuuuuuccgggcgaacggcuagucgguuacggaauugugugcgaugccuccuugcauauuucaaacccuagguccgauaagaggagacgguauucaauguugcauagucaggaaagcggaaguucaguauucuaucauucacaggaugauggcccgggacucgaggguggcgauugcgcuaagaauucuggggcccccuucauccucgggcaggcaaagaacgcucgucucgcuucuggggacucuacaacaaaacaugacuuaaaccugucccaacgacgccgugcuuacucuacaaaccaaaucaccaaucacaagccccuaccacgggcuacgauggcauccgacccaaugcccgccgcuaagcguuaccccuuaagaaaggcccgccuacaggauuuaacgaaucagacuucguuagacgugcaacgcuggcaaaucgaccugcaacccuuacucaacuccggccaggaucugaaucaggguccaaaacuucguggaccgggugcccggaggccuagcuugcugccacaggggugccagccuuuucuucccuggggacaagagacucaggccuggucgccagugcgcgagcguacaucugacaguaggucccccggugaucuugagccuagccaccauccaagcgcguuugagacggaaaccagcucugacugggacccacccgccgagucacaagagagagccucaccuagccgcccagcaaccccagcaccuguucuugggaaagcucuggugaaaggucugcaugauucccagcgacugcagugggaggugucguuugaacucgguaccccuggaccugagcgcggaggggcucaggaugccgaucuguggagcgaaaccuuucaccacuuggccgcccgggcgaucauucgugacuuugagcagcuggcggagagggaaggagaaauugagcagggcuccaaucgaagguaucaaguaucagcgcuacauaccaguaaagcgugcaacaucaucuccaaauacacagcauucgugcccguagaugucucaaaaucacgguaccugcccacugugguugaguauccuaauuccgccgcuuuacgaaugcucgggagccgugcgcuugcccagcaguggagaggcacuucuucagguuuuggccgaccccagacaaugcugggugaggacagcgcccccggcaaugggccacaacgcagccucgcgacuaauacucugucuuccaugaaggcgagcgagaaucuguucgggucuuggcugaaucuuaauaaaagccgcuuacuaacccgugccgcaaaaggcuucuuaagcaaaccauugauuaaggccgucgagucuacuucuggcaaucaaagcuucgacuacauuccacuagucucccuccaguuagcuucaggcgccuuucugcuaaaugaagccuucugcgaggccacgcauauccccauggagaaguugaaguggacaagcccuuucacaugucacagaguuaguuugacaaccaggccguccgaguccaaaacaccuucgccccaguuguguacuucuucccccccaaggcaccccagcugcgauucauucucucucgaaccacuggcuaagggaaaacugggccuggaaccacgggcugugguugaacauacuggcaagcuuugggccacuguugucggucuugcuuggcucgaacauucuagcgcuucuuacuuuacugagugggagcuggucgccgccaaggcaaacaguuggcucgaacagcaagaaguccccgaggggaggacacaggggacuuuaaaggccgcagcaaggcagcuguuugugcuacuccggcauugggacgagaaccuggaguucaacaugcuauguuauaacccuaauuacguuuag

SEQ ID NO: 337061 - RNA, 3570 nt, Artificial Sequence
  derived and/or modified sequence
augccaggucuucucaacuggauaaccggagccgcccugccccuaacugccucggacguaacuucaugcguaucagguuacgcccucggccugaccgcaucauuaacuuauggcaaucuggaagcccaaccauuccaaggacucuucguuuauccucuagacgaguguacuaccgugauagguuucgaggcugucauugcugaccgcgucguuacuguccaaaucaaagauaaagcuaagcuggaauccggacacuuugacgccucacacgugagguccccgacuguuaccggcaacauuuugcaggauggagucucaauagccccucauuccuguacacccggcaaagucacccucgacgaggaucuagaacguauccuguuuguggccaauuugggcaccauagcccccauggaaaacguaaccaucuuuauuagcacuucuucugagcuuccuacacugccuucuggagccgugagagugcugcucccagccgugugcgcccccacuguaccacaguucuguaccaagaguacuggaaccucuaaccagcaagcacaaggcaaggacagacauuguuuuggcgcaugggccccgggcucuuggaauaaacuuugucuugcuaccuuguuaaauacugaaguuucaaacccaauggaguacgaauuuaacuuccagcuagagauccgggggccuugcuuauuggccggugucgaaucuccuacucaugaaauucgggcugacgcagcucccagcgcccgauccgcuaagucuaucauuauaacauuagcgaacaaacacaccuucgaucgaccgguagaaaucuugauccaccccagcgaaccccacaugccucacguacugaucgagaaaggcgacaugacauugggcgaguuugaucaacaccuaaagggacggacugacuuuaucaagggaaugaagaaaaaguccagggcugaaagaaaaaccgaaaucaucaggaagagacuacacaaggauaucccccaccacucagugauaaugcuuaacuuuuguccggaucuccagucagugcagccaugccuacggaaagcacacggugaauucaucuuuuuaaucgacagguccucuaguaugucaggcauuuccaugcauaggguuaaggacgcaaugcucguugcucugaagucuuugaugccagcgugucuuuucaauauaaucggguucgggucaaccuuuaagucauuguuccccucgucucaaacuuacuccgaggacucucuggccauggcgugugacgauauccagcgaaugaaggccgauaugggaggcacaaacauucucuccccccugaaguggguaauuagacagcccguucauaggggccauccuaggcuguuauucgugauuacugauggugccguaaacaacaccgguaaaguccucgagcucgugagaaaccacgccuucaguaccagauguuacucuuucggaaucggucccaacguuugucaccgucucgugaaaggauuggccagcgugucugagggcucagccgaacuguugauggagggggagagacugcagcccaagauggugaaaaguuuaaagaaagccauggccccgguccuuagcgacguuacaguugaauggauuuuucccgagacaacagagguucuggugucaccggugagugcuucuucuuuauucccuggcgaacgucuagugggcuacggcauugugugugacgcaucuuuacacaucagcaauccaagguccgacaagcggcgcagauacucaaugcuucacagucaggagagcggcagcucgguuuuuuaccacagccaggaugaugggcccgggcucgagggaggggacugugcuaaaaacuccggggcgccauuuauucuuggacaggccaaaaaugcacggcuugcaucuggcgacucaacgacuaaacacgauuuaaacuuaucccagcggagaagggccuauaguacgaaccagaucaccaaucacaagccguuaccacgcgccacaauggccucugacccaaugcccgccgccaagagauacccgcucagaaaggcuagacuucaggaccucacuaaccagacaagcuuggacguccagcguuggcagauagacuuacagccccuccucaacucugggcaggaucugaaucaaggcccuaaacuucgagguccuggagcacggcgcccaucccuucugccacaaggaugucagccguuuuugccauggggccaggaaacccaggccuggucucccguucgugagcgcacuagugacucaagauccccuggggaucuggagccuucccaccauccauccgcuuucgagacugaaacaaguucugacugggacccacccgccgaaucccaggaacgagcuucaccuagccggccugcaacaccagcaccaguccucggcaaagcacuuguaaaggguuugcaugauucgcagaggcuccaaugggagguuuccuucgagcuagguaccccaggcccagagaggggaggagcccaggaugcugauuuaugguccgaaacuuuccaucauuuggcagcacgagccaucauuagagacuucgaacaguuggccgaacgggagggugagauugagcaggggaguaaucguagguaucaaguuagugcacuucacacgaguaaggcuugcaacauaauaucuaaguacacagccuucgucccaguggaugugaguaaaagcagguaucuucccacaguggucgaauaccccaauuccgcugcccuucgcauguuaggcucuagggcccucgcucaacaauggcgggguacuuccagcggauucggccguccacaaaccauguugggggaggacuccgcucccggaaauggaccccagcgaagcuuggccacaaauacccugucuucaaugaaagcuucugaaaaccuguucggguccuggcuuaaccugaauaaaucucgcuuacugacccgggccgcaaaaggguuccugagcaaaccgcugaucaaggccguagaaagcaccaguggaaaucaauccuuugacuacaucccccuuguuucacugcagcuagcaaguggcgcuuuuuuauugaacgaagcuuucugugaggcuacucacauucccauggaaaaacugaaauggacauccccauucacgugccaccgugucucucugacaacucgcccguccgaaaguaagacaccuucuccucagcucugcaccucaucaccacccagacaccccucuugugauucauucucucuggaaccucuggcgaagggaaaacuuggcuuggaaccucgugcugugguugagcacaccggaaaauugugggcuaccgugguuggccuagccugguuagagcacuccucggcuucauacuuuacugagugggaacugguugccgcuaaagcaaauucauggcuggagcagcaggaggugccagaaggaagaacccagggcacauuaaaggcggccgcuaggcagcuguuuguuuuacuccgacacugggaugaaaaucuugaauucaauauguuguguuacaauccgaacuacguguag

SEQ ID NO: 337062 - protein, 1016 aa, Artificial Sequence
  derived and/or modified sequence
MPGLLNWITGAALPLTASDVTSCVSGYALGLTASLTYGNLEAQPFQGLFVYPLDECTTVIGFEAVIADRVVTVQIKDKAKLESGHFDASHVRSPTVTGNILQDGVSIAPHSCTPGKVTLDEDLERILFVANLGTIAPMENVTIFISTSSELPTLPSGAVRVLLPAVCAPTVPQFCTKSTGTSNQQAQGKDRHCFGAWAPGSWNKLCLATLLNTEVSNPMEYEFNFQLEIRGPCLLAGVESPTHEIRADAAPSARSAKSIIITLANKHTFDRPVEILIHPSEPHMPHVLIEKGDMTLGEFDQHLKGRTDFIKGMKKKSRAERKTEIIRKRLHKDIPHHSVIMLNFCPDLQSVQPCLRKAHGEFIFLIDRSSSMSGISMHRVKDAMLVALKSLMPACLFNIIGFGSTFKSLFPSSQTYSEDSLAMACDDIQRMKADMGGTNILSPLKWVIRQPVHRGHPRLLFVITDGAVNNTGKVLELVRNHAFSTRCYSFGIGPNVCHRLVKGLASVSEGSAELLMEGERLQPKMVKSLKKAMAPVLSDVTVEWIFPETTEVLVSPVSASSLFPGERLVGYGIVCDASLHISNPRSDKRRRYSMLHSQESGSSVFYHSQDDGPGLEGGDCAKNSGAPFILGQAKNARLASGDSTTKHDLNLSQRRRAYSTNQITNHKPLPRATMASDPMPAAKRYPLRKARLQDLTNQTSLDVQRWQIDLQPLLNSGQDLNQGPKLRGPGARRPSLLPQGCQPFLPWGQETQAWSPVRERTSDSRSPGDLEPSHHPSAFETETSSDWDPPAESQERASPSRPATPAPVLGKALVKGLHDSQRLQWEVSFELGTPGPERGGAQDADLWSETFHHLAARAIIRDFEQLAEREGEIEQGSNRRYQVSALHTSKACNIISKYTAFVPVDVSKSRYLPTVVEYPNSAALRMLGSRALAQQWRGTSSGFGRPQTMLGEDSAPGNGPRKCSQTLMGFKTKTETEHSVRGWKPRGALQNQSVLSTSWSHWPPKPRRTSSTPEPS

SEQ ID NO: 337063 - DNA, 3051 bp, Artificial Sequence
  derived and/or modified sequence
atgcctggcctcttgaattggattacgggtgctgccctgccacttacagcgagtgacgtcactagttgtgtttccggttacgctctgggactcacagccagcttgacttatggcaatctcgaagcccagccattccaggggctctttgtgtatccactcgacgagtgtactacagtcatcggcttcgaagccgtgatagccgatcgggttgtaactgtccagattaaggataaggccaagcttgagtccgggcactttgatgcaagccatgtgaggtctcccacagtcactggaaacatcttgcaagacggcgtgtccatcgcccctcattcttgtactcccggaaaagtgaccctggacgaagatctggagagaatcctgtttgttgccaatctgggtactattgcacccatggaaaatgttactatcttcatctctacctcatccgagctgcccaccctgccaagcggagccgtgcgggtcttgctccctgctgtatgcgcacccaccgtgccacaattctgtacgaaatctaccggcactagcaaccagcaggcacaggggaaggatcggcattgcttcggtgcatgggcacccggaagctggaataaactgtgtttagccaccctactcaataccgaggtctccaatccgatggagtatgaatttaacttccagctggagattcgcggaccgtgcctgctggctggagttgagtctcccacccacgaaattcgggcagatgctgccccaagcgctaggtccgccaagtcaattattattacgctggccaataaacatacttttgaccgccctgtggagatcctaatccacccatccgaaccccacatgcctcatgtgctcatcgaaaagggagacatgaccctgggcgagtttgatcagcatctgaaggggcgtaccgattttatcaaggggatgaagaaaaagtctcgcgctgaaagaaagaccgagataattcgaaaaaggctgcacaaggatattccgcatcactcagtgattatgctcaatttctgtccagatttgcaaagcgtccaaccttgccttcgcaaggcccacggcgaattcatcttcctgatcgaccgttcatcctccatgtccggaatctctatgcatagggtcaaagacgcaatgttagtagccctgaaatccctgatgccagcatgcctcttcaacatcatcgggtttggctcaacatttaagagtctgttcccctcttcccaaacgtattcagaggactcgcttgcaatggcatgcgacgatatacagagaatgaaagcagacatggggggaaccaatattctctctcccttgaagtgggttatccggcagcctgtccaccgcggacacccaagactgttgtttgtaataaccgacggcgctgtcaataatactggcaaggtgctagaactggtaagaaaccatgccttctcgactcgatgttacagtttcgggatagggccaaacgtgtgccataggctggtgaagggtctggcctctgtgtccgagggctccgctgagcttttgatggaaggggagcgcctgcaacctaagatggtgaagtctctaaagaaggccatggctcccgtgctctccgacgtgacggttgaatggatttttccagaaactacagaggtgttagtcagccctgtctctgcaagcagtctattccccggtgagagattggttggctacggaattgtctgtgacgcctcgcttcatatcagcaacccaagatcagacaagagacgcaggtactctatgctgcacagtcaggagagcggaagttcagtgttctatcattctcaagatgacgggcctgggctcgagggaggggactgcgcaaagaactcaggcgcaccttttattctgggtcaggctaaaaatgcacgcctcgctagtggagactcaacgaccaagcatgatctgaatctatcgcaacggaggcgagcctattccacgaatcagatcacaaaccataaacctttgccgcgagccactatggcttcagacccaatgcccgctgcaaaaaggtacccgctgcgaaaggctagactccaggatctaaccaatcaaacctccctcgacgttcaaagatggcagattgatttgcaacctttgttgaattctggacaggacttgaatcaagggcctaaacttcggggaccaggagcgaggcgcccatcgctgctgccacaaggatgtcagcctttcttgccttggggacaagagacccaggcctggtcacctgtccgcgaaaggacgtccgacagcaggagcccaggagatctagagccttcacatcacccaagtgctttcgagacggagacctcatccgactgggacccaccagcggagtcccaggaacgagccagcccttcccggcctgcaacaccggctcccgtgctcggtaaagctctcgtcaaaggcctgcacgactctcagagactccagtgggaagtttcctttgaactcggcaccccgggtcccgaacggggaggagcccaggacgcggacctgtggagtgagacatttcaccacttggctgcacgcgctataattagagatttcgagcaattggctgagagggaaggagagattgagcaaggctccaaccgacggtaccaggttagtgccctccacacttcaaaagcctgtaacattatttctaagtatacggccttcgtccccgtggacgtctctaagtcaaggtaccttccaacagtggtggaatatcctaactccgctgcactcaggatgctgggtagccgggcactggctcaacagtggcggggaacttccagtgggtttggacgaccacagactatgctgggtgaggactcagccccaggtaacgggccacgtaagtgttctcagaccctgatgggatttaagactaagaccgaaactgaacacagcgtgcgtggctggaagcccagaggcgctctgcagaatcagtctgtgctatcaacctcctggtcacattggcccccaaagcctcggcgtacaagcagtacgccagagccatcctag

SEQ ID NO: 337064 - DNA, 3051 bp, Artificial Sequence
  derived and/or modified sequence
atgcccgggctcctgaattggattactggagcggccctgccactgacggcttccgacgttaccagctgcgtttcaggatacgccctcggtctaactgcttcactgacttatggtaatctggaggcccaaccattccagggactgtttgtttaccctctcgacgagtgcacaaccgtcattggatttgaggcagtgattgctgatcgcgtggtcactgttcagataaaggacaaggccaaactggagtctggacactttgatgccagccatgtacgatctccaaccgtcactggtaacattctacaggatggagtatccatcgctccacattcatgcaccccaggcaaagtgaccttggacgaagacctcgagcgcattttgtttgtagccaatctggggactatcgcacctatggagaacgtaacaatctttattagcaccagctccgaattgcctactctgccatcgggggccgtccgcgtcctgctgcccgccgtctgtgcccccactgtcccacaattctgtacaaaaagcaccgggacctccaatcagcaggctcaagggaaagatcgtcattgtttcggcgcgtgggcccccggctcatggaataagctgtgcttagcaacccttttaaacaccgaagtaagtaatccaatggaatatgagtttaactttcagcttgagattcggggaccttgtctcctggccggggtcgaaagtcccacccacgaaatccgggccgatgccgcaccttccgccagaagtgccaagtccatcattattaccctcgcaaacaaacatacatttgaccgccccgtcgaaatacttatccatcccagtgagcctcatatgcctcacgttcttatcgagaagggggacatgactctcggcgagttcgaccagcacctgaaaggcagaacggacttcatcaagggaatgaaaaagaaaagtagagccgagcgcaagacggagatcatacgaaagcgtctccataaggacataccacatcacagtgtcattatgcttaatttctgtcccgacctccagtccgtgcaaccgtgccttcggaaagcccacggcgaattcattttcctgatagatcgctcttcttccatgagcggtattagcatgcatcgcgttaaagatgcaatgctggtagccctgaaatcacttatgccagcctgtttattcaatatcattggctttggtagtacctttaaatctctgttccccagctcccaaacctacagcgaggactctcttgcaatggcctgcgacgacatccagcgtatgaaggcagacatgggcggcacaaacatcctaagccctctgaagtgggtgattagacagccggtgcatcggggtcacccacggctcctgtttgtcataactgacggcgccgtcaacaatacggggaaagtgcttgagctggtacggaatcacgccttttctacgcggtgctatagttttggaatcgggccaaacgtttgccacagattggtgaagggtctcgcctctgtatctgaagggagcgcagagcttttgatggaaggagaaagacttcaacctaagatggttaaaagtttaaagaaagccatggccccagtcctctccgatgtgacggtagagtggatcttccccgagaccacggaggtcctggtcagtcctgtatccgcctcttccttgtttcctggggaacgcttagtaggttacggaatcgtgtgcgatgcatccctgcacatctctaatccgagaagcgataaaaggcgtcggtacagtatgctgcatagccaagaatctggtagctctgtgttttaccatagccaagacgatggacctgggctggagggcggcgactgcgcgaagaattcaggggcgcccttcattctcggccaggctaaaaatgcccgcctggcctcaggcgattctaccacaaagcatgacctgaatctttcacagcgacggagggcgtacagcacaaaccagatcaccaaccataagcctttgccccgcgcaacaatggcatccgaccccatgcccgctgcaaaacgttatcccttgagaaaagcccgactgcaggaccttacaaaccagacttccctagatgtccagcgatggcaaatcgacttacagccactcctgaactccggacaagatctgaatcagggtccgaaactaagaggaccgggagcccggcgcccatcgctgctgcctcagggctgtcagcccttcttgccttggggacaggaaacacaagcctggtcaccagttcgggaaaggacttccgatagccgcagtccgggcgatctggagcctagccaccatccctctgcctttgaaacagaaacgtcaagcgattgggatcctcctgcagaaagtcaagaacgcgcaagccctagccgccctgctactcctgctcctgtgctcggcaaagcactcgtaaagggactgcatgatagtcagaggctccagtgggaggtttcatttgaactcggcaccccaggaccagagcggggtggagcgcaagatgccgatctgtggtccgaaaccttccaccacctggccgcgcgtgcgatcatacgcgattttgagcagcttgcagaacgagaaggggagatcgagcagggaagtaacagaagatatcaggtgagcgccctgcacacatccaaggcctgcaatatcatatccaagtacacagcttttgtaccagtggacgtctcaaagtctcggtatctccccacagtggtcgagtatccgaattctgctgcattaagaatgctgggtagccgggcactggcccagcagtggagaggaacatccagtgggttcgggcggccccagaccatgctgggcgaagatagcgccccaggaaacggccctaggaaatgttcgcagaccctcatgggatttaagactaaaaccgaaaccgagcattcggttcgtggatggaagcccagaggcgcattgcagaaccaatctgtgctgtcaaccagttggagtcattggccccccaaacctcggaggacgagctcaactccagagcctagctag

SEQ ID NO: 337065 - DNA, 3051 bp, Artificial Sequence
  derived and/or modified sequence
atgcctgggttattgaactggataacaggcgcagcccttccattaaccgcgtcagacgtgactagctgcgtgtcgggctacgccctggggctcaccgcaagtcttacctacggcaacctcgaagcccagcctttccaaggactctttgtatacccgctcgatgaatgcaccaccgtaattggatttgaagccgttattgccgatagagtggttacagtccagattaaggataaagccaagcttgaatccggccactttgacgcgtctcacgtgcgctccccaacggtcacggggaacattctgcaggacggtgtttcaattgccccccactcatgcacacccggaaaagtgaccctggacgaggatcttgagcgaattttatttgtcgcaaatttgggcacgatcgcgccaatggaaaatgtcactatctttatctcaacttcctcagagttgcccactcttccttcaggcgcagttagagtgctcctccctgccgtctgcgcccctaccgtcccccagttctgcacaaaatcaactggaacttccaatcagcaggctcaagggaaggatcggcactgctttggcgcatgggccccagggtcatggaataagctgtgcttagcaacccttttaaacaccgaagtaagtaatccaatggaatatgagtttaactttcagcttgagattcggggaccttgtctcctggccggggtcgaaagtcccacccacgaaatccgggccgatgccgcaccttccgccagaagtgccaagtccatcattattaccctcgcaaacaaacatacatttgaccgccccgtcgaaatacttatccatcccagtgagcctcatatgcctcacgttcttatcgagaagggggacatgactctcggcgagttcgaccagcacctgaaaggacgtactgattttatcaaaggaatgaagaagaaaagtcgcgctgaacgcaagacggagatcatccgcaagaggctccacaaagatatcccccaccattccgtcatcatgctgaacttttgccctgacttacaaagtgtgcagccctgcctaaggaaagcccacggggaatttatctttttgatagacagatcctcaagcatgtccgggatctcaatgcacagggtcaaggacgccatgctggtagctctgaagtctttaatgccagcctgcctcttcaatatcatcggctttgggtctacattcaaatctctctttccttcatctcagacttacagcgaagacagcctcgcgatggcctgcgacgacatccaacgtatgaaggcggatatgggcggtactaacatcctttcccctcttaagtgggttatccggcagcctgtgcatcgcggacaccctagacttcttttcgtgattaccgatggtgccgtgaataatactggaaaggtactcgagctggtccgaaatcacgcattcagcaccagatgctattctttcggtatcggaccaaatgtctgtcatagacttgtgaaaggccttgcctctgtctcagaaggctctgctgaattacttatggaaggcgagaggcttcagcctaagatggttaaaagtctcaaaaaagcgatggcacctgttctgtcagacgttactgtggaatggatttttcccgaaacgactgaagtgcttgtctcacctgtgtccgcttcatcactgtttccgggcgaacgcctggtgggctatgggattgtctgcgatgcaagtcttcacatatctaaccctcggtcagacaaaagaagacgttattcaatgctccattctcaggagagtggatcttctgtgttctaccattcacaagatgacgggccaggactggagggtggagattgtgcaaagaattcaggagccccttttatcctcgggcaggccaagaatgcccgccttgccagtggggacagcactactaaacacgatctgaacctgtctcaaaggagaagagcatactccactaaccaaatcaccaatcataaaccgttgccacgcgctaccatggcaagcgatcccatgccagcagccaagcgctatccattgcggaaggccagactccaggacctcacaaatcaaaccagcctagatgtccagcgatggcaaatcgacttacagccactcctgaactccggacaagatctgaatcagggtccgaaactaagaggaccgggagcccggcgcccatcgctgctgcctcagggctgtcagcccttcttgccttggggacaggaaacacaagcctggtcaccagttcgggaaaggacttccgatagccgcagtccgggcgatctggagcctagccaccatccctctgcctttgaaacagaaacgtcaagcgattgggatcctcctgcagaaagtcaagaacgcgcaagccctagcaggcctgcgaccccagctcccgtcctaggtaaagccctggttaagggtctgcacgattctcaaaggttacagtgggaggtaagttttgagctgggaactccaggaccagaacggggcggagcacaagacgccgatttgtggtccgagaccttccatcacttggccgcacgggcaatcatcagggatttcgaacaactcgccgaacgcgagggagagatagagcagggttcaaaccgccggtatcaagtgtccgcactacatacatctaaagcatgcaatataattagtaagtataccgcattcgtcccagtcgatgtcagcaaatcgagatatcttccgacagtggtggagtatccgaattcagccgccttaagaatgttagggtcacgagcactcgcccaacaatggagaggcacatcatccggcttcgggagacctcaaaccatgttaggtgaagactcagcacctggcaatggcccacgaaagtgcagtcaaactttgatggggtttaagacaaaaacagagactgaacactccgtaagggggtggaaaccacgaggcgccttacaaaatcaatctgtgctctctacctcctggtcccactggccccccaagccccgtagaacgtcctcgacccctgaaccctcctag

SEQ ID NO: 337066 - DNA, 3051 bp, Artificial Sequence
  derived and/or modified sequence
atgcccggcctgctgaactggatcaccggcgccgccctgcccctgaccgccagcgacgtgaccagctgcgtgagcggctacgccctgggcctgaccgccagcctgacctacggcaacctggaggcccagcccttccagggcctgttcgtgtaccccctggacgagtgcaccaccgtgatcggcttcgaggccgtgatcgccgacagagtggtgaccgtgcagatcaaggacaaggccaagctggagagcggccacttcgacgccagccacgtgagaagccccaccgtgaccggcaacatcctgcaggacggcgtgagcatcgccccccacagctgcacccccggcaaggtgaccctggacgaggacctggagagaatcctgttcgtggccaacctgggcaccatcgcccccatggagaacgtgaccatcttcatcagcaccagcagcgagctgcccaccctgcccagcggcgccgtgagagtgctgctgcccgccgtgtgcgcccccaccgtgccccagttctgcaccaagagcaccggcaccagcaaccagcaggcccagggcaaggacagacactgcttcggcgcctgggcccccggcagctggaacaagctgtgcctggccaccctgctgaacaccgaggtgagcaaccccatggagtacgagttcaacttccagctggagatcagaggcccctgcctgctggccggcgtggagagccccacccacgagatcagagccgacgccgcccccagcgccagaagcgccaagagcatcatcatcaccctggccaacaagcacaccttcgacagacccgtggagatcctgatccaccccagcgagccccacatgccccacgtgctgatcgagaagggcgacatgaccctgggcgagttcgaccagcacctgaagggcagaaccgacttcatcaagggcatgaagaagaagagcagagccgagagaaagaccgagatcatcagaaagagactgcacaaggacatcccccaccacagcgtgatcatgctgaacttctgccccgacctgcagagcgtgcagccctgcctgagaaaggcccacggcgagttcatcttcctgatcgacagaagcagcagcatgagcggcatcagcatgcacagagtgaaggacgccatgctggtggccctgaagagcctgatgcccgcctgcctgttcaacatcatcggcttcggcagcaccttcaagagcctgttccccagcagccagacctacagcgaggacagcctggccatggcctgcgacgacatccagagaatgaaggccgacatgggcggcaccaacatcctgagccccctgaagtgggtgatcagacagcccgtgcacagaggccaccccagactgctgttcgtgatcaccgacggcgccgtgaacaacaccggcaaggtgctggagctggtgagaaaccacgccttcagcaccagatgctacagcttcggcatcggccccaacgtgtgccacagactggtgaagggcctggccagcgtgagcgagggcagcgccgagctgctgatggagggcgagagactgcagcccaagatggtgaagagcctgaagaaggccatggcccccgtgctgagcgacgtgaccgtggagtggatcttccccgagaccaccgaggtgctggtgagccccgtgagcgccagcagcctgttccccggcgagagactggtgggctacggcatcgtgtgcgacgccagcctgcacatcagcaaccccagaagcgacaagagaagaagatacagcatgctgcacagccaggagagcggcagcagcgtgttctaccacagccaggacgacggccccggcctggagggcggcgactgcgccaagaacagcggcgcccccttcatcctgggccaggccaagaacgccagactggccagcggcgacagcaccaccaagcacgacctgaacctgagccagagaagaagagcctacagcaccaaccagatcaccaaccacaagcccctgcccagagccaccatggccagcgaccccatgcccgccgccaagagataccccctgagaaaggccagactgcaggacctgaccaaccagaccagcctggacgtgcagagatggcagatcgacctgcagcccctgctgaacagcggccaggacctgaaccagggccccaagctgagaggccccggcgccagaagacccagcctgctgccccagggctgccagcccttcctgccctggggccaggagacccaggcctggagccccgtgagagagagaaccagcgacagcagaagccccggcgacctggagcccagccaccaccccagcgccttcgagaccgagaccagcagcgactgggacccccccgccgagagccaggagagagccagccccagcagacccgccacccccgcccccgtgctgggcaaggccctggtgaagggcctgcacgacagccagagactgcagtgggaggtgagcttcgagctgggcacccccggccccgagagaggcggcgcccaggacgccgacctgtggagcgagaccttccaccacctggccgccagagccatcatcagagacttcgagcagctggccgagagagagggcgagatcgagcagggcagcaacagaagataccaggtgagcgccctgcacaccagcaaggcctgcaacatcatcagcaagtacaccgccttcgtgcccgtggacgtgagcaagagcagatacctgcccaccgtggtggagtaccccaacagcgccgccctgagaatgctgggcagcagagccctggcccagcagtggagaggcaccagcagcggcttcggcagaccccagaccatgctgggcgaggacagcgcccccggcaacggccccagaaagtgcagccagaccctgatgggcttcaagaccaagaccgagaccgagcacagcgtgagaggctggaagcccagaggcgccctgcagaaccagagcgtgctgagcaccagctggagccactggccccccaagcccagaagaaccagcagcacccccgagcccagctag

SEQ ID NO: 337067 - DNA, 3051 bp, Artificial Sequence
  derived and/or modified sequence
atgcctggactgctgaactggatcaccggagccgcactgccgctgaccgcaagtgacgttacctcctgcgtgtcaggttatgccctgggcctgacagctagtttaacttacggcaacctcgaagcgcagcctttccagggactgtttgtctaccctttagatgaatgtaccactgttatcgggtttgaggccgtgatcgcagatcgagtggtgactgttcagatcaaggataaagccaagctggaaagtgggcactttgatgcctcacatgtcaggtcccccacagttactggtaatattctacaggatggagtgtctattgcgccccatagttgcacccctgggaaggtgacacttgacgaagatctggaacggattttgtttgtcgccaatttaggtacaattgcccccatggagaatgtcaccattttcatctcaaccagttctgagctgcccactctccctagcggggcagtcagggtcctcttaccggctgtgtgtgccccaacggtgccccaattttgtacgaaaagcacaggaacttctaatcaacaagcccaggggaaagaccggcactgtttcggagcttgggctccgggctcctggaacaaactctgcctggcaaccctgctaaacaccgaagtcagcaatcccatggaatacgaatttaactttcagctcgaaattcgtggcccatgtttgctcgctggagttgagtcccccacccacgagatacgggccgacgcggcaccttcagctcggagcgccaagagtatcattatcacgctagccaataagcatactttcgatcggcctgtggagatcctcattcacccctccgagccacacatgcctcatgtgctaatagagaaaggcgacatgactctgggcgaattcgatcaacacctcaaaggccgtactgacttcatcaagggaatgaagaaaaaaagccgcgcagagagaaagaccgagattatcagaaagagactgcataaggatatccctcaccacagcgtcataatgctaaacttctgtcccgaccttcagtcggtgcaaccctgtctcaggaaagcacacggtgagttcatttttctcattgaccggagcagcagcatgagcggcatttcgatgcatagggtgaaggacgccatgctagttgccttgaaaagcctgatgcccgcttgcctgttcaatattatcggattcgggagcacatttaagagcttatttccatcttctcaaacctattccgaagattctctggccatggcgtgcgacgacatacagagaatgaaggccgacatgggcggaaccaacatcctctctccactgaagtgggtgatcagacaacctgtgcacagagggcaccccaggctgctgtttgtaatcactgatggagctgtgaacaataccgggaaagttttggagctggtacggaaccatgccttctctacccgctgctacagtttcggtattggtcccaacgtctgtcacagactggtgaagggactggcctctgtgtctgagggctcagctgagctgttgatggaaggagaacgattgcaaccaaagatggtaaaatcgctgaagaaagccatggcccccgtgctgagcgatgtcacagttgagtggatatttcctgagactaccgaagtcctggtatcccctgtaagcgctagcagccttttcccgggcgagagactagttggatacgggattgtgtgtgatgccagtttgcacatttccaatccaagaagtgacaagcgccgccgctattccatgctgcattctcaggagtccggtagcagtgtattttaccacagtcaggacgacggaccaggcttggaggggggggactgtgctaagaatagcggggccccttttattctgggccaagcgaagaacgcccggctggcctccggcgatagcacaacaaagcacgacctcaatttgtcacagagacggcgggcatacagtacgaatcaaatcacaaaccataagcccctgccccgtgccacaatggcctctgacccgatgccagccgccaagcgctatcctctgcgaaaggccagactccaagatttgaccaatcagacctccttggatgttcaacgttggcaaatcgacttgcagccccttctgaattcgggacaggatctcaaccaggggcccaaacttcgcggtcctggggcccggagacctagcttattgcctcaggggtgtcaaccattccttccttgggggcaggagacccaagcatggtccccggtgcgggagaggacatcagactcaaggtcccccggtgatctcgaaccctcacatcaccccagcgccttcgaaactgagactagctccgattgggatccgccagccgagtctcaggagcgtgcgagcccttctcggccggccaccccagccccagtactcggcaaagcgctggtcaaaggtctgcacgattcccaacgcctgcagtgggaggtctcttttgagctggggacacccggacctgaacgtgggggtgcccaagatgccgatctctggtctgaaaccttccatcaccttgccgctagagcaatcatcagagactttgagcagttggcagaaagagagggggagatcgaacaaggttcaaacagacgctaccaggtatccgccctacacacctctaaggcctgtaacataatctctaagtacacggcctttgtgcctgttgatgtatcaaagagcagatatttgccaaccgttgtcgaataccctaactcagccgctctgcgcatgctgggctcacgagctctcgctcagcagtggcgtggaacttcgtctggcttcggccgccctcaaaccatgctcggagaagactctgcccccggtaatggacctcggaaatgttcgcagaccctgatgggtttcaaaacgaagaccgagactgagcattctgtaaggggatggaaaccgcggggcgcgctgcaaaaccagtctgtccttagcaccagttggtcccactggccccccaaaccacggcggacatcttccacaccagagccttcatag

SEQ ID NO: 337068 - DNA, 3051 bp, Artificial Sequence
  derived and/or modified sequence
atgcctggcctgctgaactggatcactggagctgccctgcccctgacagccagtgatgtgaccagctgtgtgtctggctacgccctgggcctgacagccagcctgacctacggcaacctggaggcccagcccttccagggcctgtttgtgtaccccctggatgaatgtaccaccgtcatcggctttgaggccgtgattgctgacagagtggtgacagtgcagatcaaggacaaggccaagctggagagcggccactttgatgccagccacgtgcgcagccccaccgtgactggaaacatcctgcaggatggagtgtccatcgccccccacagctgcacccctgggaaggtgaccctggatgaggacctggagcgcatcctgtttgtggccaacctgggcaccatcgcccccatggagaatgtgaccatcttcatcagcaccagcagcgagctgcccaccctgcccagcggggctgtgcgggtgctgctgcctgctgtgtgtgcccccaccgtgccccagttctgcaccaagagcacaggcaccagcaaccagcaggcccagggcaaggacagacactgcttcggggcctgggcccctggctcctggaacaagctgtgcctggccaccctgctgaacacagaggtgagcaaccccatggagtatgagttcaacttccagctggagatccggggcccctgcctgctggccggcgtggagagccccacccatgagatccgggcagatgctgcccccagcgcccggagcgccaagagcatcatcatcaccctggccaacaagcacacctttgacaggcctgtggagatcctgatccaccccagcgagccccacatgccccacgtgctgattgaaaaaggagacatgaccctgggggagtttgaccagcacctgaagggccgcacagacttcatcaagggcatgaagaagaagagcagagctgagaggaagacagagatcatcaggaagaggctgcacaaggacatcccccaccacagcgtcatcatgctgaacttctgcccagacctgcagagcgtgcagccctgcctgaggaaggcccatggagagttcatcttcctgattgacaggagcagctccatgagcggcatctccatgcaccgggtgaaggatgccatgctggtggccctgaagagcctgatgcctgcctgcctcttcaacatcatcggcttcggcagcaccttcaagagcctcttccccagcagccagacctacagcgaggacagcctggccatggcctgtgatgacatccagaggatgaaggctgacatgggcggcaccaacatcctgagccccctgaagtgggtgatccggcagcctgtgcaccggggccacccccggctgctgtttgtgatcacagatggagctgtgaacaacacaggcaaggtgctggagctggtgagaaatcatgccttcagcacccgctgctacagctttggcatcggccccaacgtgtgccaccggctggtgaagggcctggcctctgtgtctgagggcagcgctgagctgctgatggagggggagcggctgcagcccaagatggtgaagagcctgaagaaggccatggcccctgtgctgagtgatgtgacagtggagtggatcttccctgagaccacagaggtgctggtgtcccctgtgtctgccagcagcctcttccctggagagcggctggtgggctatggaattgtgtgtgatgccagcctgcacatcagcaaccccaggagtgacaagagaagacgctacagcatgctgcacagccaggagagcggcagctctgtgttctaccacagccaggatgatggccctggcctggagggcggggactgtgccaagaacagcggggcccccttcatcctgggccaggccaagaatgcccggctggccagcggggacagcaccaccaagcatgacctgaacctgagccagaggagaagagcctacagcaccaaccagatcaccaaccacaagcccctgccccgggccaccatggccagtgaccccatgcctgctgccaagcgctaccccctgaggaaggcccggctgcaggacctgaccaaccagaccagcctggatgtgcagcgctggcagattgacctgcagcccctgctgaacagcggccaggacctgaaccagggccccaagctgcggggccctggggcccggcggcccagcctgctgccccagggctgccagcccttcctgccctggggccaggagacccaggcctggagccctgtgcgggagaggaccagtgacagccgcagccctggggacctggagcccagccaccaccccagcgcctttgaaacagagaccagcagtgactgggaccccccagctgagagccaggagcgggccagccccagcaggcctgccaccccagcccctgtgctgggcaaggccctggtgaagggcctgcatgacagccagaggctgcagtgggaggtgtcctttgagctgggcaccccaggccctgagcggggcggggcccaggatgctgacctgtggagcgagaccttccaccacctggccgcccgggccatcatccgggactttgagcagctggccgagcgggagggggagattgagcagggcagcaacagacgctaccaggtgtctgccctgcacaccagcaaggcctgcaacatcatcagcaagtacacagcctttgtgcctgtggatgtgtccaagagccgctacctgcccaccgtggtggagtaccccaacagcgctgccctgaggatgctgggcagccgggccctggcccagcagtggaggggcaccagcagcggcttcggccggccccagaccatgctgggggaggacagcgcccctggaaatggccccaggaagtgcagccagaccctgatgggcttcaagaccaagacagaaacagagcacagcgtgcggggctggaagcccaggggggccctgcagaaccagagcgtgctgagcacctcctggagccactggccacccaagcccaggaggaccagcagcaccccagagcccagctag

SEQ ID NO: 337069 - DNA, 3247 bp, Artificial Sequence
  derived and/or modified sequence
atcgcaatgtgggcattgatcaagccagctgccagggcagcgggcgcagggcttgggcactggagcccagccccggaccgcacctccagcagtgctgggtgcagaaggcagtcactgtggcagtggagagacagagtgtgtacccagacacgtgttgcttctggggtaaggttctgaaggctgagtagccagcgggatgcccggcttgctgaattggatcacgggggcagccctgcccctcaccgcgtctgatgttacctcctgtgtcagcggttatgccctgggcctaactgcctccctcacctatggcaacctggaagcccagcccttccagggcctcttcgtgtaccccctggatgagtgcaccacggtgatcggctttgaggcagtcattgccgaccgtgtcgtgacagtacagatcaaggacaaagccaagctggagagcggccacttcgatgcctcccatgttcgatccccaacagtcacagggaacattctgcaagacggggtttccatagcccctcattcctgcacaccgggaaaggtgaccttggacgaggatttggagcggatcctgttcgtggccaacctggggaccattgcccccatggagaatgtcaccatcttcatcagcacctcctcggagctcccaacgctgcccagcggggctgtgagggtccttctgcctgctgtctgtgccccaaccgtgccccagttctgcaccaagagcactggcacctccaaccaacaggcccagggcaaagacaggcactgcttcggtgcctgggccccgggctcctggaataagttgtgcctggcgactctcctgaacaccgaagtgtccaaccccatggagtatgagttcaacttccagctggagatccgtgggccatgtctgctcgcaggggtggagagtcccactcatgagattcgtgccgacgccgccccatctgcccgctcggccaagagcatcatcatcaccttggccaacaagcacacctttgaccggcctgtggagatcctcatccaccccagcgagccccatatgccccatgtcctgatagagaaaggggacatgaccctgggagagtttgaccagcacttgaagggaagaacagatttcattaaagggatgaagaagaagagcagagcagagcggaagacagaaatcattcgaaaacgcctccacaaagacattccccaccactccgtcatcatgctcaacttctgtcccgacctccagtcagtccagccgtgcctgagaaaggcccacggggagttcatcttcctcattgacaggagcagcagcatgagcgggatcagcatgcaccgagtcaaggatgccatgttggtggcccttaagagcctcatgccagcctgcctcttcaatatcattgggtttggatccacatttaagagcctttttccttccagccagacctacagtgaggacagcttggccatggcttgtgatgacatccagagaatgaaggccgacatgggtgggaccaacatcctttcccctctcaagtgggtcatcaggcagccagtgcaccgaggccacccgcggctcctcttcgtgatcacagatggcgctgtcaacaacacagggaaggtgctggagctggtgcgaaatcacgccttctccaccaggtgctatagctttggaattggacccaacgtctgccacagactggtgaaaggactggcatctgtgtccgagggcagtgctgagctcctgatggagggggagcggctgcaacccaagatggtcaaatccttgaagaaggccatggccccagtcctgagcgatgtgactgtggagtggatcttccctgagaccactgaggtcctggtctcacccgtcagcgccagctccctcttccctggagaacggctggtggggtatggcattgtatgtgatgcttctttgcacatctccaatcccagatctgacaagaggcgccggtacagcatgctgcactctcaggagtctggcagctctgtcttctaccactctcaggatgacggacccgggctggaaggtggagactgtgccaagaactcgggggcacccttcatcctagggcaggccaaaaatgcccggctagccagcggagactctaccaccaagcacgatctgaacctctctcagcgacggagggcatacagcaccaaccagatcaccaatcacaagcccctcccaagagccaccatggcaagtgaccccatgccagctgccaagagatacccactgcggaaagccaggctgcaggacctcaccaaccagaccagcctggatgtccagcggtggcagattgatttgcagcccttgctgaacagtggtcaggacctgaaccagggccccaaactccgtggcccaggggcccgaaggccctctctgctgccccaaggctgccagcccttcctgccctggggccaggagacccaggcctggagccctgtgagagagcggacttctgacagccgaagccctggagatctggagccgtcccaccatccctctgccttcgagacagagacgtcctcggactgggaccccccagccgagtcccaggagcgagccagtcccagcaggcccgccaccccggccccggtgctgggcaaggccctggtcaaaggcctgcacgacagccaacgcctgcagtgggaggtgagcttcgagctggggacccctggaccggagcggggcggcgcgcaggatgccgacctatggagcgagaccttccaccacctggcggcccgcgccatcatccgcgacttcgagcagctggcggagcgcgagggcgagatcgagcaggggtccaaccgccgctaccaagtgagcgccttgcacaccagcaaggcctgcaacatcattagcaaatacacagccttcgtgcctgtggacgtgagcaagagccggtacctgcccaccgtggtggagtaccccaactctgctgccctgcgtatgcttggctctcgggccctggcccaacagtggaggggcacctcttctggctttggaaggccgcagacgatgcttggagaagattcggcaccaggaaatggtcctagaaagtgctcacagacattgatgggttttaaaacaaaaacagaaacagaacacagtgtgagggggtggaaacccagaggagctcttcagaatcaaagtgttctctcaacttcttggtcccattggcctccaaaacccaggagaaccagctccacccctgagccaagctga

SEQ ID NO: 337070 - DNA, 3051 bp, Artificial Sequence
  derived and/or modified sequence
atgcccggcctgctgaactggatcaccggcgccgccctgcccctgacagcttctgacgtgaccagctgtgtgtccggctacgcgttagggctcactgcgtctctcacctatggcaatctggaagcccagccattccagggactgtttgtctatccgctggacgagtgtaccaccgtcattggctttgaggcagtcatcgctgatcgagtggtgaccgtacagatcaaggataaggcaaaactggagtctggacacttcgatgcgagccatgtcagatcccccactgtgacagggaatattcttcaggatggagtgtccatagcaccccatagttgcacacccggcaaggtaacactggatgaggaccttgagcgaattctattcgtcgccaatctgggcactattgctccgatggagaacgtgacaattttcatcagtaccagcagtgaactccctacactgccatccggtgctgtccgggtgctcctgcctgccgtctgtgcacctaccgtgcctcagttttgtactaagagtacaggtacctccaaccagcaagcccagggtaaagacagacactgctttggagcctgggctccgggctcttggaataaactgtgcctggctacactcctgaacaccgaggttagcaatccaatggagtatgaattcaacttccaattagagatccgcgggccatgcctgctggcgggggttgagagtcccacgcatgaaatacgcgccgatgctgctccgtctgctagaagtgcaaagagcattattatcacactggccaataagcataccttcgatcgtcccgtcgagatactgatacacccttccgagccgcacatgccgcacgtcctcatcgagaaaggcgatatgactctgggagagttcgatcagcacctcaaagggagaaccgatttcatcaagggcatgaaaaagaaatcgcgggctgagagaaagacggagattattaggaaacggctgcacaaggacatcccacaccatagcgtgatcatgctcaacttttgtccagatttacaatctgtccagccatgcttgaggaaggcacacggcgaatttatctttcttattgatcgctccagctctatgtccgggatctccatgcaccgtgtgaaagacgcaatgctcgtggcccttaaaagcctcatgccagcctgtctgttcaacatcatcggcttcggaagtacctttaagagtcttttcccttctagccagacgtacagtgaggattctctggcgatggcatgtgatgacatacaacggatgaaagcagacatgggcggtacaaacatcctatcacctttaaagtgggtgataagacaacctgtacacagggggcatccacgtctgctattcgtgattacagacggagctgtcaataatactggaaaagttctagagctggtgcgcaatcacgccttctccacccggtgctattcctttgggatcggcccaaatgtgtgccatcgactggtcaagggtctggccagtgtctcggaaggatcggcagaacttctcatggagggcgagcgcctacagcccaagatggtgaaatccctgaaaaaggctatggcgccagtcctctctgacgtgacagttgagtggattttccctgaaaccaccgaagtgttggtaagcccagtgtcagcatcaagcctgtttcctggtgagcgcctcgtggggtacgggatcgtgtgcgacgcctctctccacattagcaacccaagatccgataagaggagacgatactcaatgctgcacagtcaggagtcagggtcctctgtgttttaccatagtcaagatgatgggcccggattggaaggtggcgactgtgccaagaactctggagccccatttatcctcggacaggccaaaaacgcaaggttggctagcggcgactcaaccaccaaacatgatctgaacctgtctcagcgcaggagagcctattccacaaaccagataactaaccacaagccgctgcctagggctacaatggcctctgatccaatgccagccgccaagcgatatccgctgcggaaggcccggctgcaggacctgactaaccagactagtttggacgtacaacgctggcaaatcgacttgcagcccttgctgaacagcggacaggacctcaaccagggccccaaactgcgaggtcccggtgcaaggcggccctctctgctgccccagggatgccagccctttcttccctgggggcaggagacacaagcttggtcacccgtgagggaacggacttccgacagcagaagccccggagacctggaaccctcgcaccacccgagcgctttcgagactgagacatcatctgattgggatcccccagcagaatctcaggaacgggcctctccgagccgtcccgccacccccgcaccggttctcggaaaagccctggtgaaagggctccatgacagccagcgtctgcaatgggaggtcagttttgagttggggacacccggaccggagaggggtggtgcacaagacgctgacctctggagcgagacctttcaccacctagccgctcgggccatcattcgcgacttcgagcagttggccgaacgtgagggggaaatcgagcaaggaagtaataggcgttatcaagtgagcgcactacacacttcgaaggcatgtaatatcatctccaagtataccgcattcgtccccgtggatgtgtccaaatcccggtacctcccaaccgtggtggagtatccaaattctgccgcactacgaatgctagggtcaagagcgctcgcccagcagtggcgcggaacatcttccggctttggtagaccccaaacgatgttgggagaggatagtgctcctggaaacggccctcgaaagtgctctcagaccctgatgggattcaaaactaaaaccgagacggagcatagtgtgcgcgggtggaagccacggggagccctgcagaatcagtcggtgctgtctacaagctggtcgcattggccaccgaaacctcgccggacatcctcaacgccagagccctcctag

SEQ ID NO: 337071 - RNA, 3051 nt, Artificial Sequence
  derived and/or modified sequence
augcccgggcuccugaauuggauuacuggagcggcccugccacugacggcuuccgacguuaccagcugcguuucaggauacgcccucggucuaacugcuucacugacuuaugguaaucuggaggcccaaccauuccagggacuguuuguuuacccucucgacgagugcacaaccgucauuggauuugaggcagugauugcugaucgcguggucacuguucagauaaaggacaaggccaaacuggagucuggacacuuugaugccagccauguacgaucuccaaccgucacugguaacauucuacaggauggaguauccaucgcuccacauucaugcaccccaggcaaagugaccuuggacgaagaccucgagcgcauuuuguuuguagccaaucuggggacuaucgcaccuauggagaacguaacaaucuuuauuagcaccagcuccgaauugccuacucugccaucgggggccguccgcguccugcugcccgccgucugugcccccacugucccacaauucuguacaaaaagcaccgggaccuccaaucagcaggcucaagggaaagaucgucauuguuucggcgcgugggcccccggcucauggaauaagcugugcuuagcaacccuuuuaaacaccgaaguaaguaauccaauggaauaugaguuuaacuuucagcuugagauucggggaccuugucuccuggccggggucgaaagucccacccacgaaauccgggccgaugccgcaccuuccgccagaagugccaaguccaucauuauuacccucgcaaacaaacauacauuugaccgccccgucgaaauacuuauccaucccagugagccucauaugccucacguucuuaucgagaagggggacaugacucucggcgaguucgaccagcaccugaaaggcagaacggacuucaucaagggaaugaaaaagaaaaguagagccgagcgcaagacggagaucauacgaaagcgucuccauaaggacauaccacaucacagugucauuaugcuuaauuucugucccgaccuccaguccgugcaaccgugccuucggaaagcccacggcgaauucauuuuccugauagaucgcucuucuuccaugagcgguauuagcaugcaucgcguuaaagaugcaaugcugguagcccugaaaucacuuaugccagccuguuuauucaauaucauuggcuuugguaguaccuuuaaaucucuguuccccagcucccaaaccuacagcgaggacucucuugcaauggccugcgacgacauccagcguaugaaggcagacaugggcggcacaaacauccuaagcccucugaagugggugauuagacagccggugcaucggggucacccacggcuccuguuugucauaacugacggcgccgucaacaauacggggaaagugcuugagcugguacggaaucacgccuuuucuacgcggugcuauaguuuuggaaucgggccaaacguuugccacagauuggugaagggucucgccucuguaucugaagggagcgcagagcuuuugauggaaggagaaagacuucaaccuaagaugguuaaaaguuuaaagaaagccauggccccaguccucuccgaugugacgguagaguggaucuuccccgagaccacggagguccuggucaguccuguauccgccucuuccuuguuuccuggggaacgcuuaguagguuacggaaucgugugcgaugcaucccugcacaucucuaauccgagaagcgauaaaaggcgucgguacaguaugcugcauagccaagaaucugguagcucuguguuuuaccauagccaagacgauggaccugggcuggagggcggcgacugcgcgaagaauucaggggcgcccuucauucucggccaggcuaaaaaugcccgccuggccucaggcgauucuaccacaaagcaugaccugaaucuuucacagcgacggagggcguacagcacaaaccagaucaccaaccauaagccuuugccccgcgcaacaauggcauccgaccccaugcccgcugcaaaacguuaucccuugagaaaagcccgacugcaggaccuuacaaaccagacuucccuagauguccagcgauggcaaaucgacuuacagccacuccugaacuccggacaagaucugaaucaggguccgaaacuaagaggaccgggagcccggcgcccaucgcugcugccucagggcugucagcccuucuugccuuggggacaggaaacacaagccuggucaccaguucgggaaaggacuuccgauagccgcaguccgggcgaucuggagccuagccaccaucccucugccuuugaaacagaaacgucaagcgauugggauccuccugcagaaagucaagaacgcgcaagcccuagccgcccugcuacuccugcuccugugcucggcaaagcacucguaaagggacugcaugauagucagaggcuccagugggagguuucauuugaacucggcaccccaggaccagagcgggguggagcgcaagaugccgaucugugguccgaaaccuuccaccaccuggccgcgcgugcgaucauacgcgauuuugagcagcuugcagaacgagaaggggagaucgagcagggaaguaacagaagauaucaggugagcgcccugcacacauccaaggccugcaauaucauauccaaguacacagcuuuuguaccaguggacgucucaaagucucgguaucuccccacaguggucgaguauccgaauucugcugcauuaagaaugcuggguagccgggcacuggcccagcaguggagaggaacauccaguggguucgggcggccccagaccaugcugggcgaagauagcgccccaggaaacggcccuaggaaauguucgcagacccucaugggauuuaagacuaaaaccgaaaccgagcauucgguucguggauggaagcccagaggcgcauugcagaaccaaucugugcugucaaccaguuggagucauuggccccccaaaccucggaggacgagcucaacuccagagccuagcuag

SEQ ID NO: 337072 - RNA, 3051 nt, Artificial Sequence
  derived and/or modified sequence
augccuggguuauugaacuggauaacaggcgcagcccuuccauuaaccgcgucagacgugacuagcugcgugucgggcuacgcccuggggcucaccgcaagucuuaccuacggcaaccucgaagcccagccuuuccaaggacucuuuguauacccgcucgaugaaugcaccaccguaauuggauuugaagccguuauugccgauagagugguuacaguccagauuaaggauaaagccaagcuugaauccggccacuuugacgcgucucacgugcgcuccccaacggucacggggaacauucugcaggacgguguuucaauugccccccacucaugcacacccggaaaagugacccuggacgaggaucuugagcgaauuuuauuugucgcaaauuugggcacgaucgcgccaauggaaaaugucacuaucuuuaucucaacuuccucagaguugcccacucuuccuucaggcgcaguuagagugcuccucccugccgucugcgccccuaccgucccccaguucugcacaaaaucaacuggaacuuccaaucagcaggcucaagggaaggaucggcacugcuuuggcgcaugggccccagggucauggaauaagcugugcuuagcaacccuuuuaaacaccgaaguaaguaauccaauggaauaugaguuuaacuuucagcuugagauucggggaccuugucuccuggccggggucgaaagucccacccacgaaauccgggccgaugccgcaccuuccgccagaagugccaaguccaucauuauuacccucgcaaacaaacauacauuugaccgccccgucgaaauacuuauccaucccagugagccucauaugccucacguucuuaucgagaagggggacaugacucucggcgaguucgaccagcaccugaaaggacguacugauuuuaucaaaggaaugaagaagaaaagucgcgcugaacgcaagacggagaucauccgcaagaggcuccacaaagauaucccccaccauuccgucaucaugcugaacuuuugcccugacuuacaaagugugcagcccugccuaaggaaagcccacggggaauuuaucuuuuugauagacagauccucaagcauguccgggaucucaaugcacagggucaaggacgccaugcugguagcucugaagucuuuaaugccagccugccucuucaauaucaucggcuuugggucuacauucaaaucucucuuuccuucaucucagacuuacagcgaagacagccucgcgauggccugcgacgacauccaacguaugaaggcggauaugggcgguacuaacauccuuuccccucuuaaguggguuauccggcagccugugcaucgcggacacccuagacuucuuuucgugauuaccgauggugccgugaauaauacuggaaagguacucgagcugguccgaaaucacgcauucagcaccagaugcuauucuuucgguaucggaccaaaugucugucauagacuugugaaaggccuugccucugucucagaaggcucugcugaauuacuuauggaaggcgagaggcuucagccuaagaugguuaaaagucucaaaaaagcgauggcaccuguucugucagacguuacuguggaauggauuuuucccgaaacgacugaagugcuugucucaccuguguccgcuucaucacuguuuccgggcgaacgccuggugggcuaugggauugucugcgaugcaagucuucacauaucuaacccucggucagacaaaagaagacguuauucaaugcuccauucucaggagaguggaucuucuguguucuaccauucacaagaugacgggccaggacuggaggguggagauugugcaaagaauucaggagccccuuuuauccucgggcaggccaagaaugcccgccuugccaguggggacagcacuacuaaacacgaucugaaccugucucaaaggagaagagcauacuccacuaaccaaaucaccaaucauaaaccguugccacgcgcuaccauggcaagcgaucccaugccagcagccaagcgcuauccauugcggaaggccagacuccaggaccucacaaaucaaaccagccuagauguccagcgauggcaaaucgacuuacagccacuccugaacuccggacaagaucugaaucaggguccgaaacuaagaggaccgggagcccggcgcccaucgcugcugccucagggcugucagcccuucuugccuuggggacaggaaacacaagccuggucaccaguucgggaaaggacuuccgauagccgcaguccgggcgaucuggagccuagccaccaucccucugccuuugaaacagaaacgucaagcgauugggauccuccugcagaaagucaagaacgcgcaagcccuagcaggccugcgaccccagcucccguccuagguaaagcccugguuaagggucugcacgauucucaaagguuacagugggagguaaguuuugagcugggaacuccaggaccagaacggggcggagcacaagacgccgauuugugguccgagaccuuccaucacuuggccgcacgggcaaucaucagggauuucgaacaacucgccgaacgcgagggagagauagagcaggguucaaaccgccgguaucaaguguccgcacuacauacaucuaaagcaugcaauauaauuaguaaguauaccgcauucgucccagucgaugucagcaaaucgagauaucuuccgacagugguggaguauccgaauucagccgccuuaagaauguuagggucacgagcacucgcccaacaauggagaggcacaucauccggcuucgggagaccucaaaccauguuaggugaagacucagcaccuggcaauggcccacgaaagugcagucaaacuuugaugggguuuaagacaaaaacagagacugaacacuccguaaggggguggaaaccacgaggcgccuuacaaaaucaaucugugcucucuaccuccuggucccacuggccccccaagccccguagaacguccucgaccccugaacccuccuag

SEQ ID NO: 337073 - protein, 447 aa, Artificial Sequence
  derived and/or modified sequence
MPHVLIEKGDMTLGEFDQHLKGRTDFIKGMKKKSRAERKTEIIRKRLHKDIPHHSVIMLNFCPDLQSVQPCLRKAHGEFIFLIDRSSSMSGISMHRVKDAMLVALKSLMPACLFNIIGFGSTFKSLFPSSQTYSEDSLAMACDDIQRMKADMGGTNILSPLKWVIRQPVHRGHPRLLFVITDGAVNNTGKVLELVRNHAFSTRCYSFGIGPNVCHRLVKGLASVSEGSAELLMEGERLQPKMVKSLKKAMAPVLSDVTVEWIFPETTEVLVSPVSASSLFPGERLVGYGIVCDASLHISNPRSDKRRRYSMLHSQESGSSVFYHSQDDGPGLEGGDCAKNSGAPFILGQAKNARLASGDSTTKHDLNLSQRRRAYSTNQITNHKPLPRATMASDPMPAAKRYPLRKARLQDLTNQTSLDVQRWQIDLQAFICLTSEDTFQIRTPTGQ

SEQ ID NO: 337074 - DNA, 1344 bp, Artificial Sequence
  derived and/or modified sequence
atgccccacgtacttattgagaaaggagacatgacgctcggtgagttcgatcagcacctgaagggccgaacagacttcatcaagggaatgaaaaaaaaatctcgcgctgaaagaaaaaccgaaattatcaggaagaggttacacaaggacattccccaccattctgtaattatgctgaatttctgcccagacctgcagagcgtgcagccctgcctccggaaggctcacggagaattcattttcctaatagaccgatctagcagcatgtctggaatatctatgcatagagtgaaggatgccatgcttgtcgcactcaagtcccttatgccagcctgtctgtttaatattatcgggttcggatccacctttaagtctctgtttcctagctctcagacatacagtgaggactcgttagctatggcttgcgacgacatccagcggatgaaggcagatatgggagggaccaacatcctgagccctctgaagtgggtcatccggcagcccgtgcatcgtgggcacccacgcctgttatttgtcattaccgacggcgcagtgaacaacacaggaaaagtcttggagctggtgcgcaaccacgcattttccacccgatgttacagctttggaattgggccaaacgtctgtcacaggttggtgaaggggctggctagtgtttctgaaggctcagcagaactgctgatggagggcgaacggctccaaccgaagatggtgaagagccttaagaaagcgatggcccctgtgctctcagacgttacagtggagtggatttttcccgaaacaactgaggtgcttgtgagtccagtctctgcctcgagtctgttcccgggagagcggctggtagggtacgggatcgtgtgcgacgcttccctgcatatctcaaatccacggtcggataaaaggaggagatacagcatgctgcacagtcaagagagtggcagtagtgtgttctatcactcccaggatgatggccctggattggaggggggagactgtgctaagaatagcggggcacccttcatcctcggccaggcaaagaatgccaggctggcttccggcgacagcacaactaaacacgatctgaacttgtctcagcgcagacgtgcgtacagcactaatcagattactaaccataaacctctccccagagcgacaatggcatcagaccccatgcccgctgccaagagatatcctctgcggaaggccaggctgcaggatctgaccaaccagacctcgctagatgtgcagcggtggcagatcgatcttcaagccttcatctgcctgacttcagaggataccttccagatccgtactccaactggtcagtag

SEQ ID NO: 337075 - DNA, 1344 bp, Artificial Sequence
  derived and/or modified sequence
atgccgcacgtgctcattgagaagggggacatgacattgggagagttcgatcagcacttaaaaggtcgcactgatttcatcaagggcatgaagaaaaagtcccgggcggagagaaaaacagagatcattcggaaaaggttacataaagatattccacaccactctgtcattatgctcaatttctgtcccgacctgcagtcagtacagccttgtttgagaaaggcacacggggagttcatttttctgattgatcggtccagctccatgagtggaatctctatgcaccgggtgaaggacgctatgctggtggctttgaaatctttgatgcctgcttgcctgttcaacatcatcggttttggaagcaccttcaagagtctattcccatcttcacagacatactctgaggactccctagcaatggcatgcgatgatatccagaggatgaaggcagacatgggaggcacaaacatcctttccccgcttaagtgggtcatacgccagccagtccaccgaggccacccacgcttgttgttcgttatcactgatggagcggttaataataccggcaaggtgcttgaattagtccgtaaccacgcattcagtacccgatgttactccttcgggattggcccaaatgtttgccaccgcctggtcaagggacttgcctctgtgtccgaaggtagcgccgaactgctgatggagggggagaggctgcagcccaaaatggttaaaagtttgaaaaaggcaatggcccccgttctgtctgacgtaacagtggagtggatcttccccgagacgaccgaagtgctggtatccccagtttctgcttcctcactcttccccggtgaacgactcgtaggttacggtattgtgtgcgacgcttccctccatataagtaaccctaggagtgataagaggagacggtacagtatgctgcactctcaggaatctggatcctccgttttctatcattcacaggatgatggccccgggctcgaagggggtgattgcgccaagaattccggggcaccattcatactgggtcaagctaagaatgcacggttggcatccggcgattccaccacgaagcacgacctgaacctgagccagaggcgccgggcctactccactaaccagattacgaaccacaaacctctgcctagagccactatggctagtgaccccatgccagctgctaaacgctacccgttgcgcaaggcaagactgcaggatctaacaaatcagacatctctcgatgtacaacgctggcagattgacctccaagcctttatttgcttgacttcagaagacaccttccagatcagaacaccgaccggacagtag

SEQ ID NO: 337076 - DNA, 1344 bp, Artificial Sequence
  derived and/or modified sequence
atgcctcacgttttaatcgaaaaaggagacatgacactgggcgagttcgatcagcacctaaagggcagaacggattttattaagggtatgaaaaaaaagagtcgtgcggaacgtaaaactgaaatcatacggaaaagattgcataaggatatccctcatcattcagttataatgctaaacttctgtcctgacctccaatccgtgcagccctgtctgcgaaaggcacacggcgaattcattttcctgatagaccgatcgagttctatgagcggcatttccatgcatcgggtgaaagacgctatgttggtggccttaaaaagtctgatgcctgcatgtttattcaatattatagggtttggcagtacattcaagagcctgtttccaagtagccagacttattcagaagactcgctggcaatggcatgtgacgacattcagagaatgaaagcggatatgggaggtactaacatcttgtccccactcaaatgggttataagacagccggtccatcgaggtcatcccagattattgttcgtgattactgacggcgccgtgaacaatacgggcaaggtcctggagctcgttcggaaccacgcttttagtacccgatgttactccttcgggattggcccaaatgtttgccaccgcctggtcaagggacttgcctctgtgtccgaaggtagcgccgaactgctgatggagggggagaggctgcagcccaaaatggttaaaagtttgaaaaaggcaatggcccccgttctgtctgacgtaacagtggagtggatcttccccgagacgaccgaagtgctggtatccccagtttctgcttcctcactcttccccggtgaacgactcgtaggttacggtattgtgtgcgacgcttccctccatataagtaacccgcggtccgataaacgacgacgctattcaatgcttcacagccaggagtcaggctcatcagtgttctaccatagccaggatgatggacctggactagaaggaggcgattgtgccaagaatagtggagctccatttattctgggacaggctaaaaacgctaggctggcttcaggcgatagcacaacaaaacacgacttgaatctctcacagagaagaagagcctactctaccaatcagattaccaatcacaaacccctgccaagagccaccatggcttccgatccaatgcccgcagccaagagatatcccctcagaaaagcgcgcctgcaagatctaactaaccagacatctctagacgtgcagcggtggcaaatcgaccttcaggcttttatctgcctcactagcgaagataccttccaaattagaactccaacaggccagtag

SEQ ID NO: 337077 - DNA, 2389 bp, Artificial Sequence
  derived and/or modified sequence
atcgcaatgtgggcattgatcaagccagctgccagggcagcgggcgcagggcttgggcactggagcccagccccggaccgcacctccagcagtgctgggtgcagaaggcagtcactgtggcagtggagagacagagtgtgtacccagacacgtgttgcttctggggtaaggttctgaaggctgagtagccagcgggatgcccggcttgctgaattggatcacgggggcagccctgcccctcaccgcgtctgatgttacctcctgtgtcagcggttatgccctgggcctaactgcctccctcacctatggcaacctggaagcccagcccttccagggcctcttcgtgtaccccctggatgagtgcaccacggtgatcggctttgaggcagtcattgccgaccgtgtcgtgacagtacagatcaaggacaaagccaagctggagagcggccacttcgatgcctcccatgttcgatccccaacagtcacagggaacattctgcaagacggggtttccatagcccctcattcctgcacaccgggaaaggtgaccttggacgaggatttggagcggatcctgttcgtggccaacctggggaccattgcccccatggagaatgtcaccatcttcatcagcacctcctcggagctcccaacgctgcccagcggggctgtgagggtccttctgcctgctgtctgtgccccaaccgtgccccagttctgcaccaagagcactggcacctccaaccaacaggcccagggcaaagacaggcactgcttcggtgcctgggccccgggctcctggaataagttgtgcctggcgactctcctgaacaccgaagtgtccaaccccatggagtatgagttcaacttccagctggagatccgtgggccatgtctgctcgcaggggtggagagtcccactcatgagattcgtgccgacgccgccccatctgcccgctcggccaagagcatcatcatcaccttggccaacaagcacacctttgaccggcctgtggagatcctcatccaccccagcgagccccatatgccccatgtcctgatagagaaaggggacatgaccctgggagagtttgaccagcacttgaagggaagaacagatttcattaaagggatgaagaagaagagcagagcagagcggaagacagaaatcattcgaaaacgcctccacaaagacattccccaccactccgtcatcatgctcaacttctgtcccgacctccagtcagtccagccgtgcctgagaaaggcccacggggagttcatcttcctcattgacaggagcagcagcatgagcgggatcagcatgcaccgagtcaaggatgccatgttggtggcccttaagagcctcatgccagcctgcctcttcaatatcattgggtttggatccacatttaagagcctttttccttccagccagacctacagtgaggacagcttggccatggcttgtgatgacatccagagaatgaaggccgacatgggtgggaccaacatcctttcccctctcaagtgggtcatcaggcagccagtgcaccgaggccacccgcggctcctcttcgtgatcacagatggcgctgtcaacaacacagggaaggtgctggagctggtgcgaaatcacgccttctccaccaggtgctatagctttggaattggacccaacgtctgccacagactggtgaaaggactggcatctgtgtccgagggcagtgctgagctcctgatggagggggagcggctgcaacccaagatggtcaaatccttgaagaaggccatggccccagtcctgagcgatgtgactgtggagtggatcttccctgagaccactgaggtcctggtctcacccgtcagcgccagctccctcttccctggagaacggctggtggggtatggcattgtatgtgatgcttctttgcacatctccaatcccagatctgacaagaggcgccggtacagcatgctgcactctcaggagtctggcagctctgtcttctaccactctcaggatgacggacccgggctggaaggtggagactgtgccaagaactcgggggcacccttcatcctagggcaggccaaaaatgcccggctagccagcggagactctaccaccaagcacgatctgaacctctctcagcgacggagggcatacagcaccaaccagatcaccaatcacaagcccctcccaagagccaccatggcaagtgaccccatgccagctgccaagagatacccactgcggaaagccaggctgcaggacctcaccaaccagaccagcctggatgtccagcggtggcagattgatttgcaggccttcatctgccttacctccgaggacaccttccaaatcaggacacccaccggtcaataa

SEQ ID NO: 337078 - DNA, 1344 bp, Artificial Sequence
  derived and/or modified sequence
atgccccacgtgctgatcgagaagggcgacatgaccctgggcgagttcgaccagcacctgaagggcagaaccgacttcatcaagggcatgaagaagaagagcagagccgagagaaagaccgagatcatcagaaagagactgcacaaggacatcccccaccacagcgtgatcatgctgaacttctgccccgacctgcagagcgtgcagccctgcctgagaaaggcccacggcgagttcatcttcctgatcgacagaagcagcagcatgagcggcatcagcatgcacagagtgaaggacgccatgctggtggccctgaagagcctgatgcccgcctgcctgttcaacatcatcggcttcggcagcaccttcaagagcctgttccccagcagccagacctacagcgaggacagcctggccatggcctgcgacgacatccagagaatgaaggccgacatgggcggcaccaacatcctgagccccctgaagtgggtgatcagacagcccgtgcacagaggccaccccagactgctgttcgtgatcaccgacggcgccgtgaacaacaccggcaaggtgctggagctggtgagaaaccacgccttcagcaccagatgctacagcttcggcatcggccccaacgtgtgccacagactggtgaagggcctggccagcgtgagcgagggcagcgccgagctgctgatggagggcgagagactgcagcccaagatggtgaagagcctgaagaaggccatggcccccgtgctgagcgacgtgaccgtggagtggatcttccccgagaccaccgaggtgctggtgagccccgtgagcgccagcagcctgttccccggcgagagactggtgggctacggcatcgtgtgcgacgccagcctgcacatcagcaaccccagaagcgacaagagaagaagatacagcatgctgcacagccaggagagcggcagcagcgtgttctaccacagccaggacgacggccccggcctggagggcggcgactgcgccaagaacagcggcgcccccttcatcctgggccaggccaagaacgccagactggccagcggcgacagcaccaccaagcacgacctgaacctgagccagagaagaagagcctacagcaccaaccagatcaccaaccacaagcccctgcccagagccaccatggccagcgaccccatgcccgccgccaagagataccccctgagaaaggccagactgcaggacctgaccaaccagaccagcctggacgtgcagagatggcagatcgacctgcaggccttcatctgcctgaccagcgaggacaccttccagatcagaacccccaccggccagtag

SEQ ID NO: 337079 - DNA, 1344 bp, Artificial Sequence
  derived and/or modified sequence
atgccccacgttctgattgagaaaggggatatgacccttggcgagtttgaccaacatctgaagggcagaacggactttattaaaggtatgaagaagaaaagtcgagccgaaagaaagactgagatcatacggaaaagactgcacaaagatatcccgcaccactctgtcatcatgctgaatttttgtcctgatctgcagagtgtgcagccttgccttcgcaaggcccatggggaattcatctttttgatagatcgctcaagctcaatgtccggcatctccatgcacagagtgaaggacgcaatgctggtggcgcttaaatcgctaatgcccgcctgcttatttaatattatcggattcggctcgacctttaagtccctgttcccatcatctcagacttatagtgaagattctctagccatggcctgtgacgatattcaacggatgaaagccgacatgggcggaacaaacattctgagccccctgaagtgggtgattcgacagccagttcaccgcggtcacccccgactgctgttcgttatcaccgatggtgctgttaacaacaccggcaaggtgctcgaactcgtgcgaaatcacgcctttagcacccgttgctactctttcggcataggaccaaacgtttgccacagactggtgaagggtctagctagtgtgtcggaggggagtgccgagctcctgatggagggtgagaggctacagcctaaaatggtaaagagtctgaaaaaggcaatggcaccagtcctctcagacgttacggtggagtggatatttcccgaaactacggaagtgctggtttctcctgtgagtgcctcgtccctatttcccggagagcggctggtgggctatggtatcgtatgtgatgcgtccctgcatatttcaaatccacgtagcgataagaggagacgatatagcatgctgcacagccaggagagcggcagttctgtgttctatcactcccaggatgacggaccgggtctggaaggcggagattgcgctaagaacagcggcgctccgttcatactgggccaagcaaaaaacgctagacttgcaagtggggactctacaaccaagcacgatctgaacttatctcaaaggcggagagcgtacagtactaatcaaatcaccaaccataagcctctccctagagcgactatggcaagtgatccaatgcctgccgctaagaggtatccgctcagaaaagcccgacttcaggatctaacaaatcagacctcattggatgttcaaagatggcagatcgacctgcaggccttcatctgcctcacatctgaggacacctttcaaatcagaacacctaccggccagtag

SEQ ID NO: 337080 - DNA, 1344 bp, Artificial Sequence
  derived and/or modified sequence
atgcctcatgtgctgattgagaagggggacatgaccctgggggagtttgaccagcacctgaagggccgcacagacttcatcaagggcatgaagaagaagagcagagctgagaggaagacagagatcatcaggaagaggctgcacaaggacatcccccaccacagcgtcatcatgctgaacttctgcccagacctgcagagcgtgcagccctgcctgaggaaggcccacggggagttcatcttcctgattgacaggagcagctccatgagcggcatctccatgcaccgggtgaaggatgccatgctggtggccctgaagagcctgatgcctgcctgcctcttcaacatcattggatttggcagcaccttcaagagcctcttccccagcagccagacctacagcgaggacagcctggccatggcctgtgatgacatccagaggatgaaggctgacatgggcggcaccaacatcctgagccccctgaagtgggtgatccggcagcctgtgcaccggggccacccccggctgctcttcgtcatcacagatggagctgtgaacaacacaggcaaggtgctggagctggtgaggaaccacgccttcagcacccgctgctacagctttggaattggccccaacgtgtgccaccggctggtgaagggcctggcctctgtgtctgagggcagcgctgagctgctgatggagggggagcggctgcagcccaagatggtgaagagcctgaagaaggccatggcccctgtgctgagtgatgtgacagtggagtggatcttccctgagaccacagaggtgctggtgtcccctgtgtctgccagcagcctcttccctggagagcggctggtgggctacggcatcgtgtgtgatgccagcctgcacatcagcaaccccaggagtgacaagagaagacgctacagcatgctgcacagccaggagagcggcagcagcgtcttctaccacagccaggatgatggccctggcctggagggcggggactgtgccaagaacagcggggcccccttcatcctgggccaggccaagaatgcccggctggccagcggggacagcaccaccaagcatgacctgaacctgagccagaggcggcgggcctacagcaccaaccagatcaccaaccacaagcccctgccccgggccaccatggccagtgaccccatgcctgctgccaagcgctaccccctgaggaaggcccggctgcaggacctgaccaaccagaccagcctggatgtgcagcgctggcagattgacctgcaggccttcatctgcctgaccagcgaggacaccttccagatccgcacccccaccggccagtag

SEQ ID NO: 337081 - DNA, 1344 bp, Artificial Sequence
  derived and/or modified sequence
atgccccacgtgctgatcgagaagggcgacatgaccctgggcgagttcgatcagcatctcaaagggcggaccgatttcatcaaaggaatgaagaagaaatcacgtgcagagcgtaaaacagagatcatccggaagcggctccacaaagatattcctcatcatagcgttattatgttaaatttctgtccggacctgcagtctgttcagccgtgtttgcgcaaggcacacggcgagttcatcttccttatagaccgcagttcgagtatgtcaggcataagcatgcatcgtgttaaagatgcaatgttagtggctttgaaaagcctcatgcccgcctgcctctttaatattatcggattcggatccaccttcaaatccctgttcccttcgagccagacctattcagaggactctctcgccatggcatgcgacgatattcagcggatgaaagcggatatgggaggcactaacatcttatcacccctgaaatgggtgatcagacagcccgtgcacaggggacaccctcgtctcctattcgtgatcactgatggcgccgtgaacaataccggtaaggtgctggaactggtacgcaaccatgcgttctccactaggtgttactcattcgggataggtcctaacgtttgccaccgactggtgaagggcctggccagtgtgagtgagggctccgccgaactgttaatggaaggggaacgattgcagcctaagatggtcaaatcactgaagaaagctatggcccccgtactgtcagatgtcactgtggaatggatttttccggaaacaaccgaggtgcttgtgtcacccgttagcgctagcagcctgtttccgggagagcgcctggtgggttacggcattgtatgcgacgctagtctccacatttcgaaccctcgaagtgataagcggcgcagatactccatgctgcacagccaagagtcaggatcttccgtcttttatcattcccaggacgatgggcccgggctcgagggcggggactgcgccaagaattccggggccccttttatcctcgggcaggcaaagaatgcccgactcgcctccggggacagcaccaccaaacatgatctcaacctgtcacagagacgtagagcttattctactaatcaaattaccaatcataaaccgttgccaagggctacaatggcctccgaccctatgccggcagcgaagcggtaccctctgaggaaggccaggctgcaagacctcactaaccagacttctttggatgtgcaaaggtggcagattgatctgcaggccttcatctgcttaacttccgaagacacattccagatccgcacccccaccggccaatag

SEQ ID NO: 337082 - RNA, 1344 nt, Artificial Sequence
  derived and/or modified sequence
augccgcacgugcucauugagaagggggacaugacauugggagaguucgaucagcacuuaaaaggucgcacugauuucaucaagggcaugaagaaaaagucccgggcggagagaaaaacagagaucauucggaaaagguuacauaaagauauuccacaccacucugucauuaugcucaauuucugucccgaccugcagucaguacagccuuguuugagaaaggcacacggggaguucauuuuucugauugaucgguccagcuccaugaguggaaucucuaugcaccgggugaaggacgcuaugcugguggcuuugaaaucuuugaugccugcuugccuguucaacaucaucgguuuuggaagcaccuucaagagucuauucccaucuucacagacauacucugaggacucccuagcaauggcaugcgaugauauccagaggaugaaggcagacaugggaggcacaaacauccuuuccccgcuuaagugggucauacgccagccaguccaccgaggccacccacgcuuguuguucguuaucacugauggagcgguuaauaauaccggcaaggugcuugaauuaguccguaaccacgcauucaguacccgauguuacuccuucgggauuggcccaaauguuugccaccgccuggucaagggacuugccucuguguccgaagguagcgccgaacugcugauggagggggagaggcugcagcccaaaaugguuaaaaguuugaaaaaggcaauggcccccguucugucugacguaacaguggaguggaucuuccccgagacgaccgaagugcugguauccccaguuucugcuuccucacucuuccccggugaacgacucguagguuacgguauugugugcgacgcuucccuccauauaaguaacccuaggagugauaagaggagacgguacaguaugcugcacucucaggaaucuggauccuccguuuucuaucauucacaggaugauggccccgggcucgaagggggugauugcgccaagaauuccggggcaccauucauacugggucaagcuaagaaugcacgguuggcauccggcgauuccaccacgaagcacgaccugaaccugagccagaggcgccgggccuacuccacuaaccagauuacgaaccacaaaccucugccuagagccacuauggcuagugaccccaugccagcugcuaaacgcuacccguugcgcaaggcaagacugcaggaucuaacaaaucagacaucucucgauguacaacgcuggcagauugaccuccaagccuuuauuugcuugacuucagaagacaccuuccagaucagaacaccgaccggacaguag

SEQ ID NO: 337083 - RNA, 1344 nt, Artificial Sequence
  derived and/or modified sequence
augccucacguuuuaaucgaaaaaggagacaugacacugggcgaguucgaucagcaccuaaagggcagaacggauuuuauuaaggguaugaaaaaaaagagucgugcggaacguaaaacugaaaucauacggaaaagauugcauaaggauaucccucaucauucaguuauaaugcuaaacuucuguccugaccuccaauccgugcagcccugucugcgaaaggcacacggcgaauucauuuuccugauagaccgaucgaguucuaugagcggcauuuccaugcaucgggugaaagacgcuauguugguggccuuaaaaagucugaugccugcauguuuauucaauauuauaggguuuggcaguacauucaagagccuguuuccaaguagccagacuuauucagaagacucgcuggcaauggcaugugacgacauucagagaaugaaagcggauaugggagguacuaacaucuuguccccacucaaauggguuauaagacagccgguccaucgaggucaucccagauuauuguucgugauuacugacggcgccgugaacaauacgggcaagguccuggagcucguucggaaccacgcuuuuaguacccgauguuacuccuucgggauuggcccaaauguuugccaccgccuggucaagggacuugccucuguguccgaagguagcgccgaacugcugauggagggggagaggcugcagcccaaaaugguuaaaaguuugaaaaaggcaauggcccccguucugucugacguaacaguggaguggaucuuccccgagacgaccgaagugcugguauccccaguuucugcuuccucacucuuccccggugaacgacucguagguuacgguauugugugcgacgcuucccuccauauaaguaacccgcgguccgauaaacgacgacgcuauucaaugcuucacagccaggagucaggcucaucaguguucuaccauagccaggaugauggaccuggacuagaaggaggcgauugugccaagaauaguggagcuccauuuauucugggacaggcuaaaaacgcuaggcuggcuucaggcgauagcacaacaaaacacgacuugaaucucucacagagaagaagagccuacucuaccaaucagauuaccaaucacaaaccccugccaagagccaccauggcuuccgauccaaugcccgcagccaagagauauccccucagaaaagcgcgccugcaagaucuaacuaaccagacaucucuagacgugcagcgguggcaaaucgaccuucaggcuuuuaucugccucacuagcgaagauaccuuccaaauuagaacuccaacaggccaguag

SEQ ID NO: 337084 - DNA, 132 bp, Artificial Sequence
  derived and/or modified sequence
tgaagccggaacgacgacatctgcatctacggcggcctgggcctgggcgggctgctgttgcttgcagtcgtattattatccgcttgtctctgctggcttcacaggagagaggcggcctccgcccagcagtag

SEQ ID NO: 337085 - DNA, 5421 bp, Artificial Sequence
  derived and/or modified sequence
atggagccctggagcagcagatggaagaccaagagatggctgtgggacttcaccgtgaccaccctggccctgaccttcctgttccaggccagagaggtgagaggcgccgcccccgtggacgtgctgaaggccctggacttccacaacagccccgagggcatcagcaagaccaccggcttctgcaccaacagaaagaacagcaagggcagcgacaccgcctacagagtgagcaagcaggcccagctgagcgcccccaccaagcagctgttccccggcggcaccttccccgaggacttcagcatcctgttcaccgtgaagcccaagaagggcatccagagcttcctgctgagcatctacaacgagcacggcatccagcagatcggcgtggaggtgggcagaagccccgtgttcctgttcgaggaccacaccggcaagcccgcccccgaggactaccccctgttcagaaccgtgaacatcgccgacggcaagtggcacagagtggccatcagcgtggagaagaagaccgtgaccatgatcgtggactgcaagaagaagaccaccaagcccctggacagaagcgagagagccatcgtggacaccaacggcatcaccgtgttcggcaccagaatcctggacgaggaggtgttcgagggcgacatccagcagttcctgatcaccggcgaccccaaggccgcctacgactactgcgagcactacagccccgactgcgacagcagcgcccccaaggccgcccaggcccaggagccccagatcgacgagtacgcccccgaggacatcatcgagtacgactacgagtacggcgaggccgagtacaaggaggccgagagcgtgaccgagggccccaccgtgaccgaggagaccatcgcccagaccgaggccaacatcgtggacgacttccaggagtacaactacggcaccatggagagctaccagaccgaggcccccagacacgtgagcggcaccaacgagcccaaccccgtggaggagatcttcaccgaggagtacctgaccggcgaggactacgacagccagagaaagaacagcgaggacaccctgtacgagaacaaggagatcgacggcagagacagcgacctgctggtggacggcgacctgggcgagtacgacttctacgagtacaaggagtacgaggacaagcccaccagcccccccaacgaggagttcggccccggcgtgcccgccgagaccgacatcaccgagaccagcatcaacggccacggcgcctacggcgagaagggccagaagggcgagcccgccgtggtggagcccggcatgctggtggagggcccccccggccccgccggccccgccggcatcatgggcccccccggcctgcagggccccaccggcccccccggcgaccccggcgacagaggcccccccggcagacccggcctgcccggcgccgacggcctgcccggcccccccggcaccatgctgatgctgcccttcagatacggcggcgacggcagcaagggccccaccatcagcgcccaggaggcccaggcccaggccatcctgcagcaggccagaatcgccctgagaggcccccccggccccatgggcctgaccggcagacccggccccgtgggcggccccggcagcagcggcgccaagggcgagagcggcgaccccggcccccagggccccagaggcgtgcagggcccccccggccccaccggcaagcccggcaagagaggcagacccggcgccgacggcggcagaggcatgcccggcgagcccggcgccaagggcgacagaggcttcgacggcctgcccggcctgcccggcgacaagggccacagaggcgagagaggcccccagggcccccccggcccccccggcgacgacggcatgagaggcgaggacggcgagatcggccccagaggcctgcccggcgaggccggccccagaggcctgctgggccccagaggcacccccggcgcccccggccagcccggcatggccggcgtggacggcccccccggccccaagggcaacatgggcccccagggcgagcccggcccccccggccagcagggcaaccccggcccccagggcctgcccggcccccagggccccatcggcccccccggcgagaagggcccccagggcaagcccggcctggccggcctgcccggcgccgacggcccccccggccaccccggcaaggagggccagagcggcgagaagggcgccctgggcccccccggcccccagggccccatcggctaccccggccccagaggcgtgaagggcgccgacggcgtgagaggcctgaagggcagcaagggcgagaagggcgaggacggcttccccggcttcaagggcgacatgggcctgaagggcgacagaggcgaggtgggccagatcggccccagaggcgaggacggccccgagggccccaagggcagagccggccccaccggcgaccccggccccagcggccaggccggcgagaagggcaagctgggcgtgcccggcctgcccggctaccccggcagacagggccccaagggcagcaccggcttccccggcttccccggcgccaacggcgagaagggcgccagaggcgtggccggcaagcccggccccagaggccagagaggccccaccggccccagaggcagcagaggcgccagaggccccaccggcaagcccggccccaagggcaccagcggcggcgacggcccccccggcccccccggcgagagaggcccccagggcccccagggccccgtgggcttccccggccccaagggcccccccggcccccccggcaaggacggcctgcccggccaccccggccagagaggcgagaccggcttccagggcaagaccggcccccccggccccggcggcgtggtgggcccccagggccccaccggcgagaccggccccatcggcgagagaggccaccccggcccccccggcccccccggcgagcagggcctgcccggcgccgccggcaaggagggcgccaagggcgaccccggcccccagggcatcagcggcaaggacggccccgccggcctgagaggcttccccggcgagagaggcctgcccggcgcccagggcgcccccggcctgaagggcggcgagggcccccagggcccccccggccccgtgggcagccccggcgagagaggcagcgccggcaccgccggccccatcggcctgcccggcagacccggcccccagggcccccccggccccgccggcgagaagggcgcccccggcgagaagggcccccagggccccgccggcagagacggcgtgcagggccccgtgggcctgcccggccccgccggccccgccggcagccccggcgaggacggcgacaagggcgagatcggcgagcccggccagaagggcagcaagggcgacaagggcgagaacggcccccccggcccccccggcctgcagggccccgtgggcgcccccggcatcgccggcggcgacggcgagcccggccccagaggccagcagggcatgttcggccagaagggcgacgagggcgccagaggcttccccggcccccccggccccatcggcctgcagggcctgcccggcccccccggcgagaagggcgagaacggcgacgtgggccccatgggcccccccggcccccccggccccagaggcccccagggccccaacggcgccgacggcccccagggcccccccggcagcgtgggcagcgtgggcggcgtgggcgagaagggcgagcccggcgaggccggcaaccccggcccccccggcgaggccggcgtgggcggccccaagggcgagagaggcgagaagggcgaggccggcccccccggcgccgccggcccccccggcgccaagggcccccccggcgacgacggccccaagggcaaccccggccccgtgggcttccccggcgaccccggcccccccggcgagcccggccccgccggccaggacggcgtgggcggcgacaagggcgaggacggcgaccccggccagcccggcccccccggccccagcggcgaggccggcccccccggcccccccggcaagagaggcccccccggcgccgccggcgccgagggcagacagggcgagaagggcgccaagggcgaggccggcgccgagggcccccccggcaagaccggccccgtgggcccccagggccccgccggcaagcccggccccgagggcctgagaggcatccccggccccgtgggcgagcagggcctgcccggcgccgccggccaggacggcccccccggccccatgggcccccccggcctgcccggcctgaagggcgaccccggcagcaagggcgagaagggccaccccggcctgatcggcctgatcggcccccccggcgagcagggcgagaagggcgacagaggcctgcccggcacccagggcagccccggcgccaagggcgacggcggcatccccggccccgccggccccctgggcccccccggcccccccggcctgcccggcccccagggccccaagggcaacaagggcagcaccggccccgccggccagaagggcgacagcggcctgcccggcccccccggcagccccggcccccccggcgaggtgatccagcccctgcccatcctgagcagcaagaagaccagaagacacaccgagggcatgcaggccgacgccgacgacaacatcctggactacagcgacggcatggaggagatcttcggcagcctgaacagcctgaagcaggacatcgagcacatgaagttccccatgggcacccagaccaaccccgccagaacctgcaaggacctgcagctgagccaccccgacttccccgacggcgagtactggatcgaccccaaccagggctgcagcggcgacagcttcaaggtgtactgcaacttcaccagcggcggcgagacctgcatctaccccgacaagaagagcgagggcgtgagaatcagcagctggcccaaggagaagcccggcagctggttcagcgagttcaagagaggcaagctgctgagctacctggacgtggagggcaacagcatcaacatggtgcagatgaccttcctgaagctgctgaccgccagcgccagacagaacttcacctaccactgccaccagagcgccgcctggtacgacgtgagcagcggcagctacgacaaggccctgagattcctgggcagcaacgacgaggagatgagctacgacaacaaccccttcatcaagaccctgtacgacggctgcgccagcagaaagggctacgagaagaccgtgatcgagatcaacacccccaagatcgaccaggtgcccatcgtggacgtgatgatcaacgacttcggcgaccagaaccagaagttcggcttcgaggtgggccccgtgtgcttcctgggctag

SEQ ID NO: 337086 - DNA, 7253 bp, Artificial Sequence
  derived and/or modified sequence
acacagtactctcagcttgttggtggaagcccctcatctgccttcattctgaaggcagggcccggcagaggaaggatcagagggtcgcggccggagggtcccggccggtggggccaactcagagggagaggaaagggctagagacacgaagaacgcaaaccatcaaatttagaagaaaaagccctttgactttttccccctctccctccccaatggctgtgtagcaaacatccctggcgataccttggaaaggacgaagttggtctgcagtcgcaatttcgtgggttgagttcacagttgtgagtgcggggctcggagatggagccgtggtcctctaggtggaaaacgaaacggtggctctgggatttcaccgtaacaaccctcgcattgaccttcctcttccaagctagagaggtcagaggagctgctccagttgatgtactaaaagcactagattttcacaattctccagagggaatatcaaaaacaacgggattttgcacaaacagaaagaattctaaaggctcagatactgcttacagagtttcaaagcaagcacaactcagtgccccaacaaaacagttatttccaggtggaactttcccagaagacttttcaatactatttacagtaaaaccaaaaaaaggaattcagtctttccttttatctatatataatgagcatggtattcagcaaattggtgttgaggttgggagatcacctgtttttctgtttgaagaccacactggaaaacctgccccagaagactatcccctcttcagaactgttaacatcgctgacgggaagtggcatcgggtagcaatcagcgtggagaagaaaactgtgacaatgattgttgattgtaagaagaaaaccacgaaaccacttgatagaagtgagagagcaattgttgataccaatggaatcacggtttttggaacaaggattttggatgaagaagtttttgagggggacattcagcagtttttgatcacaggtgatcccaaggcagcatatgactactgtgagcattatagtccagactgtgactcttcagcacccaaggctgctcaagctcaggaacctcagatagatgagtatgcaccagaggatataatcgaatatgactatgagtatggggaagcagagtataaagaggctgaaagtgtaacagagggacccactgtaactgaggagacaatagcacagacggaggcaaacatcgttgatgattttcaagaatacaactatggaacaatggaaagttaccagacagaagctcctaggcatgtttctgggacaaatgagccaaatccagttgaagaaatatttactgaagaatatctaacgggagaggattatgattcccagaggaaaaattctgaggatacactatatgaaaacaaagaaatagacggcagggattctgatcttctggtagatggagatttaggcgaatatgatttttatgaatataaagaatatgaagataaaccaacaagcccccctaatgaagaatttggtccaggtgtaccagcagaaactgatattacagaaacaagcataaatggccatggtgcatatggagagaaaggacagaaaggagaaccagcagtggttgagcctggtatgcttgtcgaaggaccaccaggaccagcaggacctgcaggtattatgggtcctccaggtctacaaggccccactggaccccctggtgaccctggcgataggggccccccaggacgtcctggcttaccaggggctgatggtctacctggtcctcctggtactatgttgatgttaccgttccgttatggtggtgatggttccaaaggaccaaccatctctgctcaggaagctcaggctcaagctattcttcagcaggctcggattgctctgagaggcccacctggcccaatgggtctaactggaagaccaggtcctgtgggggggcctggttcatctggggccaaaggtgagagtggtgatccaggtcctcagggccctcgaggcgtccagggtccccctggtccaacgggaaaacctggaaaaaggggtcgtccaggtgcagatggaggaagaggaatgccaggagaacctggggcaaagggagatcgagggtttgatggacttccgggtctgccaggtgacaaaggtcacaggggtgaacgaggtcctcaaggtcctccaggtcctcctggtgatgatggaatgaggggagaagatggagaaattggaccaagaggtcttccaggtgaagctggcccacgaggtttgctgggtccaaggggaactccaggagctccagggcagcctggtatggcaggtgtagatggccccccaggaccaaaagggaacatgggtccccaaggggagcctgggcctccaggtcaacaagggaatccaggacctcagggtcttcctggtccacaaggtccaattggtcctcctggtgaaaaaggaccacaaggaaaaccaggacttgctggacttcctggtgctgatgggcctcctggtcatcctgggaaagaaggccagtctggagaaaagggggctctgggtccccctggtccacaaggtcctattggatacccgggcccccggggagtaaagggagcagatggtgtcagaggtctcaagggatctaaaggtgaaaagggagaagttggtcaaattggcccaagaggggaagatggccctgaaggacccaaaggtcgagcaggcccaactggagacccaggtccttcaggtcaagcaggagaaaagggaaaacttggagttccaggattaccaggatatccaggaagacaaggtccaaaggatttcagatgtcattggttccactggattccctgggtttccaggtgccaatggagagaaaggtgcacggggagtagctggcaaaccaggccctcggggtcagcgtggtccaacgggtcctcgaggttcaagaggtgcaagaggtcccactgggaaacctgggccaaagggcacttcaggtggcgatggccctcctggccctccaggtgaaagaggtcctcaaggacctcagggtccagttggattccctggaccaaaaggccctcctggaccacctgggaaggatgggctgccaggacaccctgggcaacgtggggagactggatttcaaggcaagaccggccctcctgggccagggggagtggttggaccacagggaccaaccggtgagactggtccaataggggaacgtgggcatcctggccctcctggccctcctggtgagcaaggtcttcctggtgctgcaggaaaagaaggtgcaaagggtgatccaggtcctcaaggtatctcagggaaagatggaccagcaggattacgtggtttcccaggggaaagaggtcttcctggagctcagggtgcacctggactgaaaggaggggaaggtccccagggcccaccaggtccagttggctcaccaggagaacgtgggtcagcaggtacagctggcccaattggtttaccagggcgcccgggacctcagggtcctcctggtccagctggagagaaaggtgctcctggagaaaaaggtccccaagggcctgcagggagagatggagttcaaggtcctgttggtctcccagggccagctggtcctgccggctcccctggggaagacggagacaagggtgaaattggtgagccgggacaaaaaggcagcaagggtgacaagggagaaaatggccctcccggtcccccaggtcttcaaggaccagttggtgcccctggaattgctggaggtgatggtgaaccaggtcctagaggacagcaggggatgtttgggcaaaaaggtgatgagggtgccagaggcttccctggacctcctggtccaataggtcttcagggtctgccaggcccacctggtgaaaaaggtgaaaatggggatgttggtcccatggggccacctggtcctccaggcccaagaggccctcaaggtcccaatggagctgatggaccacaaggacccccagggtctgttggttcagttggtggtgttggagaaaagggtgaacctggagaagcagggaacccagggcctcctggggaagcaggtgtaggcggtcccaaaggagaaagaggagagaaaggggaagctggtccacctggagctgctggacctccaggtgccaaggggccaccaggtgatgatggccctaagggtaacccgggtcctgttggttttcctggagatcctggtcctcctggggaacctggccctgcaggtcaagatggtgttggtggtgacaagggtgaagatggagatcctggtcaaccgggtcctcctggcccatctggtgaggctggcccaccaggtcctcctggaaaacgaggtcctcctggagctgcaggtgcagagggaagacaaggtgaaaaaggtgctaagggggaagcaggtgcagaaggtcctcctggaaaaaccggcccagtcggtcctcagggacctgcaggaaagcctggtccagaaggtcttcggggcatccctggtcctgtgggagaacaaggtctccctggagctgcaggccaagatggaccacctggtcctatgggacctcctggcttacctggtctcaaaggtgaccctggctccaagggtgaaaagggacatcctggtttaattggcctgattggtcctccaggagaacaaggggaaaaaggtgaccgagggctccctggaactcaaggatctccaggagcaaaaggggatgggggaattcctggtcctgctggtcccttaggtccacctggtcctccaggtttaccaggtcctcaaggcccaaagggtaacaaaggctctactggacccgctggccagaaaggtgacagtggtcttccagggcctcctgggtctccaggtccacctggtgaagtcattcagcctttaccaatcttgtcctccaaaaaaacgagaagacatactgaaggcatgcaagcagatgcagatgataatattcttgattactcggatggaatggaagaaatatttggttccctcaattccctgaaacaagacattgagcatatgaaatttccaatgggtactcagaccaatccagcccgaacttgtaaagacctgcaactcagccatcctgacttcccagatggtgaatattggattgatcctaaccaaggttgctcaggagattccttcaaagtttactgtaatttcacatctggtggtgagacttgcatttatccagacaaaaaatctgagggagtaagaatttcatcatggccaaaggagaaaccaggaagttggtttagtgaatttaagaggggaaaactgctttcatacttagatgttgaaggaaattccatcaatatggtgcaaatgacattcctgaaacttctgactgcctctgctcggcaaaatttcacctaccactgtcatcagtcagcagcctggtatgatgtgtcatcaggaagttatgacaaagcacttcgcttcctgggatcaaatgatgaggagatgtcctatgacaataatccttttatcaaaacactgtatgatggttgtgcgtccagaaaaggctatgaaaagactgtcattgaaatcaatacaccaaaaattgatcaagtacctattgttgatgtcatgatcaatgactttggtgatcagaatcagaagttcggatttgaagttggtcctgtttgttttcttggctaagattaagacaaagaacatatcaaatcaacagaaaatataccttggtgccaccaacccattttgtgccacatgcaagttttgaataaggatggtatagaaaacaacgctgcatatacaggtaccatttaggaaataccgatgcctttgtgggggcagaatcacatggcaaaagctttgaaaatcataaagatataagttggtgtggctaagatggaaacagggctgattcttgattcccaattctcaactctccttttcctatttgaatttctttggtgctgtagaaaacaaaaaaagaaaaatatatattcataaaaaatatggtgctcattctcatccatccaggatgtactaaaacagtgtgtttaataaattgtaattattttgtgtacagttctatactgttatctgtgtccatttccaaaacttgcacgtgtccctgaattccatctgactctaattttatgagaattgcagaactctgatggcaataaatatatgtattatgaaaaaataaagttgtaatttctgatgactctaagtccctttctttggttaataataaaatgcctttgtatatattgatgttgaagagttcaattatttgatgtcgccaacaaaattctcagagggcaaaaatctggaagacttttggaagcacactctgatcaactcttctctgccgacagtcattttgctgaatttcagccaaaaatattatgcattttgatgctttattcaaggctatacctcaaactttttcttctcagaatccaggatttcacaggatacttgtatatatggaaaacaagcaagtttatatttttggacagggaaatgtgtgtaagaaagtatattaacaaatcaatgcctccgtcaagcaaacaatcatatgtatactttttttctacgttatctcatctccttgttttcagtgtgcttcaataatgcaggttaatattaaagatggaaattaagcaattatttatgaatttgtgcaatgttagattttcttatcaatcaagttcttgaatttgattctaagttgcatattataacagtctcgaaaattattttacttgcccaacaaatattacttttttcctttcaagataattttataaatcatttgacctacctaattgctaaatgaataacatatggtggactgttattaagagtatttgttttaagtcattcaggaaaatctaaacttttttttccactaaggtatttactttaaggtagcttgaaatagcaatacaatttaaaaattaaaaactgaattttgtatctattttaagtaatatatgtaagacttgaaaataaatgttttatttcttatataaagtgttaaattaattgataccagatttcactggaacagtttcaactgataatttatgacaaaagaacatacctgtaatattgaaattaaaaagtgaaatttgtcataaagaatttcttttatttttgaaatcgagtttgtaaatgtccttttaagaagggagatatgaatccaataaataaactcaagtcttggctacctgga

SEQ ID NO: 337087 - DNA, 7286 bp, Artificial Sequence
  derived and/or modified sequence
gtactctcagcttgttggtggaagcccctcatctgccttcattctgaaggcagggcccggcagaggaaggatcagagggtcgcggccggagggtcccggccggtggggccaactcagagggagaggaaagggctagagacacgaagaacgcaaaccatcaaatttagaagaaaaagccctttgactttttccccctctccctccccaatggctgtgtagcaaacatccctggcgataccttggaaaggacgaagttggtctgcagtcgcaatttcgtgggttgagttcacagttgtgagtgcggggctcggagatggagccgtggtcctctaggtggaaaacgaaacggtggctctgggatttcaccgtaacaaccctcgcattgaccttcctcttccaagctagagaggtcagaggagctgctccagttgatgtactaaaagcactagattttcacaattctccagagggaatatcaaaaacaacgggattttgcacaaacagaaagaattctaaaggctcagatactgcttacagagtttcaaagcaagcacaactcagtgccccaacaaaacagttatttccaggtggaactttcccagaagacttttcaatactatttacagtaaaaccaaaaaaaggaattcagtctttccttttatctatatataatgagcatggtattcagcaaattggtgttgaggttgggagatcacctgtttttctgtttgaagaccacactggaaaacctgccccagaagactatcccctcttcagaactgttaacatcgctgacgggaagtggcatcgggtagcaatcagcgtggagaagaaaactgtgacaatgattgttgattgtaagaagaaaaccacgaaaccacttgatagaagtgagagagcaattgttgataccaatggaatcacggtttttggaacaaggattttggatgaagaagtttttgagggggacattcagcagtttttgatcacaggtgatcccaaggcagcatatgactactgtgagcattatagtccagactgtgactcttcagcacccaaggctgctcaagctcaggaacctcagatagatgagtatgcaccagaggatataatcgaatatgactatgagtatggggaagcagagtataaagaggctgaaagtgtaacagagggacccactgtaactgaggagacaatagcacagacggaggcaaacatcgttgatgattttcaagaatacaactatggaacaatggaaagttaccagacagaagctcctaggcatgtttctgggacaaatgagccaaatccagttgaagaaatatttactgaagaatatctaacgggagaggattatgattcccagaggaaaaattctgaggatacactatatgaaaacaaagaaatagacggcagggattctgatcttctggtagatggagatttaggcgaatatgatttttatgaatataaagaatatgaagataaaccaacaagcccccctaatgaagaatttggtccaggtgtaccagcagaaactgatattacagaaacaagcataaatggccatggtgcatatggagagaaaggacagaaaggagaaccagcagtggttgagcctggtatgcttgtcgaaggaccaccaggaccagcaggacctgcaggtattatgggtcctccaggtctacaaggccccactggaccccctggtgaccctggcgataggggccccccaggacgtcctggcttaccaggggctgatggtctacctggtcctcctggtactatgttgatgttaccgttccgttatggtggtgatggttccaaaggaccaaccatctctgctcaggaagctcaggctcaagctattcttcagcaggctcggattgctctgagaggcccacctggcccaatgggtctaactggaagaccaggtcctgtgggggggcctggttcatctggggccaaaggtgagagtggtgatccaggtcctcagggccctcgaggcgtccagggtccccctggtccaacgggaaaacctggaaaaaggggtcgtccaggtgcagatggaggaagaggaatgccaggagaacctggggcaaagggagatcgagggtttgatggacttccgggtctgccaggtgacaaaggtcacaggggtgaacgaggtcctcaaggtcctccaggtcctcctggtgatgatggaatgaggggagaagatggagaaattggaccaagaggtcttccaggtgaagctggcccacgaggtttgctgggtccaaggggaactccaggagctccagggcagcctggtatggcaggtgtagatggccccccaggaccaaaagggaacatgggtccccaaggggagcctgggcctccaggtcaacaagggaatccaggacctcagggtcttcctggtccacaaggtccaattggtcctcctggtgaaaaaggaccacaaggaaaaccaggacttgctggacttcctggtgctgatgggcctcctggtcatcctgggaaagaaggccagtctggagaaaagggggctctgggtccccctggtccacaaggtcctattggatacccgggcccccggggagtaaagggagcagatggtgtcagaggtctcaagggatctaaaggtgaaaagggtgaagatggttttccaggattcaaaggtgacatgggtctaaaaggtgacagaggagaagttggtcaaattggcccaagaggggaagatggccctgaaggacccaaaggtcgagcaggcccaactggagacccaggtccttcaggtcaagcaggagaaaagggaaaacttggagttccaggattaccaggatatccaggaagacaaggtccaaagggttccactggattccctgggtttccaggtgccaatggagagaaaggtgcacggggagtagctggcaaaccaggccctcggggtcagcgtggtccaacgggtcctcgaggttcaagaggtgcaagaggtcccactgggaaacctgggccaaagggcacttcaggtggcgatggccctcctggccctccaggtgaaagaggtcctcaaggacctcagggtccagttggattccctggaccaaaaggccctcctggaccacctgggaaggatgggctgccaggacaccctgggcaacgtggggagactggatttcaaggcaagaccggccctcctgggccagggggagtggttggaccacagggaccaaccggtgagactggtccaataggggaacgtgggcatcctggccctcctggccctcctggtgagcaaggtcttcctggtgctgcaggaaaagaaggtgcaaagggtgatccaggtcctcaaggtatctcagggaaagatggaccagcaggattacgtggtttcccaggggaaagaggtcttcctggagctcagggtgcacctggactgaaaggaggggaaggtccccagggcccaccaggtccagttggctcaccaggagaacgtgggtcagcaggtacagctggcccaattggtttaccagggcgcccgggacctcagggtcctcctggtccagctggagagaaaggtgctcctggagaaaaaggtccccaagggcctgcagggagagatggagttcaaggtcctgttggtctcccagggccagctggtcctgccggctcccctggggaagacggagacaagggtgaaattggtgagccgggacaaaaaggcagcaagggtgacaagggagaaaatggccctcccggtcccccaggtcttcaaggaccagttggtgcccctggaattgctggaggtgatggtgaaccaggtcctagaggacagcaggggatgtttgggcaaaaaggtgatgagggtgccagaggcttccctggacctcctggtccaataggtcttcagggtctgccaggcccacctggtgaaaaaggtgaaaatggggatgttggtcccatggggccacctggtcctccaggcccaagaggccctcaaggtcccaatggagctgatggaccacaaggacccccagggtctgttggttcagttggtggtgttggagaaaagggtgaacctggagaagcagggaacccagggcctcctggggaagcaggtgtaggcggtcccaaaggagaaagaggagagaaaggggaagctggtccacctggagctgctggacctccaggtgccaaggggccaccaggtgatgatggccctaagggtaacccgggtcctgttggttttcctggagatcctggtcctcctggggaacctggccctgcaggtcaagatggtgttggtggtgacaagggtgaagatggagatcctggtcaaccgggtcctcctggcccatctggtgaggctggcccaccaggtcctcctggaaaacgaggtcctcctggagctgcaggtgcagagggaagacaaggtgaaaaaggtgctaagggggaagcaggtgcagaaggtcctcctggaaaaaccggcccagtcggtcctcagggacctgcaggaaagcctggtccagaaggtcttcggggcatccctggtcctgtgggagaacaaggtctccctggagctgcaggccaagatggaccacctggtcctatgggacctcctggcttacctggtctcaaaggtgaccctggctccaagggtgaaaagggacatcctggtttaattggcctgattggtcctccaggagaacaaggggaaaaaggtgaccgagggctccctggaactcaaggatctccaggagcaaaaggggatgggggaattcctggtcctgctggtcccttaggtccacctggtcctccaggtttaccaggtcctcaaggcccaaagggtaacaaaggctctactggacccgctggccagaaaggtgacagtggtcttccagggcctcctgggtctccaggtccacctggtgaagtcattcagcctttaccaatcttgtcctccaaaaaaacgagaagacatactgaaggcatgcaagcagatgcagatgataatattcttgattactcggatggaatggaagaaatatttggttccctcaattccctgaaacaagacattgagcatatgaaatttccaatgggtactcagaccaatccagcccgaacttgtaaagacctgcaactcagccatcctgacttcccagatggtgaatattggattgatcctaaccaaggttgctcaggagattccttcaaagtttactgtaatttcacatctggtggtgagacttgcatttatccagacaaaaaatctgagggagtaagaatttcatcatggccaaaggagaaaccaggaagttggtttagtgaatttaagaggggaaaactgctttcatacttagatgttgaaggaaattccatcaatatggtgcaaatgacattcctgaaacttctgactgcctctgctcggcaaaatttcacctaccactgtcatcagtcagcagcctggtatgatgtgtcatcaggaagttatgacaaagcacttcgcttcctgggatcaaatgatgaggagatgtcctatgacaataatccttttatcaaaacactgtatgatggttgtgcgtccagaaaaggctatgaaaagactgtcattgaaatcaatacaccaaaaattgatcaagtacctattgttgatgtcatgatcaatgactttggtgatcagaatcagaagttcggatttgaagttggtcctgtttgttttcttggctaagattaagacaaagaacatatcaaatcaacagaaaatataccttggtgccaccaacccattttgtgccacatgcaagttttgaataaggatggtatagaaaacaacgctgcatatacaggtaccatttaggaaataccgatgcctttgtgggggcagaatcacatggcaaaagctttgaaaatcataaagatataagttggtgtggctaagatggaaacagggctgattcttgattcccaattctcaactctccttttcctatttgaatttctttggtgctgtagaaaacaaaaaaagaaaaatatatattcataaaaaatatggtgctcattctcatccatccaggatgtactaaaacagtgtgtttaataaattgtaattattttgtgtacagttctatactgttatctgtgtccatttccaaaacttgcacgtgtccctgaattccatctgactctaattttatgagaattgcagaactctgatggcaataaatatatgtattatgaaaaaataaagttgtaatttctgatgactctaagtccctttctttggttaataataaaatgcctttgtatatattgatgttgaagagttcaattatttgatgtcgccaacaaaattctcagagggcaaaaatctggaagacttttggaagcacactctgatcaactcttctctgccgacagtcattttgctgaatttcagccaaaaatattatgcattttgatgctttattcaaggctatacctcaaactttttcttctcagaatccaggatttcacaggatacttgtatatatggaaaacaagcaagtttatatttttggacagggaaatgtgtgtaagaaagtatattaacaaatcaatgcctccgtcaagcaaacaatcatatgtatactttttttctacgttatctcatctccttgttttcagtgtgcttcaataatgcaggttaatattaaagatggaaattaagcaattatttatgaatttgtgcaatgttagattttcttatcaatcaagttcttgaatttgattctaagttgcatattataacagtctcgaaaattattttacttgcccaacaaatattacttttttcctttcaagataattttataaatcatttgacctacctaattgctaaatgaataacatatggtggactgttattaagagtatttgttttaagtcattcaggaaaatctaaacttttttttccactaaggtatttactttaaggtagcttgaaatagcaatacaatttaaaaattaaaaactgaattttgtatctattttaagtaatatatgtaagacttgaaaataaatgttttatttcttatataaagtgttaaattaattgataccagatttcactggaacagtttcaactgataatttatgacaaaagaacatacctgtaatattgaaattaaaaagtgaaatttgtcataaagaatttcttttatttttgaaatcgagtttgtaaatgtccttttaagaagggagatatgaatccaataaataaactcaagtcttggctacctgga

SEQ ID NO: 337088 - DNA, 5421 bp, Artificial Sequence
  derived and/or modified sequence
atggagccatggagcagcaggtggaaaaccaaaagatggttatgggacttcactgttacaaccctggccttgacattcctgtttcaggccagggaggtcagaggagccgcacccgttgacgtgctaaaggccctcgacttccataatagtcccgaagggatatccaagacaaccgggttctgtacgaatcggaaaaattcaaaggggagcgatactgcgtatcgggtctccaaacaggcccagctgagcgctcccacaaaacagctgttcccaggcggcactttccccgaggactttagcatacttttcaccgtcaagcctaagaagggaatccagagcttcttgctgagtatatataatgagcacgggattcagcagattggagtggaagtgggtcgatctcccgtcttcctcttcgaagaccacactggaaaaccggcacctgaggactacccgctgttcaggaccgtgaatatcgccgatggcaagtggcaccgggttgccatctcagtggagaagaagaccgtcacgatgatcgtggattgcaagaaaaagacaacaaagccactcgacagaagtgaaagggctatagtggacacaaacggcataactgtttttggaacacgtatcctggacgaagaggtgttcgagggggacattcagcagttcttgattactggggatcccaaggccgcctatgactactgcgaacactactcacccgattgcgactcctccgcgcccaaggccgcacaggcacaggaacctcagattgatgaatacgcaccagaggacatcatcgaatacgattatgaatacggagaagcagagtacaaagaggccgagtccgtcacagaaggaccaacagtgacagaagaaacaattgcccaaacagaggctaacattgtggacgattttcaggagtataactacggaacgatggagtcttaccagactgaagccccgaggcacgtgagcggaacgaacgagccaaaccctgtggaggagattttcacagaagagtatctcacaggtgaggattacgatagccagcgcaagaacagtgaggacactttgtacgagaataaggaaattgatggtcgtgattccgaccttctggtggacggtgatcttggggagtatgacttctacgagtataaggagtacgaagataagcccaccagtccacccaatgaggagttcggacctggggtacccgctgaaacagatatcaccgagacttctattaacggtcatggcgcctatggggaaaagggacagaagggtgagcccgctgtggtggagcctggcatgttagtggaaggcccacccggacccgctggtccagcgggcattatgggccctcccgggctccagggccccactggacccccaggtgaccccggcgatcggggccctcctgggaggcctggccttccaggtgctgatggcttacccggccctccagggacgatgcttatgctgcccttcaggtacggaggcgacggaagtaagggtccaactataagcgcgcaagaagcccaggcccaggccattctccagcaagctcgaattgctctgcgtgggccgccagggcccatgggcctgactgggcggcccgggcccgtgggggggcctggatcatccggagccaagggtgaatccggagatcctggaccccagggacccagaggagtgcagggaccacctggtccgaccgggaaaccaggcaagagagggcgtccgggcgcagacggaggtcgcgggatgcctggggagcctggtgctaaaggcgaccggggatttgatgggttgccgggcttgccaggcgacaaagggcacaggggtgagaggggcccacagggcccgccaggacctcccggggacgatgggatgagaggcgaggacggcgagatcggtccccgcggcttgcccggcgaggctgggccacgaggcctgctgggaccacggggcacgcctggagcccccggacagcccggtatggccggggtcgacggtcctcccggccctaaaggtaacatgggcccccagggtgagccaggacccccagggcagcaaggcaatccagggccgcaagggctccccggccctcagggcccgataggccccccaggggagaaggggcctcagggtaagcctggactcgctggattgcccggagccgatgggcctccaggccaccccggaaaagagggtcagtccggagagaaaggcgctctgggcccaccgggaccgcagggcccaataggttaccctgggccacgcggggtgaagggcgccgacggagtccgtggcctgaaaggatcaaagggggaaaagggggaggacgggttccctggctttaagggggatatgggtcttaagggtgacagaggggaagttggacagatcgggcctcgcggcgaagatggtcctgagggccctaagggccgagccgggcctactggtgatccagggccctccggccaggccggagaaaaagggaaactgggtgtgccaggtctgcccggttatcctgggaggcaggggcccaaggggtcaactggattccctggctttcctggcgctaatggggaaaaaggggcgcggggagtggcaggcaaacccggccctcggggccaaagagggccgactgggcccaggggtagtcgcggggccaggggcccaaccgggaagcccggcccgaaggggacctcagggggcgatggccctccaggtccacctggtgaacgcggtccacaaggaccacagggcccagtagggtttccgggtcctaaaggcccccctggccctcctggaaaggatggactgcctgggcacccgggccagcgcggagagacagggttccaggggaaaaccggtccgccaggccccggcggagtggtcggcccacaagggcccaccggggagaccggacccatcggcgagcggggacatccaggtcctcccggaccccctggagaacaaggacttcctggcgccgccggcaaggaaggcgctaaaggagatccaggaccgcaagggatctcggggaaagacggcccagctgggttgcgaggcttccccggagaacgcggtctcccaggcgcacagggcgcgccaggcctgaagggtggcgaaggacctcaggggccccccggcccagtcgggtccccaggggagaggggtagcgcagggacggctggccccataggcttgccggggcggccaggaccgcaaggtcctccgggccccgccggcgagaaaggcgcccctggagagaaaggcccccaaggccccgccggcagggatggcgtgcagggtcccgttgggctgcctggtccagccggccccgctggctcccctggagaggatggtgacaagggggaaattggcgaacctggtcaaaagggttccaagggcgataaaggggaaaatggaccaccagggcctcctggactccagggcccggtcggcgcacccggtattgcggggggagatggagaaccaggccccagaggacaacagggtatgttcggacagaagggggacgagggcgctagagggttcccgggacctccaggcccaatcggacttcagggattgccagggcctcccggcgagaaaggcgaaaacggtgatgtggggcccatgggcccgccggggcccccagggccaaggggcccacagggtcctaatggagcagacgggcctcagggcccgcccggcagcgtaggtagtgtaggaggggtgggcgagaaaggcgagcccggtgaggccggaaaccccggccctcctggagaggctggggttgggggccctaagggagagagaggggagaagggggaagccggaccccccggagccgccgggccaccaggagcgaaaggcccaccgggtgatgatggtcctaagggtaatccaggaccagttgggttccccggagaccccggcccacctggtgagcctggtcctgccgggcaggacggcgtaggcggcgacaagggggaagacggggatccaggacagcccggtcctcctggccccagtggtgaggctggcccaccaggcccacccgggaagcgtggcccgcccggcgcagctggggctgaaggtagacagggggagaaaggcgcaaagggggaggctggggcggagggtccacccggcaaaaccgggccagtcggaccacaagggcccgcgggaaagcccgggcctgagggtttgagaggcatccccggcccagtaggcgaacagggtctcccaggcgcggcgggccaggatgggcctccgggaccaatgggacccccaggcttaccggggttgaagggggaccctggcagcaagggagaaaagggccatccgggcctgatcggattaatcgggcccccgggagagcagggcgagaagggagacaggggactcccgggaactcagggctcaccaggcgccaaaggtgacggcgggatccctggccctgcaggacccttaggtccccccggccctccgggtttacccggccctcaaggcccaaaaggaaataaaggcagtactggaccagcaggccagaagggtgacagtggcctaccggggcccccaggatctcccggtccccctggggaagtcattcagcccctgcccattttgagctctaagaagacaagacgacacactgagggaatgcaggctgatgccgacgataacatccttgattattctgatgggatggaagaaatctttggcagccttaatagcttaaagcaggacatcgagcatatgaaattccctatggggactcagacaaatcctgctcgaacttgcaaggacctgcagctgagccatcccgatttccctgacggggagtattggatcgacccaaatcagggatgctctggcgacagttttaaggtgtactgtaactttactagcgggggcgagacgtgtatttatcccgataaaaagtctgagggcgttcggatcagctcttggcctaaagagaaacctgggagctggttctccgagttcaaacgcggcaaactcctgagctacttagacgtggagggtaactctataaatatggtccagatgacattcttaaagctgctgaccgcttctgcccgccagaacttcacgtatcactgtcatcagtctgccgcttggtacgacgtctcctctggttcatatgacaaggccctgaggtttctagggtcgaatgatgaggaaatgagctacgataacaacccttttataaaaaccttatacgacggatgtgcctcccggaaagggtatgagaaaaccgtcatcgaaatcaacacccctaaaatcgatcaagtcccgatcgttgatgttatgatcaatgatttcggcgatcaaaatcaaaaatttggttttgaagtcggaccagtatgtttcctgggttag

SEQ ID NO: 337089 - DNA, 5421 bp, Artificial Sequence
  derived and/or modified sequence
atggagccctggagcagccgctggaagaccaagcgctggctgtgggacttcaccgtgaccaccctggccctgaccttcctgttccaggcccgggaggtgcggggggccgcccctgtggatgtgctgaaggccctggacttccacaacagccctgagggcatcagcaagaccaccggcttctgcaccaacaggaagaacagcaagggcagtgacacagcctacagagtgtccaagcaggcccagctgagcgcccccaccaagcagctgtttcctgggggcaccttccctgaggacttcagcatcctcttcaccgtgaagcccaagaagggcatccagagcttcctgctgagcatctacaatgagcacggcatccagcagattggagtggaggtgggccgcagccctgtgttcctgtttgaggaccacacaggcaagccagcccctgaggactaccccctcttcagaacagtgaacattgctgatggcaagtggcaccgggtggccatctctgtggagaagaagacagtgaccatgattgtggactgcaagaagaagaccaccaagcccctggacagaagtgagcgggccatcgtggacaccaacggcatcaccgtgtttggcacccgcatcctggatgaggaggtgtttgaaggagacatccagcagttcctgatcaccggggaccccaaggccgcctatgactactgtgagcactacagcccagactgtgacagcagcgcccccaaggccgcccaggcccaggagccccagattgatgaatatgcccctgaggacatcattgaatatgactatgaatatggagaggccgagtacaaggaggccgagagcgtgacagagggccccaccgtgacagaggagaccatcgcccagacagaggccaacatcgtggatgacttccaggagtacaactacggcaccatggagagctaccagacagaggcccccaggcatgtgtctggcaccaatgagcccaaccctgtggaggagatcttcacagaggagtacctgaccggggaggactatgacagccagaggaagaacagcgaggacaccctgtatgagaacaaggagattgatggccgggacagcgacctgctggtggatggagacctgggggagtatgacttctatgagtacaaggagtatgaggacaagcccaccagccccccaaatgaggagtttggacctggggtgcctgctgagacagacatcacagagaccagcatcaatggacatggagcctacggggagaagggccagaagggggagcctgctgtggtggagcccggcatgctggtggagggccccccaggccctgctggccctgctggcatcatgggccccccaggcctgcagggccccaccggccccccaggggaccccggggaccggggccccccaggccggcccggcctgcccggggctgatggcctgcccggccccccaggcaccatgctgatgctgcccttccgctatggaggagatggcagcaagggccccaccatcagcgcccaggaggcccaggcccaggccatcctgcagcaggccagaattgccctgcggggccccccaggccccatgggcctgaccggccggcccggccctgtgggcggccctggcagcagcggggccaagggggagagcggggaccccggcccccagggcccccggggcgtgcagggccccccaggccccaccgggaagccaggcaagaggggccggcctggagcagatggcggccggggcatgcctggagagcccggggccaagggggaccggggctttgatggcctgcccggcctgcccggggacaagggccacagaggagagcggggcccccagggccccccaggccccccaggagatgatggcatgagaggagaagatggagaaattggcccccggggcctgcctggagaggccggcccccggggcctgctgggcccccggggcacccctggggcccctggccagcccggcatggccggcgtggatggccccccaggccccaagggcaacatgggcccccagggcgagcccggccccccaggccagcagggcaaccctggcccccagggcctgcccggcccccagggccccatcggccccccaggagagaagggcccccagggcaagccaggcctggccggcctgcccggggctgatggccccccaggccaccctgggaaggagggccagagcggggagaagggggccctgggccccccaggcccccagggccccatcggctacccaggcccccggggcgtgaagggagcagatggagtgcggggcctgaagggcagcaaaggagagaagggggaggatggcttccctggcttcaagggggacatgggcctgaagggggacagaggagaggtgggccagatcggccccagaggagaagatggccctgagggccccaagggccgggccggccccaccggggaccccggccccagcggccaggccggggagaagggcaagctgggcgtgcccggcctgcccggctacccaggccggcagggccccaagggcagcacaggcttccctggcttccctggggccaacggggagaagggggcccggggcgtggccggcaagccaggcccccggggccagaggggccccaccggcccccggggcagcagaggagcccggggccccaccgggaagccaggccccaagggcaccagcggaggagatggccccccaggccccccaggagagcggggcccccagggcccccagggccctgtgggcttccctggccccaagggccccccaggccccccaggcaaggatggcctgcccggccaccctggccagagaggagagaccggcttccagggcaagacaggccccccaggccctggaggagtggtgggcccccagggccccactggagagaccggccccatcggggagcggggccaccctggccccccaggccccccaggagagcagggcctgcctggagctgctgggaaggagggcgccaagggggaccccggcccccagggcatcagcggcaaggatggccctgctggcctgcggggcttccctggagagcggggcctgcccggggcccagggcgcccctggcctgaagggcggggagggcccccagggccccccaggccctgtgggcagccctggagagcggggcagcgctggaacagctggccccatcggcctgcccggccggcccggcccccagggccccccaggccctgctggggagaagggggcccctggagagaagggcccccagggccctgctggaagagatggagtgcagggccctgtgggcctgcccggccctgctggccctgctggcagccctggagaagatggagacaagggggagattggagagcccggccagaagggcagcaagggggacaagggagaaaatggccccccaggccccccaggcctgcagggccctgtgggcgcccctggcattgctggaggagatggagagcccggcccccggggccagcagggcatgtttggccagaagggagatgagggcgcccggggcttccctggccccccaggccccatcggcctgcagggcctgcccggccccccaggagagaagggagaaaatggagatgtgggccccatgggccccccaggccccccaggcccccggggcccccagggccccaatggagcagatggcccccagggccccccaggctctgtgggctctgtgggcggcgtgggggagaagggggagcctggagaggccggcaaccctggccccccaggagaggccggcgtgggcggccccaagggggagcggggggagaagggggaggccggccccccaggagctgctggccccccaggggccaagggccccccaggagatgatggccccaagggcaaccctggccctgtgggcttccctggggaccccggccccccaggagagcccggccctgctggccaggatggagtgggcggggacaagggagaagatggagaccccggccagcccggccccccaggccccagcggggaggccggccccccaggccccccaggcaagaggggccccccaggagctgctggagctgagggccggcagggcgagaagggggccaagggggaggccggggctgagggccccccaggcaagacaggccctgtgggcccccagggccctgctgggaagccaggccctgagggcctgcggggcatccctggccctgtgggggagcagggcctgcccggggctgctggccaggacggccccccaggccccatgggccccccaggcctgcccggcctgaagggggaccccggcagcaaaggagagaagggccaccctggcctcatcggcctgattggccccccaggagagcagggcgagaagggggaccggggcctgcccggcacccagggcagccctggggccaagggagatggcggcatccctggccctgctggccccctgggccccccaggccccccaggcctgcccggcccccagggccccaagggcaacaagggcagcacaggccctgctggccagaagggggacagcggcctgcccggccccccaggcagccctggccccccaggagaggtgatccagcccctgcccatcctgagcagcaagaagaccaggaggcacacagagggcatgcaggctgatgctgatgacaacatcctggactacagtgatggcatggaggagatcttcggcagcctgaacagcctgaagcaggacatcgagcacatgaagttccccatgggcacccagaccaacccagcccggacctgcaaggacctgcagctgagccacccagacttcccagatggagagtactggattgaccccaaccagggctgcagcggggacagcttcaaggtgtactgcaacttcaccagcggcggggagacctgcatctacccagacaagaagtcagaaggagtgcgcatcagctcctggcccaaggagaagccaggctcctggttcagcgagttcaagaggggcaagctgctgagctacctggatgtggagggcaacagcatcaacatggtgcagatgaccttcctgaagctgctgacagccagcgcccggcagaacttcacctaccactgccaccagagcgctgcctggtatgatgtgagcagcggcagctatgacaaggccctgcgcttcctgggcagcaatgatgaggagatgtcctatgacaacaaccccttcatcaagaccctgtatgatggctgtgccagcaggaagggctatgagaagacagtcatcgagatcaacacccccaagattgaccaggtgcccatcgtggatgtgatgatcaatgactttggagaccagaaccagaagtttggatttgaggtgggccctgtgtgcttcctgggctag

SEQ ID NO: 337090 - DNA, 5421 bp, Artificial Sequence
  derived and/or modified sequence
atggagccctggagcagccggtggaagaccaagcggtggctgtgggacttcaccgtgaccactctcgctctaacattcctttttcaagcacgggaggtgcgcggagcagcccctgtggatgttctcaaggctttggactttcataacagtcctgaagggataagcaagaccacaggattttgtaccaaccggaagaattccaaggggtcagatactgcctaccgtgtgtccaaacaggcacagctcagcgctccgaccaagcagctgttccctggcggcaccttcccggaagacttctcaatcctgtttaccgtgaagcccaaaaagggtatccagtcttttctcctgagcatctacaacgagcatggaattcagcagattggcgttgaggtgggccgtagcccggtctttctgttcgaagaccacacaggcaaacctgccccggaagattatcctttgttcagaactgttaatatagcagatggcaaatggcacagagtagcaatttcagtggagaagaaaaccgtcactatgatcgttgattgcaaaaagaagacgacaaaacctctggaccgcagcgagcgcgcaattgtggataccaatgggattacagtctttggcacccgcatcctggacgaggaagtgtttgagggagacatacagcaattcctcatcactggagatcctaaggctgcctacgattactgtgaacactattcccccgattgcgacagttctgcccctaaagccgctcaagcacaggaacctcagatcgacgaatacgcccccgaagatattattgagtatgactatgaatacggggaggctgagtacaaagaggcggaaagcgtgacagaaggccctacggtgaccgaagaaaccatcgcccagaccgaggccaacatagtcgatgactttcaggagtacaattatggaactatggaatcctatcagactgaggccccgaggcacgtttccgggaccaatgagcctaacccggtggaagagatcttcaccgaggagtacctgacaggagaggactatgactctcagcggaaaaacagcgaggataccctgtacgaaaacaaggaaattgatgggagagattcagatctgctggtcgacggggacctaggagagtacgatttctatgaatataaagagtacgaggacaagccgaccagccccccgaacgaagagtttggccccggtgtccctgccgagactgacataactgagacctcaataaacgggcatggagcctacggggagaaaggacagaaaggagagccagccgttgtggaacccggcatgttggtggaaggcccccccgggcccgccgggcccgcagggattatggggccacctggcctgcagggaccaactggacctcccggagatccaggcgaccggggcccacccggaaggcctggactgcctggagccgatggactgcctggtccacctggtaccatgctcatgctccccttccggtacggaggtgacggttcaaagggtcccacaatctcagcccaggaggcccaagcccaggctattctgcaacaggcaaggatcgctctaagaggacctcccggaccaatggggctcaccggccggcccggcccagtgggcggaccaggaagctctggagctaaaggtgagtccggagaccctggccctcagggcccccgtggggtgcagggacccccaggccctaccggtaaacctgggaagaggggacgcccaggcgcagacggcggccgcggcatgcctggcgaaccaggtgcgaaaggcgatagggggtttgacggacttcccggattgccaggcgataaaggtcacaggggggagagaggccctcagggcccaccagggccacctggggacgatgggatgcgtggggaggatggagagatcggtcccagaggcttacctggcgaagctggtcctcgagggctgctggggccacgaggcacacccggtgctccagggcagccgggcatggccggcgtggacggaccacccggccctaaggggaacatgggcccgcagggggaacctggtccgccaggccagcagggcaatcctggtcctcagggactgcccggcccacagggccccatcgggccaccaggagagaagggaccacaggggaagccaggccttgccggtttgcctggagccgatgggccgccaggccaccccggcaaggagggacagagcggcgaaaagggcgcactggggccccccggtccccaaggacctattggttacccggggccacggggcgttaagggggccgatggggtgaggggattgaaggggtctaagggcgagaagggggaggacggcttccccggcttcaagggagatatgggacttaagggcgataggggcgaggtaggccagatcggacccagaggagaggacgggccagaaggacccaagggcagagcaggacccaccggggaccctggacctagcggacaggcgggtgaaaagggaaagctgggagtccccggactaccggggtacccagggcggcaggggcccaaagggtccacaggtttccccggcttccccggggcaaacggcgaaaagggcgcccggggcgtcgccggcaaaccgggaccccggggccagcgtggacctacaggcccccgcgggtctagaggggctcgcggaccgaccggcaagcccggacctaagggcacaagcggaggcgatggccccccagggccaccaggtgaacgtggaccccaagggcctcagggtcctgtgggcttccccggccctaaaggtcctcctggcccgccgggaaaggatgggctgccaggccaccccggacagaggggggagacggggttccagggtaagactggcccacccggtcccggaggagtggtcggcccacaagggcctacaggcgaaaccggacctataggggaaaggggccacccaggcccaccaggccctcccggggagcaggggctgcccggagctgctggcaaggaaggagcaaagggggatccagggccccaaggaataagcgggaaagacgggccagccggactgagaggatttccgggtgagcgtggcctgccaggggcacagggcgccccagggcttaaggggggcgagggcccccaggggcctcccggccccgtgggcagccccggcgagagagggtctgcaggcacagccggcccgatcggcttaccggggcgcccaggccctcagggccctcccggcccggccggagagaagggcgcccctggcgagaagggcccacaaggacctgctgggcgggatggggtgcaagggcctgtgggactgccaggaccagctggaccggccggatctcctggagaagatggagacaagggagaaattggcgaacctggtcagaagggctctaaaggtgacaaaggggagaacggcccgcctggcccacccggtcttcaagggcctgtgggcgcacctggaattgccggaggcgacggggagccaggccctagggggcaacagggaatgttcggccagaaaggggacgaaggggcaagaggcttcccggggccaccaggtccaataggcttgcaaggcctgcctggaccccccggcgagaaaggtgagaatggcgatgtgggacccatggggccacctggcccgcctggtccccgagggcctcagggtcccaatggggccgacgggccgcaggggcctccgggaagcgtgggcagtgtcggcggggtaggagaaaaaggcgaacctggtgaagctggaaacccaggcccaccaggtgaggccggagtgggcggccctaaaggagagagaggagaaaagggagaagcggggccaccaggggctgccggaccgccgggggctaaggggccccctggagacgacggcccgaaaggcaacccggggcccgttggatttccaggcgatccaggcccacccggtgaaccaggccccgccggtcaagacggagtggggggggataagggggaagacggtgatcccgggcagcccggccctcccggcccttccggcgaggcaggtcctcctggaccacccggcaaaagaggccctcccggggccgccggcgccgagggtaggcagggggagaaaggcgccaagggcgaggccggtgccgagggccccccaggcaagaccgggccagtgggaccccaaggccccgcaggtaaacccggcccagaaggactgagaggcattcctggaccagtcggggagcaaggattgcctggggccgctggccaggacggccctcctgggcctatgggccctcccgggttacccggcctgaagggtgacccggggtcaaaaggagaaaaaggacacccaggactcattgggcttatcggaccaccaggcgagcagggggaaaagggcgacagggggttgccaggcactcaggggagccccggcgctaagggtgacgggggaatacctggaccggctggccccttaggtcctcccggtcctccaggactccccggaccgcagggccctaaggggaataaaggttcaacagggcctgcagggcaaaagggagactcgggccttcccggacccccaggctcaccaggtccacctggagaggtgatccagcccctgcctatcctttcttccaagaagacacggaggcatactgagggcatgcaagccgatgccgacgacaacatcctggactacagcgacggtatggaggaaatatttggttccttgaacagccttaagcaggatatcgagcatatgaaatttccaatgggtacccagacaaacccagcgcggacgtgcaaggacctgcaactgtcacaccctgatttcccggacggtgagtattggatcgatcctaaccagggttgcagtggagactcctttaaagtctattgcaacttcacaagtggaggtgagacctgtatttatcctgacaagaagagcgagggtgtgcgcatttcttcatggcctaaggaaaaacctggctcctggttttcagaatttaaacgaggtaagctgttgtcttatctcgatgttgaagggaactcaattaatatggtgcagatgacatttcttaagctgctgaccgctagtgcccgtcaaaatttcacgtaccactgtcaccaaagcgctgcgtggtatgatgtgtcttcaggcagctacgacaaagcgttgagatttctgggaagcaacgacgaggagatgtcatacgacaacaatccattcatcaagacactgtatgacgggtgcgcaagtagaaaagggtacgagaagaccgtgatcgaaattaacactcctaaaatagatcaggtgcccattgtagacgtcatgatcaacgacttcggggaccagaaccaaaaattcggattcgaagtagggccagtctgttttcttggttag

SEQ ID NO: 337091 - DNA, 5421 bp, Artificial Sequence
  derived and/or modified sequence
atggagccatggagcagtaggtggaagacgaagcgctggctctgggacttcactgtcacaaccctggcactgacatttctgtttcaggcacgagaggttcggggagctgccccagttgatgtgctgaaagctctggattttcacaattcacctgaaggtattagtaaaacgacagggttttgtacaaaccggaagaacagcaagggctcagatacagcttaccgagtctctaaacaagcccagctgtccgctcccaccaagcagttatttccaggaggtactttccctgaggattttagcattctcttcaccgtgaagcctaagaaagggatccaatcttttttactgtctatttacaacgagcacggcattcaacaaattggagtcgaggttggcagaagccccgtgttcctcttcgaggaccacaccgggaagcctgctccagaggactaccctcttttccggaccgtgaatattgctgatggcaaatggcatagagtagcaatctccgtcgaaaaaaaaaccgtaacaatgatcgttgattgcaaaaaaaagacaacgaaacctttggatcgtagcgaaagggcgattgtggacaccaacggtatcactgtgtttggcacacggattttggacgaagaggtctttgaaggagacattcagcaattcctgatcacgggagaccctaaggcagcgtacgattactgtgaacactactcgcccgattgcgattctagcgctcctaaggccgcacaagctcaggaacctcagattgacgaatatgcccctgaagatatcattgaatacgactatgaatatggggaagctgaatacaaggaagccgagtccgtgaccgaaggtccaacagttactgaagagacgattgcacagacagaagccaatatcgtggatgattttcaggagtacaattacggaaccatggaatcctaccagacagaggcaccacggcatgtctctgggaccaacgagcctaatcccgtggaagagatcttcacagaggaatacctgacgggggaggactatgatagccagcggaaaaactcagaggacactctgtacgaaaataaggagatcgacggacgggatagcgatctgttagtggatggggatctcggggaatacgacttttatgagtataaagagtatgaagataagcccaccagccctccgaacgaagaattcggccctggggtgcccgctgagaccgatattactgagacatccatcaatggacacggcgcttacggggaaaaggggcagaagggagaaccagctgtggtggagcccggaatgcttgtggaaggtccccctggccctgccggtccggcaggaataatgggccctcctggcctccagggacccaccggccctcctggtgaccccggagacagaggaccacccggacgtcccggactgccaggggctgatgggctgcctggacctcccggtaccatgctgatgttgcccttcaggtacggaggggacggctcaaagggcccaacgatctcggcccaggaggcccaagcccaggctatcctccagcaggcaagaatcgctctcaggggaccacctggtcccatgggacttacagggcgtccaggccctgttggaggcccaggatcatccggtgccaagggcgaaagcggggatcccggtcctcagggcccaagaggcgtacaggggccaccgggaccaacgggcaagcccggaaagcggggtcggccaggagccgacgggggtcgcggaatgccgggagagcccggagcaaagggggatcggggattcgatggcctgccagggctgcctggcgacaagggccacagaggagagcgaggccctcagggaccccctggtcccccaggagacgatggcatgcgcggtgaagatggcgagatcggccctaggggcctgcccggagaggccggtcctcgcggtctgctgggcccacggggaaccccaggggcacctggtcagcccggaatggccggtgttgatggacccccaggacctaaaggaaacatggggccacagggggaaccaggccctccaggccagcaaggtaatcccggaccgcagggcctacctgggcctcaagggcctataggcccacccggtgagaaaggcccacagggaaagcccggtctcgctggactgccaggggctgacggaccacctgggcatccgggtaaggaaggacagtcgggggaaaagggagcactagggccaccagggcctcagggtccgatcggttacccaggccctaggggggtgaagggcgcagatggcgtaaggggcctcaagggcagcaagggagagaagggcgaggacggattccccggatttaagggtgacatgggcttgaagggagatagaggtgaggtggggcagattggccctaggggcgaagacggaccagaggggccaaagggtcgggctggaccaaccggtgaccctggaccatctggccaggccggagaaaaggggaaactcggagtacccggtcttccaggctaccctggcaggcaaggcccaaaaggcagtaccgggtttccagggtttccaggcgcaaacggggaaaaaggagctcgaggcgttgcaggtaagcccggtccgagaggacagcggggacctaccgggccaagaggcagcagaggagcccgtggaccgacgggaaaaccaggcccaaaaggcacaagtgggggagatgggcctccagggccacctggagagcggggaccgcagggcccacagggtccagtcgggttccctgggccaaaaggacctcctggccctcctggcaaagacggactacctggccaccctggtcagagaggagagacaggctttcaaggcaaaacaggcccacctgggccaggcggtgtagtcggcccacaaggtccaaccggcgagaccggacctataggggagaggggccacccgggacccccaggccctcccggagaacagggactgcctggcgctgccggaaaggagggagcaaaaggggacccgggacctcaggggatatctggcaaggatggcccagccggtctgcgtggctttcccggagagcggggtctgcctggcgctcagggtgcacccggactgaagggtggtgaaggaccccaggggcctcccggacccgtaggatcacccggagagcggggatctgccggaacggccggtcccattggattgcctgggagacctgggcctcagggccctccaggtcccgctggcgaaaaaggcgctccaggcgaaaaaggtccacagggcccagccggtcgggatggcgtccagggaccggtgggcctgcccggaccggcaggcccagcaggctctcccggagaagatggggacaaaggcgagatcggtgagcccggacaaaaagggagcaaaggtgacaaaggtgaaaatgggccacctggacctcccggactgcaaggaccagttggagcacccggaattgctgggggagacggagaacctgggcctcgaggccagcagggtatgtttgggcagaagggtgatgagggggcacgcggtttccctgggccacccggacctatcggcctccagggtttgcctggccctcccggtgagaagggcgagaatggcgacgttgggcctatgggccctcccggacccccaggaccaagaggtccacaggggccaaacggcgcagatggaccacaagggcctcccggatccgttggctctgtgggcggagttggcgaaaaaggcgaacccggtgaagcaggcaatcctgggccacccggagaggcaggagtgggaggcccaaaaggtgagcgaggcgaaaagggggaagccggacctccaggcgcagcgggaccgcctggcgcaaaggggccaccaggggacgacggacccaagggaaacccaggcccagtcggctttcccggagatccaggccctcccggtgagccgggacctgcagggcaggatggcgtcggcggagacaaaggcgaagatggagatcctggccagcccggacctccaggaccctctggcgaggccggtcctcctggccctcccggaaaaagaggaccacccggagcggctggagccgaaggccgtcaaggagaaaagggcgcaaaaggcgaggctggagccgagggacctccagggaagactggccctgtcggccctcaggggccagctggtaaacctggccctgagggcttgaggggcattcctgggccagtgggtgagcaaggtctgcctggggctgcaggccaagatggacctccagggccaatgggccctccgggactgcctggtctcaagggagatcccggaagcaagggagagaaggggcaccccggtttgattggactgattgggcctccaggagagcagggcgaaaagggagacagaggactgcctggcacacaagggagccctggcgcaaagggcgatggaggtattcccggaccagcagggcctttaggacccccaggccctcccggactgccgggacctcagggccctaagggcaataagggatctaccggaccagccggacagaagggcgactcggggcttccgggtcccccaggtagcccgggaccccctggcgaggtgatacagccactgcccatactaagctcgaaaaagacccgtagacacacagaaggcatgcaggccgatgccgacgataacattctggactattccgacggaatggaagaaatcttcggctcacttaactctctgaagcaggatatcgaacatatgaagtttcccatggggacacagactaaccccgctagaacctgcaaggacctgcagttgagtcaccctgatttccctgacggagagtattggattgaccccaaccagggttgttccggagactcattcaaggtgtactgcaacttcacctccgggggagagacctgcatttatcccgataagaaatcagagggggtccggatatcctcttggcccaaggaaaagcccggtagctggttttctgaatttaaaagggggaagctcttgagttatctggatgtggagggcaactccattaacatggtccagatgacattcctgaaactcttgacggcctcagccagacagaattttacctaccactgtcaccagtcagccgcttggtacgacgtcagttctggtagctacgataaagccctgagattcctgggtagcaatgacgaagaaatgagttacgataataatccctttattaaaactctttatgatgggtgcgcttctaggaagggttacgagaaaacggtgatcgagatcaacacccccaagatcgaccaagtccctatagttgacgtgatgattaacgacttcggagatcagaatcaaaaatttggtttcgaggtcggacctgtttgtttcttaggatac

SEQ ID NO: 337092 - DNA, 5421 bp, Artificial Sequence
  derived and/or modified sequence
atggaaccttggtcaagccggtggaagacaaagcgctggctatgggactttactgttacgaccctcgccctgacatttttattccaagccagagaggtcagaggggccgcgcctgttgacgttctcaaggcactggatttccataactcaccagagggaatcagcaagaccactggattttgcacaaatagaaaaaactccaaaggatccgacaccgcttatcgagttagcaaacaggctcagctaagcgcccctaccaagcagcttttcccaggcgggacgtttcctgaggatttcagtattctatttactgtgaaacccaagaagggtatccagtcttttctcctgtccatatataatgagcacggcatacagcagattggcgtcgaggtcggacgctcacccgtctttctgtttgaggatcacacaggtaagcccgcaccagaggattaccccctgttcagaactgttaacatagccgatggcaagtggcatagggtggcaatttctgtggagaaaaaaacagtcaccatgatcgtggactgcaagaaaaagacaactaagccactggacaggtccgaaagggctatagtcgacacgaatggaattacggtgttcggtacaaggatcttggacgaagaggtgttcgagggcgacattcagcagtttctgatcaccggtgaccccaaggccgcctacgattactgtgagcattactctcccgattgcgactcatccgctcccaaagccgcccaggcccaggagccacaaattgacgaatatgctcccgaagatattattgagtacgactatgagtatggagaagccgaatataaggaagcagaaagcgttacagaaggccctaccgtcaccgaagagaccatcgcacagaccgaagccaatatcgtcgacgactttcaggagtataattacggaaccatggagagttatcagaccgaagcacctcggcatgtgtccggcacaaatgaaccgaaccctgtcgaagaaatttttacagaggaatatctcacgggggaagattatgattctcagaggaagaacagcgaggataccctctacgagaacaaagaaattgatggacgcgattccgacctgttagtggatggcgacttaggcgagtatgacttttacgagtataaggaatacgaggacaagccgactagtccacccaacgaggagttcggacctggggtgccggccgagactgatatcacagaaacttctataaatgggcacggcgcatatggggagaaagggcagaaaggggagcccgcggtcgtggagcctggcatgttagtcgagggcccacctggacccgctgggcccgctggaatcatgggccctccaggcctccagggcccaacagggccacctggcgaccccggcgatagaggacccccaggacggcctggcctcccaggtgcagatggtctccccggcccacccgggacaatgctaatgctgccctttcggtacggtggcgatggtagcaagggtcccacaatctcggctcaggaggctcaggctcaggccatacttcaacaagcgcgaatcgctctccgcggacccccaggccccatgggacttacaggaagaccaggccctgtcggcgggcccggcagcagtggtgcaaaaggcgagtcaggcgatcccgggccacaagggccccgcggcgtccaggggcccccagggcctactggcaaacccggtaaacgaggacgacccggcgctgacggcggcaggggcatgcctggggagccaggagccaaaggcgatagaggcttcgacggattacccggtttacctggggacaaaggacaccggggagagcgcggcccacaaggacccccaggacctccaggagacgatggcatgcggggagaagatggcgaaataggaccaagagggctccccggcgaggccggccctagaggacttcttgggcccaggggaacccccggggctcctggacagcctggaatggcaggagtggatggccccccagggccaaagggtaacatgggaccacagggtgagcccggccccccaggtcagcaggggaaccctggcccgcaaggactgccagggcctcagggcccaatcggtcctcccggcgagaagggcccgcagggtaagccaggcctcgctgggttgccaggcgccgatggccctccaggtcatccgggaaaagaaggtcagagcggcgagaagggcgctttgggaccacccggacctcaaggaccaatcgggtatcctggtccccggggggtaaagggagctgacggcgtaagaggtctgaagggcagtaaaggcgaaaagggcgaggatggcttccctggattcaagggcgatatggggctgaaaggagaccgaggtgaagtgggccagattgggccccggggggaggatggacctgagggaccaaaagggcgggccggaccgacgggggaccccgggccatctgggcaggctggagaaaaaggtaagctgggggttcccggactgcccggctacccaggtaggcagggtcctaagggatctacggggttccctggattccctggcgccaatggcgaaaagggggcccggggcgtggccggaaagcccggaccccggggacaacggggcccaactggacccaggggtagccggggcgcccgcggcccaacaggtaagccaggaccgaaagggacgagcggcggcgacggtccccccggaccccctggagagaggggtccacaaggacctcaggggccagtcggctttcccggcccaaagggcccacccggccccccaggaaaagacggacttcccggacatcccggccaacggggtgagaccgggtttcagggaaaaaccggacctcccgggcctggtggtgttgttggcccccagggaccaaccggcgagacgggaccaatcggtgaacgtggccaccctggacctcctggacccccaggcgaacagggtctaccaggggctgctggaaaagaaggagccaaaggcgaccccggaccacaaggcatctccggcaaggacgggccagctggattgagaggctttccaggggagcgcggactcccgggggctcagggcgctccaggactgaagggaggggagggccctcaaggaccgccaggcccggtgggctcccccggagagagaggctccgccgggactgctggccccatcgggctgcctggccgacccgggcctcagggtccccctggccctgctggggagaaaggagctccaggtgagaaaggtccccagggccctgcaggccgggacggggttcagggccctgtgggattacctggacctgctggccccgctggctccccgggcgaagacggggacaagggagagataggagaacccggacagaagggttctaaaggcgacaaaggcgagaatggcccaccgggaccccccggcctacagggccctgttggcgctccaggaattgctgggggagatggcgagcccggcccacgtggccagcagggcatgttcggccaaaagggcgacgagggtgccaggggattccccggaccaccaggccccattggccttcagggcctaccaggaccccccggagaaaaaggagaaaatggcgatgttggtccgatgggcccccctggccctcccggtccacgtggtccacagggcccaaacggcgccgacgggcctcagggccctccgggctccgtggggagtgtagggggcgttggggagaagggcgagcctggggaggcaggaaatcctggccctccaggagaagctggagttggcggaccaaaaggtgagagaggtgagaagggcgaagccgggccacccggggctgctgggcctccaggggctaagggcccaccaggcgacgacggtccaaaaggcaaccctggaccagttggctttccaggcgaccccgggcccccaggagaaccgggcccggctgggcaagacggcgtgggcggcgataagggagaggatggcgatcccggacagcccggccccccaggccctagcggagaagcagggccacccggacctcctggaaaaaggggaccaccaggagcagccggcgcagaaggcaggcagggggaaaagggcgccaagggtgaggcgggcgctgagggccctcctggaaaaacaggccccgtgggacctcaaggccctgcaggcaaaccaggtcctgagggcttgcgcgggatccccgggcctgtcggcgaacagggcctcccaggcgccgccggacaggacggcccgccgggtcccatgggtccgcccggactgccaggtcttaagggcgatcccggatccaagggagaaaaaggtcaccctgggctgatcggcctcatcggcccgcctggagaacagggcgagaaaggcgacagggggctcccaggcacacagggcagccctggcgctaaaggtgacggcggtataccgggacccgctggacccctcggaccccccggcccacccggtctgcccgggcctcaagggcctaaaggcaacaagggaagtacgggtccagcaggccagaagggagattctggacttcccggcccgcccggatctcccgggccgcctggcgaagtgattcagccgttgcccattctgtcctctaagaagacaaggaggcatactgagggcatgcaggctgatgctgatgataatattctggattactccgacggtatggaagaaatcttcgggtcgcttaactcgttaaagcaggatatcgagcacatgaaattcccgatgggcacacagacaaaccctgcccgtacctgtaaagatctacaattgagccaccccgactttccagacggcgagtactggatcgatccaaatcaggggtgctccggcgatagtttcaaggtgtactgtaatttcacctcaggaggcgaaacatgtatttaccctgacaaaaagagtgagggggtcaggatctcatcatggcccaaggagaaacccggatcctggttcagcgaatttaagaggggcaaacttctctcctatttagatgtcgaaggcaactctattaacatggtgcagatgacctttctcaaactgctgactgcatcggccagacagaacttcacttatcactgtcaccaatctgccgcgtggtatgacgtgtcctcgggtagttacgataaagcactgcgattccttgggagcaacgacgaggagatgtcatatgacaataatcccttcataaagactctttatgatggatgcgcctccagaaagggatacgagaaaactgtaatagagattaacaccccgaaaatcgaccaggtgccaatcgtggatgtgatgatcaatgacttcggagaccagaaccagaagtttgggtttgaagtgggcccagtgtgcttccttggctag

SEQ ID NO: 337093 - DNA, 5421 bp, Artificial Sequence
  derived and/or modified sequence
atggagccctggtcctctcgatggaaaacaaagagatggctctgggattttacagtgacgacgttggcccttactttcttattccaggctcgagaagtcagaggtgccgctccagtagacgttcttaaagcgctcgatttccacaactcccctgagggcattagcaagacaacgggcttctgcaccaaccgcaagaattccaaagggtccgacaccgcttaccgagtctcaaaacaagcccagctgagcgctcctaccaaacaactcttcccagggggcacgtttccggaggatttctcaattctgttcacagttaaacccaagaaaggcatacagtccttcctgctgagcatttacaatgaacacggtattcaacagatcggagttgaagtgggaagatctcctgtgtttctgttcgaggaccacaccggaaaacctgcacccgaggactaccccctctttaggactgttaatatcgccgatggcaaatggcacagggtagctatcagcgtggaaaagaagaccgttactatgatcgttgattgcaaaaagaaaaccacgaagcccctcgataggagcgagagagccatagtcgacacgaacggaattaccgtctttggcaccagaatcctagacgaagaggtgtttgagggtgacatccagcagtttctcattacaggggatccaaaggccgcatatgactactgtgaacactacagcccagattgtgactcttcagcccccaaagcggcccaggcccaggaaccgcaaatcgatgaatacgcgccggaggatattatcgaatatgattatgagtatggagaggccgagtacaaagaagccgagagcgtcaccgaaggtccaactgtcaccgaagaaactattgcacagacagaggccaatattgtggacgactttcaggagtataattacggaacgatggagtcgtatcagacggaagcaccacgacacgtttccggaaccaatgaaccaaatcccgtagaagaaatctttactgaagaatatctgaccggagaagactatgattcacagcgcaagaactccgaagacacattatatgagaataaagagatcgacggccgcgattctgatcttttagtggacggcgacctgggagaatatgacttctacgagtataaggagtacgaggacaagccgacatcacccccaaacgaagaattcggaccaggcgtacctgcagaaaccgatattacggagacatcaatcaatggccatggtgcttatggagaaaagggccaaaagggggagcccgctgtagttgaacctggtatgctggtggaggggcctcctggaccagccggaccagccggcatcatgggccctccaggcttgcaaggccccacaggacctcccggcgaccccggagaccgtggacctcccggccggccaggacttccgggtgctgatgggctcccaggtccacccgggactatgcttatgttgccatttagatatggaggagacggctcaaagggcccaactatctctgctcaggaagcccaggcacaggccattctacagcaggcaagaattgccctaaggggtcctcctggcccaatggggctgacaggacggcccggccccgtgggcggacccggcagttccggcgccaagggggaaagcggagacccagggccacagggaccgcggggagttcaggggccaccaggaccaaccggaaagccagggaagcggggtagaccaggggcggatggaggaagggggatgcctggagaacccggggcgaagggcgatcgcggcttcgacggattacccggtttacctggggacaaaggacaccggggagagcgcggcccacaaggacccccaggacctccaggagacgatggcatgcggggagaagatggcgaaataggaccaagagggctccccggcgaggccggccctagaggacttcttgggcccaggggaacccccggggctcctggacagcctggaatggcaggagtggatggccccccagggccaaagggtaacatgggaccacagggtgagcccggccccccaggtcagcaggggaaccctggcccgcaaggactgcctggcccacagggcccaatcgggcccccaggggaaaaaggtccacagggcaagccagggcttgccggattacctggcgcggacgggcccccgggacacccaggaaaagaaggacagagtggagagaaaggcgcgttgggcccacctggcccacagggccccatcgggtatcccggcccccgaggtgttaaaggggccgatggtgtgagaggacttaagggtagtaaaggagaaaagggcgaagatggtttccctggatttaaaggcgacatggggctgaagggtgatcggggggaggtcgggcaaataggcccgcggggtgaggatgggccagagggaccaaaggggcgagcagggcccaccggagacccgggaccatctggacaggcaggggagaagggcaagttgggagtacccggcctcccaggttatccaggacgacagggaccaaaggggagcaccggctttcctggctttccaggagccaatggcgaaaagggggccagaggtgtcgcgggtaagccaggccccagaggccagcggggtccaacaggccctagggggtccagaggcgcaagaggaccgacggggaagcccggcccgaaggggacaagtggaggcgacgggcccccaggtccccccggagagcgcgggccccaaggaccacagggccctgtcggctttcctggccccaagggaccacccggccccccgggaaaagacggcctccccggccaccccggtcagcgaggagaaacgggattccaggggaagacaggaccgcctggtcccggtggtgtcgtcggccctcaggggcccactggagaaactggaccgatcggagagcgtggccacccggggccccccggcccacccggagagcaggggctgccaggtgcggctggaaaagaaggtgctaagggagacccaggtccacaagggatttcagggaaggacggaccagctgggctccgtggcttcccaggagaaaggggtcttccaggggctcagggcgctccaggcctaaaggggggcgaaggaccgcagggaccccccggaccagtcgggtcgcctggtgaacgcggttccgccggtacagctggcccgataggcctgccaggaagaccaggcccccagggcccacccgggccagccggcgagaagggtgcccccggggaaaagggacctcagggacccgcaggcagagatggagtgcaggggcctgtcggactgcccggacccgccggcccagccgggtcacccggtgaagacggagataagggcgaaattggagagccaggccaaaagggtagcaagggagataagggagaaaacgggccgccggggcctccagggctgcaggggccagtaggtgcacccggtattgctgggggagatggggaacccggacctcggggacagcagggtatgtttggacaaaagggtgatgagggcgcccgcggcttcccagggccaccgggtccaatcgggttgcaaggactccctggaccaccgggagaaaagggggaaaacggtgatgtaggccccatgggaccgccagggccccctggaccaagaggtccccagggtcctaacggcgcggatgggccacagggacctccggggagtgtaggtagtgtgggcggcgtgggggagaagggggagcctggtgaagctggcaatcccgggccacctggtgaagcaggagtcggggggccgaagggagagaggggtgaaaagggcgaagctggaccacccggggccgcgggcccgcccggcgctaaaggaccaccaggggatgatggccccaagggcaatccaggcccagtgggctttcccggcgatccaggccctcccggggaaccaggccctgctggacaggatggagtcggaggtgacaaaggagaagatggagatccagggcagcccgggcctccgggaccttctggtgaggcaggccctcccggcccgccaggtaaaagaggaccccccggcgctgcaggggcggagggaagacagggcgaaaaaggagctaagggcgaggccggtgctgaggggccacccggaaaaaccggccctgtaggtccgcagggaccagccggcaaacctggccctgaagggctgcgaggcatcccgggaccggtcggcgagcaggggctgcccggggcggcaggacaggacggcccaccagggcctatgggacccccggggctccctggcctcaaaggcgacccaggcagcaaaggagagaaaggacatcccgggttaatcgggctcatcggacctcccggagaacagggtgagaagggggaccgggggctcccaggcacacaaggcagtcccggtgcaaaaggagatggcggtataccaggccctgccggacctctcggcccccctggtcctcctgggctgcctggaccccaagggcctaaaggaaacaagggatccacaggacctgcaggacagaagggagactctgggctcccaggcccccccggcagtcccggaccacccggcgaagtcatccagcctcttcccattttatcttccaaaaagacacggcgccacacggaaggcatgcaggcggacgcagacgataacattctggactattccgacggtatggaagagattttcgggagcctaaactctctcaagcaggatatcgagcacatgaagttcccaatgggcacacaaactaatcctgctaggacctgcaaggacctgcagctgtcccaccccgattttccagatggcgagtattggattgacccaaatcagggctgcagcggcgactcatttaaagtatactgcaactttacatctggtggtgaaacatgtatttacccggataaaaagtccgagggagttcgcatttcctcttggcccaaagaaaaacctggttcttggttttcagaatttaagcgcggcaagctcttatcctatctcgacgtggagggaaactcaataaatatggtccagatgactttcctcaaactgttgacagcctccgccaggcaaaactttacctaccattgccaccagtctgccgcctggtacgacgtatccagcggatcttacgacaaagccttacgtttcttgggctctaacgatgaagagatgagctacgacaataacccattcatcaaaacactgtatgacggatgcgcgagcagaaagggctacgaaaagaccgtcattgagatcaatacaccaaaaattgaccaagtaccaatcgtcgacgtaatgatcaacgactttggggaccagaaccaaaagttcggattcgaagtagggcctgtatgtttcctcggctag

SEQ ID NO: 337094 - RNA, 5421 nt, Artificial Sequence
  derived and/or modified sequence
auggaaccuuggucaagccgguggaagacaaagcgcuggcuaugggacuuuacuguuacgacccucgcccugacauuuuuauuccaagccagagaggucagaggggccgcgccuguugacguucucaaggcacuggauuuccauaacucaccagagggaaucagcaagaccacuggauuuugcacaaauagaaaaaacuccaaaggauccgacaccgcuuaucgaguuagcaaacaggcucagcuaagcgccccuaccaagcagcuuuucccaggcgggacguuuccugaggauuucaguauucuauuuacugugaaacccaagaaggguauccagucuuuucuccuguccauauauaaugagcacggcauacagcagauuggcgucgaggucggacgcucacccgucuuucuguuugaggaucacacagguaagcccgcaccagaggauuacccccuguucagaacuguuaacauagccgauggcaaguggcauaggguggcaauuucuguggagaaaaaaacagucaccaugaucguggacugcaagaaaaagacaacuaagccacuggacagguccgaaagggcuauagucgacacgaauggaauuacgguguucgguacaaggaucuuggacgaagagguguucgagggcgacauucagcaguuucugaucaccggugaccccaaggccgccuacgauuacugugagcauuacucucccgauugcgacucauccgcucccaaagccgcccaggcccaggagccacaaauugacgaauaugcucccgaagauauuauugaguacgacuaugaguauggagaagccgaauauaaggaagcagaaagcguuacagaaggcccuaccgucaccgaagagaccaucgcacagaccgaagccaauaucgucgacgacuuucaggaguauaauuacggaaccauggagaguuaucagaccgaagcaccucggcauguguccggcacaaaugaaccgaacccugucgaagaaauuuuuacagaggaauaucucacgggggaagauuaugauucucagaggaagaacagcgaggauacccucuacgagaacaaagaaauugauggacgcgauuccgaccuguuaguggauggcgacuuaggcgaguaugacuuuuacgaguauaaggaauacgaggacaagccgacuaguccacccaacgaggaguucggaccuggggugccggccgagacugauaucacagaaacuucuauaaaugggcacggcgcauauggggagaaagggcagaaaggggagcccgcggucguggagccuggcauguuagucgagggcccaccuggacccgcugggcccgcuggaaucaugggcccuccaggccuccagggcccaacagggccaccuggcgaccccggcgauagaggacccccaggacggccuggccucccaggugcagauggucuccccggcccacccgggacaaugcuaaugcugcccuuucgguacgguggcgaugguagcaagggucccacaaucucggcucaggaggcucaggcucaggccauacuucaacaagcgcgaaucgcucuccgcggacccccaggccccaugggacuuacaggaagaccaggcccugucggcgggcccggcagcaguggugcaaaaggcgagucaggcgaucccgggccacaagggccccgcggcguccaggggcccccagggccuacuggcaaacccgguaaacgaggacgacccggcgcugacggcggcaggggcaugccuggggagccaggagccaaaggcgauagaggcuucgacggauuacccgguuuaccuggggacaaaggacaccggggagagcgcggcccacaaggacccccaggaccuccaggagacgauggcaugcggggagaagauggcgaaauaggaccaagagggcuccccggcgaggccggcccuagaggacuucuugggcccaggggaacccccggggcuccuggacagccuggaauggcaggaguggauggccccccagggccaaaggguaacaugggaccacagggugagcccggccccccaggucagcaggggaacccuggcccgcaaggacugccagggccucagggcccaaucgguccucccggcgagaagggcccgcaggguaagccaggccucgcuggguugccaggcgccgauggcccuccaggucauccgggaaaagaaggucagagcggcgagaagggcgcuuugggaccacccggaccucaaggaccaaucggguauccugguccccgggggguaaagggagcugacggcguaagaggucugaagggcaguaaaggcgaaaagggcgaggauggcuucccuggauucaagggcgauauggggcugaaaggagaccgaggugaagugggccagauugggccccggggggaggauggaccugagggaccaaaagggcgggccggaccgacgggggaccccgggccaucugggcaggcuggagaaaaagguaagcuggggguucccggacugcccggcuacccagguaggcaggguccuaagggaucuacgggguucccuggauucccuggcgccaauggcgaaaagggggcccggggcguggccggaaagcccggaccccggggacaacggggcccaacuggacccagggguagccggggcgcccgcggcccaacagguaagccaggaccgaaagggacgagcggcggcgacgguccccccggacccccuggagagagggguccacaaggaccucaggggccagucggcuuucccggcccaaagggcccacccggccccccaggaaaagacggacuucccggacaucccggccaacggggugagaccggguuucagggaaaaaccggaccucccgggccuggugguguuguuggcccccagggaccaaccggcgagacgggaccaaucggugaacguggccacccuggaccuccuggacccccaggcgaacagggucuaccaggggcugcuggaaaagaaggagccaaaggcgaccccggaccacaaggcaucuccggcaaggacgggccagcuggauugagaggcuuuccaggggagcgcggacucccgggggcucagggcgcuccaggacugaagggaggggagggcccucaaggaccgccaggcccggugggcucccccggagagagaggcuccgccgggacugcuggccccaucgggcugccuggccgacccgggccucagggucccccuggcccugcuggggagaaaggagcuccaggugagaaagguccccagggcccugcaggccgggacgggguucagggcccugugggauuaccuggaccugcuggccccgcuggcuccccgggcgaagacggggacaagggagagauaggagaacccggacagaaggguucuaaaggcgacaaaggcgagaauggcccaccgggaccccccggccuacagggcccuguuggcgcuccaggaauugcugggggagauggcgagcccggcccacguggccagcagggcauguucggccaaaagggcgacgagggugccaggggauuccccggaccaccaggccccauuggccuucagggccuaccaggaccccccggagaaaaaggagaaaauggcgauguugguccgaugggccccccuggcccucccgguccacgugguccacagggcccaaacggcgccgacgggccucagggcccuccgggcuccguggggaguguagggggcguuggggagaagggcgagccuggggaggcaggaaauccuggcccuccaggagaagcuggaguuggcggaccaaaaggugagagaggugagaagggcgaagccgggccacccggggcugcugggccuccaggggcuaagggcccaccaggcgacgacgguccaaaaggcaacccuggaccaguuggcuuuccaggcgaccccgggcccccaggagaaccgggcccggcugggcaagacggcgugggcggcgauaagggagaggauggcgaucccggacagcccggccccccaggcccuagcggagaagcagggccacccggaccuccuggaaaaaggggaccaccaggagcagccggcgcagaaggcaggcagggggaaaagggcgccaagggugaggcgggcgcugagggcccuccuggaaaaacaggccccgugggaccucaaggcccugcaggcaaaccagguccugagggcuugcgcgggauccccgggccugucggcgaacagggccucccaggcgccgccggacaggacggcccgccgggucccauggguccgcccggacugccaggucuuaagggcgaucccggauccaagggagaaaaaggucacccugggcugaucggccucaucggcccgccuggagaacagggcgagaaaggcgacagggggcucccaggcacacagggcagcccuggcgcuaaaggugacggcgguauaccgggacccgcuggaccccucggaccccccggcccacccggucugcccgggccucaagggccuaaaggcaacaagggaaguacggguccagcaggccagaagggagauucuggacuucccggcccgcccggaucucccgggccgccuggcgaagugauucagccguugcccauucuguccucuaagaagacaaggaggcauacugagggcaugcaggcugaugcugaugauaauauucuggauuacuccgacgguauggaagaaaucuucgggucgcuuaacucguuaaagcaggauaucgagcacaugaaauucccgaugggcacacagacaaacccugcccguaccuguaaagaucuacaauugagccaccccgacuuuccagacggcgaguacuggaucgauccaaaucaggggugcuccggcgauaguuucaagguguacuguaauuucaccucaggaggcgaaacauguauuuacccugacaaaaagagugagggggucaggaucucaucauggcccaaggagaaacccggauccugguucagcgaauuuaagaggggcaaacuucucuccuauuuagaugucgaaggcaacucuauuaacauggugcagaugaccuuucucaaacugcugacugcaucggccagacagaacuucacuuaucacugucaccaaucugccgcgugguaugacguguccucggguaguuacgauaaagcacugcgauuccuugggagcaacgacgaggagaugucauaugacaauaaucccuucauaaagacucuuuaugauggaugcgccuccagaaagggauacgagaaaacuguaauagagauuaacaccccgaaaaucgaccaggugccaaucguggaugugaugaucaaugacuucggagaccagaaccagaaguuuggguuugaagugggcccagugugcuuccuuggcuag

SEQ ID NO: 337095 - RNA, 5421 nt, Artificial Sequence
  derived and/or modified sequence
auggagcccugguccucucgauggaaaacaaagagauggcucugggauuuuacagugacgacguuggcccuuacuuucuuauuccaggcucgagaagucagaggugccgcuccaguagacguucuuaaagcgcucgauuuccacaacuccccugagggcauuagcaagacaacgggcuucugcaccaaccgcaagaauuccaaaggguccgacaccgcuuaccgagucucaaaacaagcccagcugagcgcuccuaccaaacaacucuucccagggggcacguuuccggaggauuucucaauucuguucacaguuaaacccaagaaaggcauacaguccuuccugcugagcauuuacaaugaacacgguauucaacagaucggaguugaagugggaagaucuccuguguuucuguucgaggaccacaccggaaaaccugcacccgaggacuacccccucuuuaggacuguuaauaucgccgauggcaaauggcacaggguagcuaucagcguggaaaagaagaccguuacuaugaucguugauugcaaaaagaaaaccacgaagccccucgauaggagcgagagagccauagucgacacgaacggaauuaccgucuuuggcaccagaauccuagacgaagagguguuugagggugacauccagcaguuucucauuacaggggauccaaaggccgcauaugacuacugugaacacuacagcccagauugugacucuucagcccccaaagcggcccaggcccaggaaccgcaaaucgaugaauacgcgccggaggauauuaucgaauaugauuaugaguauggagaggccgaguacaaagaagccgagagcgucaccgaagguccaacugucaccgaagaaacuauugcacagacagaggccaauauuguggacgacuuucaggaguauaauuacggaacgauggagucguaucagacggaagcaccacgacacguuuccggaaccaaugaaccaaaucccguagaagaaaucuuuacugaagaauaucugaccggagaagacuaugauucacagcgcaagaacuccgaagacacauuauaugagaauaaagagaucgacggccgcgauucugaucuuuuaguggacggcgaccugggagaauaugacuucuacgaguauaaggaguacgaggacaagccgacaucacccccaaacgaagaauucggaccaggcguaccugcagaaaccgauauuacggagacaucaaucaauggccauggugcuuauggagaaaagggccaaaagggggagcccgcuguaguugaaccugguaugcugguggaggggccuccuggaccagccggaccagccggcaucaugggcccuccaggcuugcaaggccccacaggaccucccggcgaccccggagaccguggaccucccggccggccaggacuuccgggugcugaugggcucccagguccacccgggacuaugcuuauguugccauuuagauauggaggagacggcucaaagggcccaacuaucucugcucaggaagcccaggcacaggccauucuacagcaggcaagaauugcccuaagggguccuccuggcccaauggggcugacaggacggcccggccccgugggcggacccggcaguuccggcgccaagggggaaagcggagacccagggccacagggaccgcggggaguucaggggccaccaggaccaaccggaaagccagggaagcgggguagaccaggggcggauggaggaagggggaugccuggagaacccggggcgaagggcgaucgcggcuucgacggauuacccgguuuaccuggggacaaaggacaccggggagagcgcggcccacaaggacccccaggaccuccaggagacgauggcaugcggggagaagauggcgaaauaggaccaagagggcuccccggcgaggccggcccuagaggacuucuugggcccaggggaacccccggggcuccuggacagccuggaauggcaggaguggauggccccccagggccaaaggguaacaugggaccacagggugagcccggccccccaggucagcaggggaacccuggcccgcaaggacugccuggcccacagggcccaaucgggcccccaggggaaaaagguccacagggcaagccagggcuugccggauuaccuggcgcggacgggcccccgggacacccaggaaaagaaggacagaguggagagaaaggcgcguugggcccaccuggcccacagggccccaucggguaucccggcccccgagguguuaaaggggccgauggugugagaggacuuaaggguaguaaaggagaaaagggcgaagaugguuucccuggauuuaaaggcgacauggggcugaagggugaucggggggaggucgggcaaauaggcccgcggggugaggaugggccagagggaccaaaggggcgagcagggcccaccggagacccgggaccaucuggacaggcaggggagaagggcaaguugggaguacccggccucccagguuauccaggacgacagggaccaaaggggagcaccggcuuuccuggcuuuccaggagccaauggcgaaaagggggccagaggugucgcggguaagccaggccccagaggccagcgggguccaacaggcccuaggggguccagaggcgcaagaggaccgacggggaagcccggcccgaaggggacaaguggaggcgacgggcccccagguccccccggagagcgcgggccccaaggaccacagggcccugucggcuuuccuggccccaagggaccacccggccccccgggaaaagacggccuccccggccaccccggucagcgaggagaaacgggauuccaggggaagacaggaccgccuggucccgguggugucgucggcccucaggggcccacuggagaaacuggaccgaucggagagcguggccacccggggccccccggcccacccggagagcaggggcugccaggugcggcuggaaaagaaggugcuaagggagacccagguccacaagggauuucagggaaggacggaccagcugggcuccguggcuucccaggagaaaggggucuuccaggggcucagggcgcuccaggccuaaaggggggcgaaggaccgcagggaccccccggaccagucgggucgccuggugaacgcgguuccgccgguacagcuggcccgauaggccugccaggaagaccaggcccccagggcccacccgggccagccggcgagaagggugcccccggggaaaagggaccucagggacccgcaggcagagauggagugcaggggccugucggacugcccggacccgccggcccagccgggucacccggugaagacggagauaagggcgaaauuggagagccaggccaaaaggguagcaagggagauaagggagaaaacgggccgccggggccuccagggcugcaggggccaguaggugcacccgguauugcugggggagauggggaacccggaccucggggacagcaggguauguuuggacaaaagggugaugagggcgcccgcggcuucccagggccaccggguccaaucggguugcaaggacucccuggaccaccgggagaaaagggggaaaacggugauguaggccccaugggaccgccagggcccccuggaccaagagguccccaggguccuaacggcgcggaugggccacagggaccuccggggaguguagguagugugggcggcgugggggagaagggggagccuggugaagcuggcaaucccgggccaccuggugaagcaggagucggggggccgaagggagagaggggugaaaagggcgaagcuggaccacccggggccgcgggcccgcccggcgcuaaaggaccaccaggggaugauggccccaagggcaauccaggcccagugggcuuucccggcgauccaggcccucccggggaaccaggcccugcuggacaggauggagucggaggugacaaaggagaagauggagauccagggcagcccgggccuccgggaccuucuggugaggcaggcccucccggcccgccagguaaaagaggaccccccggcgcugcaggggcggagggaagacagggcgaaaaaggagcuaagggcgaggccggugcugaggggccacccggaaaaaccggcccuguagguccgcagggaccagccggcaaaccuggcccugaagggcugcgaggcaucccgggaccggucggcgagcaggggcugcccggggcggcaggacaggacggcccaccagggccuaugggacccccggggcucccuggccucaaaggcgacccaggcagcaaaggagagaaaggacaucccggguuaaucgggcucaucggaccucccggagaacagggugagaagggggaccgggggcucccaggcacacaaggcagucccggugcaaaaggagauggcgguauaccaggcccugccggaccucucggccccccugguccuccugggcugccuggaccccaagggccuaaaggaaacaagggauccacaggaccugcaggacagaagggagacucugggcucccaggcccccccggcagucccggaccacccggcgaagucauccagccucuucccauuuuaucuuccaaaaagacacggcgccacacggaaggcaugcaggcggacgcagacgauaacauucuggacuauuccgacgguauggaagagauuuucgggagccuaaacucucucaagcaggauaucgagcacaugaaguucccaaugggcacacaaacuaauccugcuaggaccugcaaggaccugcagcugucccaccccgauuuuccagauggcgaguauuggauugacccaaaucagggcugcagcggcgacucauuuaaaguauacugcaacuuuacaucugguggugaaacauguauuuacccggauaaaaaguccgagggaguucgcauuuccucuuggcccaaagaaaaaccugguucuugguuuucagaauuuaagcgcggcaagcucuuauccuaucucgacguggagggaaacucaauaaauaugguccagaugacuuuccucaaacuguugacagccuccgccaggcaaaacuuuaccuaccauugccaccagucugccgccugguacgacguauccagcggaucuuacgacaaagccuuacguuucuugggcucuaacgaugaagagaugagcuacgacaauaacccauucaucaaaacacuguaugacggaugcgcgagcagaaagggcuacgaaaagaccgucauugagaucaauacaccaaaaauugaccaaguaccaaucgucgacguaaugaucaacgacuuuggggaccagaaccaaaaguucggauucgaaguagggccuguauguuuccucggcuag

SEQ ID NO: 337096 - protein, 1026 aa, Artificial Sequence
  derived and/or modified sequence
MVSEVSRDLKVKREKLVKLAQEGKMALKDPKVEQAQLETQVLQVKQEKRENLEFQDYQDIQEDKVQRISDVIGSTGFPGFPGANGEKGARGVAGKPGPRGQRGPTGPRGSRGARGPTGKPGPKGTSGGDGPPGPPGERGPQGPQGPVGFPGPKGPPGPPGKDGLPGHPGQRGETGFQGKTGPPGPGGVVGPQGPTGETGPIGERGHPGPPGPPGEQGLPGAAGKEGAKGDPGPQGISGKDGPAGLRGFPGERGLPGAQGAPGLKGGEGPQGPPGPVGSPGERGSAGTAGPIGLPGRPGPQGPPGPAGEKGAPGEKGPQGPAGRDGVQGPVGLPGPAGPAGSPGEDGDKGEIGEPGQKGSKGDKGENGPPGPPGLQGPVGAPGIAGGDGEPGPRGQQGMFGQKGDEGARGFPGPPGPIGLQGLPGPPGEKGENGDVGPMGPPGPPGPRGPQGPNGADGPQGPPGSVGSVGGVGEKGEPGEAGNPGPPGEAGVGGPKGERGEKGEAGPPGAAGPPGAKGPPGDDGPKGNPGPVGFPGDPGPPGEPGPAGQDGVGGDKGEDGDPGQPGPPGPSGEAGPPGPPGKRGPPGAAGAEGRQGEKGAKGEAGAEGPPGKTGPVGPQGPAGKPGPEGLRGIPGPVGEQGLPGAAGQDGPPGPMGPPGLPGLKGDPGSKGEKGHPGLIGLIGPPGEQGEKGDRGLPGTQGSPGAKGDGGIPGPAGPLGPPGPPGLPGPQGPKGNKGSTGPAGQKGDSGLPGPPGSPGPPGEVIQPLPILSSKKTRRHTEGMQADADDNILDYSDGMEEIFGSLNSLKQDIEHMKFPMGTQTNPARTCKDLQLSHPDFPDGEYWIDPNQGCSGDSFKVYCNFTSGGETCIYPDKKSEGVRISSWPKEKPGSWFSEFKRGKLLSYLDVEGNSINMVQMTFLKLLTASARQNFTYHCHQSAAWYDVSSGSYDKALRFLGSNDEEMSYDNNPFIKTLYDGCASRKGYEKTVIEINTPKIDQVPIVDVMINDFGDQNQKFGFEVGPVCFLG

SEQ ID NO: 337097 - DNA, 528 bp, Artificial Sequence
  derived and/or modified sequence
atgggccgcctgtcctggcaggtggccgctgctgcccggggagctgtgctgcctgtgtctggggacctgtaccggggccctgctgctggcagcggcagaggagctggccgggccccccggggcctgcctgtgcggcctgccccccggcgggagcgggccaagcccccagctgcctgcccagctggccggccccggcagcccggcagcctgcctgtgcggctgctgcagcctgctgctggcccccggcgggctgtggccgccccagcctggggcgccagcgctggccgccaccggctgcggctgcacggcccccagaggctggccaacagatctgctgcccagggccgggaccccggccctgcccggagccggccccggctgcacgccagccaggtgtgccaccggggccaggagggcgcccaccactggctggcccagctggaccacgccagccaccctgagcagcagggcgagtgcagccaccacggcggcagaagagtgcgggccgccttcagcggccgcatctag

SEQ ID NO: 337098 - DNA, 3081 bp, Artificial Sequence
  derived and/or modified sequence
atggtgagcgaggtgagcagagacctgaaggtgaagagagagaagctggtgaagctggcccaggagggcaagatggccctgaaggaccccaaggtggagcaggcccagctggagacccaggtgctgcaggtgaagcaggagaagagagagaacctggagttccaggactaccaggacatccaggaggacaaggtgcagagaatcagcgacgtgatcggcagcaccggcttccccggcttccccggcgccaacggcgagaagggcgccagaggcgtggccggcaagcccggccccagaggccagagaggccccaccggccccagaggcagcagaggcgccagaggccccaccggcaagcccggccccaagggcaccagcggcggcgacggcccccccggcccccccggcgagagaggcccccagggcccccagggccccgtgggcttccccggccccaagggcccccccggcccccccggcaaggacggcctgcccggccaccccggccagagaggcgagaccggcttccagggcaagaccggcccccccggccccggcggcgtggtgggcccccagggccccaccggcgagaccggccccatcggcgagagaggccaccccggcccccccggcccccccggcgagcagggcctgcccggcgccgccggcaaggagggcgccaagggcgaccccggcccccagggcatcagcggcaaggacggccccgccggcctgagaggcttccccggcgagagaggcctgcccggcgcccagggcgcccccggcctgaagggcggcgagggcccccagggcccccccggccccgtgggcagccccggcgagagaggcagcgccggcaccgccggccccatcggcctgcccggcagacccggcccccagggcccccccggccccgccggcgagaagggcgcccccggcgagaagggcccccagggccccgccggcagagacggcgtgcagggccccgtgggcctgcccggccccgccggccccgccggcagccccggcgaggacggcgacaagggcgagatcggcgagcccggccagaagggcagcaagggcgacaagggcgagaacggcccccccggcccccccggcctgcagggccccgtgggcgcccccggcatcgccggcggcgacggcgagcccggccccagaggccagcagggcatgttcggccagaagggcgacgagggcgccagaggcttccccggcccccccggccccatcggcctgcagggcctgcccggcccccccggcgagaagggcgagaacggcgacgtgggccccatgggcccccccggcccccccggccccagaggcccccagggccccaacggcgccgacggcccccagggcccccccggcagcgtgggcagcgtgggcggcgtgggcgagaagggcgagcccggcgaggccggcaaccccggcccccccggcgaggccggcgtgggcggccccaagggcgagagaggcgagaagggcgaggccggcccccccggcgccgccggcccccccggcgccaagggcccccccggcgacgacggccccaagggcaaccccggccccgtgggcttccccggcgaccccggcccccccggcgagcccggccccgccggccaggacggcgtgggcggcgacaagggcgaggacggcgaccccggccagcccggcccccccggccccagcggcgaggccggcccccccggcccccccggcaagagaggcccccccggcgccgccggcgccgagggcagacagggcgagaagggcgccaagggcgaggccggcgccgagggcccccccggcaagaccggccccgtgggcccccagggccccgccggcaagcccggccccgagggcctgagaggcatccccggccccgtgggcgagcagggcctgcccggcgccgccggccaggacggcccccccggccccatgggcccccccggcctgcccggcctgaagggcgaccccggcagcaagggcgagaagggccaccccggcctgatcggcctgatcggcccccccggcgagcagggcgagaagggcgacagaggcctgcccggcacccagggcagccccggcgccaagggcgacggcggcatccccggccccgccggccccctgggcccccccggcccccccggcctgcccggcccccagggccccaagggcaacaagggcagcaccggccccgccggccagaagggcgacagcggcctgcccggcccccccggcagccccggcccccccggcgaggtgatccagcccctgcccatcctgagcagcaagaagaccagaagacacaccgagggcatgcaggccgacgccgacgacaacatcctggactacagcgacggcatggaggagatcttcggcagcctgaacagcctgaagcaggacatcgagcacatgaagttccccatgggcacccagaccaaccccgccagaacctgcaaggacctgcagctgagccaccccgacttccccgacggcgagtactggatcgaccccaaccagggctgcagcggcgacagcttcaaggtgtactgcaacttcaccagcggcggcgagacctgcatctaccccgacaagaagagcgagggcgtgagaatcagcagctggcccaaggagaagcccggcagctggttcagcgagttcaagagaggcaagctgctgagctacctggacgtggagggcaacagcatcaacatggtgcagatgaccttcctgaagctgctgaccgccagcgccagacagaacttcacctaccactgccaccagagcgccgcctggtacgacgtgagcagcggcagctacgacaaggccctgagattcctgggcagcaacgacgaggagatgagctacgacaacaaccccttcatcaagaccctgtacgacggctgcgccagcagaaagggctacgagaagaccgtgatcgagatcaacacccccaagatcgaccaggtgcccatcgtggacgtgatgatcaacgacttcggcgaccagaaccagaagttcggcttcgaggtgggccccgtgtgcttcctgggctag

SEQ ID NO: 337099 - DNA, 3081 bp, Artificial Sequence
  derived and/or modified sequence
atggtgagcgaggtgtcccgagatctcaaagtgaagcgcgaaaagctggtgaaactcgctcaggaaggaaagatggccctgaaggatccaaaggtggaacaggcacagctggagactcaggttttgcaggtgaagcaagagaaacgtgaaaacctcgagttccaagattatcaggatatccaggaggacaaggtccaaagaatcagtgacgtgatcggatctactggttttcccggctttcccggggcaaatggggagaagggagctcggggagtggccggtaagcccggcccccgtgggcagagggggccgacaggacccagaggaagtcgcggagcaagaggtcccactgggaaacctggccctaaggggacatctggaggggacggccctcctggccctcctggcgagaggggcccgcagggaccccagggacctgtcggattcccgggtcctaaaggtcccccagggcctcccgggaaggatgggctgcctggccaccccgggcaaagaggggagactggcttccagggcaagactggaccccctgggcctgggggggtcgtgggaccacagggcccaaccggggagactggccctatcggcgaaaggggtcacccagggccccccggcccccccggtgaacagggactcccgggtgcagcagggaaagagggcgccaagggagaccccggcccacagggcatcagcggaaaggatggtcctgccggccttaggggctttccaggcgaacgtggcctacccggcgcccagggtgctcccggactgaagggtggggagggaccccaaggacctcccggccctgttggcagcccaggcgaaagggggtccgccggtacagccggacctatcgggctgcccggacggcctgggccacaaggacccccaggtccggccggggaaaaaggcgctccaggggagaaaggtccccaggggccagccggcagggatggggtgcaaggccccgtgggcctgcccgggccggccggacccgcaggaagcccaggtgaggatggggataagggggaaatcggagagcccggccaaaagggaagtaaaggagataaaggcgagaatggcccccctggcccaccagggctgcagggtccagtgggtgctcctggcattgcagggggtgatggagaacccgggcctcgaggccagcagggcatgttcgggcaaaagggagatgagggcgcacgtggcttccctggcccacctgggccgatcggtctgcagggcctgccaggaccacctggggagaagggggaaaatggagacgtcggcccaatgggaccacccgggcctccgggcccacgcggtcctcagggtccaaacggcgctgatgggccacagggtccaccgggaagcgtcggctctgtggggggtgtcggagagaaaggtgagcccggtgaagctggaaaccctggaccacctggcgaagctggggtggggggacccaaaggcgagcggggtgaaaaaggggaagccggccctccaggcgctgcaggtcccccaggcgctaaaggaccccccggtgacgacggcccgaagggcaacccaggtccagtgggcttccccggggaccctggaccccctggcgaaccagggccggccggacaggatggagtcggcggcgataaaggtgaagacggggacccaggtcagccaggtccaccaggcccgtctggagaagccggccccccagggccacctgggaagcgtggccctccaggcgccgcaggcgccgaggggcgccaaggtgagaagggcgccaaaggggaagcaggagccgaaggccctcctggtaagactggcccggtgggccctcagggcccggccggcaaaccaggccctgaggggctacgaggcattcctggaccagtgggcgaacaggggctacctggagcggccgggcaggatggacccccaggccccatgggccccccaggtctgcctggactgaagggggaccctgggtccaagggcgaaaaaggccatcccggtctcatcggcctgatcggtccacctggagagcagggagaaaaaggggacagaggcctcccaggcacacaggggtcacctggcgcaaagggggatggtgggattcctggacctgccggcccactcggaccccccggaccaccgggcttgcctggcccccagggcccaaagggcaacaaggggagtaccggtcctgccggccagaagggagactctggcctacctggcccaccaggatcccccggcccacctggcgaagtgatacagcctctccccatcctgtcctctaaaaagacaaggaggcataccgagggtatgcaggcggatgcggacgacaacatcttggattatagtgacggaatggaggagatcttcggatcattgaattctctgaagcaagatatagaacatatgaagttccctatggggacacaaaccaacccggctaggacctgtaaggaccttcagctgtcacacccagacttccctgatggcgagtactggatcgacccaaaccaggggtgctcaggagactcctttaaagtgtattgtaattttaccagcggtggagaaacatgcatttaccccgacaagaagtctgaaggggtgcggattagctcttggccgaaggagaaacccgggtcatggtttagcgagttcaaaaggggtaaacttttgagctatttagacgttgaagggaactcaattaacatggtccagatgactttcttgaaactgctgaccgcctccgcccgccagaatttcacttatcactgccaccagtcagctgcctggtacgatgtctcaagtggcagctatgacaaagctttgcgattccttggttcaaatgacgaggaaatgtcttacgacaacaaccccttcattaagacactctacgatggctgtgcttccaggaagggttacgaaaagacggtgatcgaaattaatactccgaagattgaccaggtgccaattgtcgatgtaatgataaatgattttggcgatcagaaccaaaagttcggctttgaagtggggcccgtttgttttctcggatag

SEQ ID NO: 337100 - DNA, 3081 bp, Artificial Sequence
  derived and/or modified sequence
atggtgtctgaggtgtcccgggacctgaaggtgaagcgggagaagctggtgaagctggcccaggagggcaagatggccctgaaggaccccaaggtggagcaggcccagctggagacccaggtgctgcaggtgaagcaggagaagcgggagaacctggagttccaggactaccaggacatccaggaggacaaggtgcagaggatcagtgatgtgattggcagcacaggcttccctggcttccctggggccaacggggagaagggggcccggggcgtggccggcaagccaggcccccggggccagaggggccccaccggcccccggggcagcagaggagcccggggccccaccgggaagccaggccccaagggcaccagcggaggagatggccccccaggccccccaggagagcggggcccccagggcccccagggccctgtgggcttccctggccccaagggccccccaggccccccaggcaaggatggcctgcccggccaccctggccagagaggagagaccggcttccagggcaagacaggccccccaggccctggaggagtggtgggcccccagggccccactggagagaccggccccatcggggagcggggccaccctggccccccaggccccccaggagagcagggcctgcctggagctgctgggaaggagggcgccaagggggaccccggcccccagggcatcagcggcaaggatggccctgctggcctgcggggcttccctggagagcggggcctgcccggggcccagggcgcccctggcctgaagggcggggagggcccccagggccccccaggccctgtgggcagccctggagagcggggcagcgctggaacagctggccccatcggcctgcccggccggcccggcccccagggccccccaggccctgctggggagaagggggcccctggagagaagggcccccagggccctgctggaagagatggagtgcagggccctgtgggcctgcccggccctgctggccctgctggcagccctggagaagatggagacaagggggagattggagagcccggccagaagggcagcaagggggacaagggagaaaatggccccccaggccccccaggcctgcagggccctgtgggcgcccctggcattgctggaggagatggagagcccggcccccggggccagcagggcatgtttggccagaagggagatgagggcgcccggggcttccctggccccccaggccccatcggcctgcagggcctgcccggccccccaggagagaagggagaaaatggagatgtgggccccatgggccccccaggccccccaggcccccggggcccccagggccccaatggagcagatggcccccagggccccccaggctctgtgggctctgtgggcggcgtgggggagaagggggagcctggagaggccggcaaccctggccccccaggagaggccggcgtgggcggccccaagggggagcggggggagaagggggaggccggccccccaggagctgctggccccccaggggccaagggccccccaggagatgatggccccaagggcaaccctggccctgtgggcttccctggggaccccggccccccaggagagcccggccctgctggccaggatggagtgggcggggacaagggagaagatggagaccccggccagcccggccccccaggccccagcggggaggccggccccccaggccccccaggcaagaggggccccccaggagctgctggagctgagggccggcagggcgagaagggggccaagggggaggccggggctgagggccccccaggcaagacaggccctgtgggcccccagggccctgctgggaagccaggccctgagggcctgcggggcatccctggccctgtgggggagcagggcctgcccggggctgctggccaggacggccccccaggccccatgggccccccaggcctgcccggcctgaagggggaccccggcagcaaaggagagaagggccaccctggcctcatcggcctgattggccccccaggagagcagggcgagaagggggaccggggcctgcccggcacccagggcagccctggggccaagggagatggcggcatccctggccctgctggccccctgggccccccaggccccccaggcctgcccggcccccagggccccaagggcaacaagggcagcacaggccctgctggccagaagggggacagcggcctgcccggccccccaggcagccctggccccccaggagaggtgatccagcccctgcccatcctgagcagcaagaagaccaggaggcacacagagggcatgcaggctgatgctgatgacaacatcctggactacagtgatggcatggaggagatcttcggcagcctgaacagcctgaagcaggacatcgagcacatgaagttccccatgggcacccagaccaacccagcccggacctgcaaggacctgcagctgagccacccagacttcccagatggagagtactggattgaccccaaccagggctgcagcggggacagcttcaaggtgtactgcaacttcaccagcggcggggagacctgcatctacccagacaagaagtcagaaggagtgcgcatcagctcctggcccaaggagaagccaggctcctggttcagcgagttcaagaggggcaagctgctgagctacctggatgtggagggcaacagcatcaacatggtgcagatgaccttcctgaagctgctgacagccagcgcccggcagaacttcacctaccactgccaccagagcgctgcctggtatgatgtgagcagcggcagctatgacaaggccctgcgcttcctgggcagcaatgatgaggagatgtcctatgacaacaaccccttcatcaagaccctgtatgatggctgtgccagcaggaagggctatgagaagacagtcatcgagatcaacacccccaagattgaccaggtgcccatcgtggatgtgatgatcaatgactttggagaccagaaccagaagtttggatttgaggtgggccctgtgtgcttcctgggctag

SEQ ID NO: 337101 - DNA, 3081 bp, Artificial Sequence
  derived and/or modified sequence
atggtgagcgaggtgagccgggacctgaaggtgaagcgggagaagctggttaaactagcccaggagggcaagatggccctcaaagaccccaaggtggagcaggcccagcttgagacacaggtcctgcaggttaaacaggagaagcgcgaaaatttggagttccaggactatcaggatattcaggaggacaaagtccagcgaatttccgatgtaatcgggtctaccggttttccggggtttcccggcgcaaacggagaaaagggggcgcggggagtggctggcaagcctgggccccgggggcagagaggaccaacaggtccccgcggctccaggggtgccagagggccaaccggcaaacctggccccaagggcacgagtggcggcgacggacctcctggacctcctggagaacgaggacctcagggtccgcagggcccagtggggttccccgggccgaaagggccccccgggccccccggaaaagatgggctgcctggacatcctggacagaggggggaaaccggtttccaaggtaaaaccggccctcctggacctgggggcgtcgtggggccacagggacccacaggcgaaacaggacccatcggcgagcggggtcatcccgggcctcccggacctccaggtgagcagggactgccaggcgcagcaggaaaggaaggcgcaaaaggagacccaggcccccagggcatatcaggtaaggacggccctgcgggccttcgagggttccccggagagcgcggcctccctggggcacaaggtgcacctggcttgaagggcggggaggggccgcagggacctccaggccccgtcgggtcacccggagaaagagggagtgcagggaccgctggtcctatcggattaccaggcagacccgggcctcaaggccctccaggcccagccggagaaaaaggggccccaggcgaaaaaggccctcagggtcccgctggacgcgacggcgtgcagggccctgtgggccttcctggtccagccgggcctgctggatccccaggagaggacggagacaagggcgagataggcgagccaggtcagaagggtagtaagggtgataagggagagaacggcccccccggacctcccggccttcagggaccagtgggggctccggggatcgccgggggagatggggagcccggccctcgcggtcagcagggaatgtttggacaaaagggggacgaaggcgcacgaggttttcctggtccacccggacctatcggcctgcagggcctgcccggtccccccggggaaaaaggcgagaatggcgacgtggggcccatgggtcctccaggaccgcctgggccccgcggtccgcagggcccgaatggtgccgacggccctcaggggccgccaggatctgtaggatcagtaggaggggtgggagagaagggggagcccggggaagcggggaatccagggccgccaggagaggccggggttggcggtccgaaaggagaaagaggagagaagggggaagccgggccccctggtgcagctggaccgcctggcgccaaggggccgccgggcgacgacgggccaaaaggcaatccaggccctgtggggtttcctggggatcccggccctcccggcgagcccgggccagctggtcaggacggagtgggaggggataagggcgaagatggcgatccggggcagcccggcccccctgggccaagcggggaggccgggcccccgggcccgcctggaaagcgtggccctcccggagctgcaggtgccgaaggcagacagggggaaaaaggagcgaaaggcgaagcgggggctgaggggcctccagggaaaacaggccccgtcggaccacaggggcccgctggcaagcctggccctgaaggccttcggggaattccaggcccagttggcgaacagggactgccaggcgcggccgggcaagatggaccacctggacccatgggcccacctggacttccaggactcaaaggcgatccagggagcaagggcgaaaaagggcaccccgggcttataggtctgattggcccacccggggagcaaggcgaaaagggagatagaggcctgcctggtactcagggatcccccggagccaaaggcgacggcggtatccccggcccagccggtccactggggcctcccggaccacccggtctccctggcccacagggcccaaaagggaataaaggaagcacagggcccgccggacagaagggagacagcggattacctggcccgcctggaagtccaggcccacctggagaagttatccagcctttacctattttgagctccaagaagaccagaaggcatacagaagggatgcaggccgacgctgacgataacatcctcgattattcagacggcatggaggagatctttggcagtctgaattctctgaagcaggacattgagcacatgaagtttcccatgggcacccaaactaatccagcccggacatgtaaggaccttcagctaagccatcctgacttccctgacggtgagtattggatcgacccgaaccagggatgctccggcgacagcttcaaggtctactgcaattttacttctggaggtgagacttgcatctaccctgataagaaatccgagggcgtgagaataagctcatggcccaaagagaaacccggctcttggttctccgagttcaagcgtggaaagttgcttagttacctggacgtggaaggcaactccattaatatggttcagatgacatttttgaagctccttaccgcctccgcccggcagaattttacataccactgtcaccagtctgccgcttggtacgacgtttcctccggcagttacgacaaagcattacggtttctcggaagcaatgatgaggaaatgtcttatgataacaatccgtttattaaaacgctgtatgacggctgcgctagtaggaaaggttatgaaaagaccgtgatcgaaatcaatacacctaaaattgatcaagttccaattgtagatgtgatgatcaacgactttggggatcagaaccaaaaattcgggtttgaagtagggccagtgtgcttcttgggatag

SEQ ID NO: 337102 - DNA, 3081 bp, Artificial Sequence
  derived and/or modified sequence
atggtctctgaagtaagcagagacttaaaggttaagcgtgagaagctggtgaaactggcccaggagggcaaaatggctcttaaggaccccaaggtggagcaagctcaactggaaactcaggttctacaagtgaagcaggaaaagagggaaaacctagagtttcaagactaccaagatattcaagaagataaggtgcagcgcatcagtgatgtcataggatctaccgggtttcccggttttcctggggctaatggtgagaaaggagccagaggggtggcagggaagcccggaccacggggacagaggggacctacgggcccacgcggaagccgcggagctaggggtccaactggcaagcccggaccgaaagggacaagcggtggggacggccctcctggcccaccaggcgagaggggaccccagggtcctcaggggccagtagggttccccggaccaaaaggtccgccaggccctcccggaaaggacggacttccaggacaccccggtcagagaggcgagactgggtttcaggggaaaaccgggccacccggacctggcggagttgtagggcctcagggcccaacaggtgaaaccggcccaatcggagagcggggacatccaggccctcctggacctcctggggaacaggggctgccaggggcagctggtaaagagggggctaaaggcgatccagggcctcaaggcataagcggcaaggacggcccagccggactgagaggcttcccaggggagcgcggactccccggtgcgcaaggagcccctggactgaaaggcggtgaggggccacagggccctcccggaccagtgggctcccctggggaacggggatcagccggaactgcaggtccgatcgggttgcccggacggccaggaccccagggcccacccggaccagcaggcgaaaaaggagccccaggggagaagggaccccaggggcctgcgggaagggatggcgtgcagggcccagtcggtctcccaggtccagcagggcctgcaggatccccaggtgaggacggggacaagggcgagattggagagcctggtcaaaaggggagtaagggagacaaaggcgagaacgggccacccggtccccctggcttacaggggccagtgggggcacccggtattgctggtggagatggggagccaggccctagagggcagcagggaatgttcggccagaaaggtgatgaaggggctaggggctttcctggaccgcctggacccatcggacttcaaggcctgccagggccaccaggggaaaagggtgagaatggggacgtgggcccaatggggcctcctggaccgcctgggccaaggggtccgcaaggtccaaacggtgcggatggacctcaagggcctcctggctcagtgggctcagtgggaggagttggggaaaagggcgagcccggagaggcagggaatcctggccctccaggagaagcaggagttgggggaccaaaaggtgagaggggcgaaaagggggaagcgggtccccctggcgctgccggaccgcctggagcgaaggggccaccgggtgacgacggccctaagggaaacccagggcctgttgggtttcccggagatcccggaccacccggtgagccgggacctgcgggacaggatggcgtcggcggtgacaagggtgaggatggcgaccctggacaaccgggacctcccggaccttctggcgaggccggtccaccaggtcctccagggaagcgcggtccgcctggcgctgctggcgctgaaggcagacagggagaaaaaggcgcaaaaggtgaagcgggagccgaggggcctcctggaaaaacagggcctgtcggccctcagggccctgcgggaaaacctggtccagaggggttgaggggtattccaggaccagtgggagagcagggcttacccggagccgcaggacaggacggtcctcccggacctatgggtccacctggcctgccagggctaaaaggcgaccccggaagcaagggggagaagggacacccaggactgatcgggcttatcggcccaccgggtgagcagggtgagaagggcgaccggggtctccccggaacacagggctcgccaggggcaaagggcgatggcggaattccaggccctgctgggcctctcggcccacccggacctccaggattgcccggaccacagggacctaagggtaataaggggtctacagggccagcgggacagaagggcgatagtgggttacccggaccacctggctccccaggacccccaggagaggtgatacagccccttcctattttaagcagcaaaaagacaaggcgccacacagaaggaatgcaggctgacgccgatgacaacatcctagattatagtgacgggatggaagagatttttgggtccctgaactccttgaaacaagatattgagcacatgaagtttcccatgggaacccagacgaaccccgctaggacttgcaaggacctccagctcagccatccggatttcccagatggggagtactggattgatcccaaccaggggtgctccggcgactcatttaaggtatattgtaactttaccagcggcggtgagacctgtatttatccagacaagaaaagcgaaggcgtgcgtatttccagctggccaaaagagaaacccggatcatggtttagtgagttcaagcgcggtaaattactctcatatctggatgtagagggaaattccatcaacatggttcaaatgacctttctgaaattactgaccgccagcgctcgccagaatttcacatatcattgccaccagagcgctgcttggtacgatgtgagttccggctcttacgataaagcactgcgcttcctgggatcaaatgatgaggaaatgagttatgataacaacccatttatcaagactctgtatgacggttgcgcctcccgaaaaggctacgagaagacggttattgagatcaacactcctaaaattgaccaagtgcctattgtggacgttatgatcaacgattttggcgatcagaatcaaaagtttggctttgaggtgggtcctgtctgctttttgggttag

SEQ ID NO: 337103 - DNA, 3081 bp, Artificial Sequence
  derived and/or modified sequence
atggtatccgaggtgagccgggacctaaaggtcaagcgcgagaaactggtaaagttggcccaggaagggaaaatggcccttaaggacccaaaggtggaacaggcccaactggagacccaggtcttacaggtgaagcaggagaagcgcgaaaatttagaattccaggattatcaagatatccaagaggataaagtgcagaggatcagcgatgtgattggatcaacagggttcccaggatttcccggagcaaatggagagaagggagcgaggggtgtcgctggcaagcctgggcctagagggcagagggggcctaccggtccacgcggaagtagaggcgcacgcggaccgaccggcaagccaggcccaaaagggacgtcgggaggcgacgggccgccaggacctccaggagaacgtggaccccaggggccgcaggggccggttggctttcccgggccaaaggggcctccgggccctccagggaaagacgggctccccggacacccaggacaaagaggggagacgggatttcagggtaagacaggacctccagggccaggtggagtggtcggtccacagggccccaccggggaaacagggcctataggtgaacggggccaccccggtccacccgggccgccgggcgaacagggcctcccgggcgccgctggaaaagaaggtgctaaaggcgatccaggcccacaagggatttcaggcaaggacgggccagcaggactccgcggtttcccaggagagagaggtctgcccggtgctcagggagctccaggtcttaagggtggcgagggcccacagggacctcctgggccagttggcagtcccggagagagagggagtgccggaactgcaggtccaatcggccttccagggcggcccggcccccagggcccccccgggcctgccggtgaaaaaggggcccccggtgaaaagggacctcaaggccccgcaggacgggacggggtgcagggccctgtgggcttgcccggtccagccgggcccgctgggtctcccggcgaggacggggacaaaggcgaaatcggtgaacccgggcagaaaggttccaaaggcgataagggcgagaacggtcctcccggaccacctgggctacagggcccagttggagccccaggtatagccgggggtgacggcgaaccagggcctaggggtcagcaaggtatgttcgggcagaagggcgacgagggggcccggggcttccctggacctcctggccccattggactacagggtctgcctggtccacctggtgaaaagggcgagaatggcgacgtgggcccgatggggccccctggcccccccgggccaagggggccccagggacctaacggtgccgacggcccacagggcccacctgggagtgtcggatctgtgggcggcgtcggggagaagggcgaacccggcgaagcgggtaacccgggacccccgggggaagccggggtgggaggacccaaaggagaaagaggagaaaaaggggaagctggtcctccaggagccgctggaccacccggggcgaagggaccacccggcgacgatggaccaaaaggtaacccagggcccgtggggttccccggcgaccctggccctccaggcgaaccgggtcctgcaggccaggacggagtaggaggtgataagggagaggacggtgacccaggacaacctggaccccctggaccttcgggggaagcaggaccaccgggaccacccggtaaaagaggaccaccaggtgcagctggcgccgaaggcaggcagggtgagaaaggcgctaaaggggaagctggcgctgaaggtccaccagggaaaacagggccggtgggtccacagggccccgctgggaaacccgggcccgaaggtctgcgaggaatacctggccccgtgggcgagcaggggctcccgggagcagcaggccaggacggtccgcccgggccgatgggccctcctggcctccctggattaaagggagaccctggtagcaaaggagagaagggccatcctggcctgattgggctgatcggacctcctggagaacagggtgagaagggagatcgagggctgcccggaacgcagggtagccccggcgccaaaggcgatggcggtattcctgggcccgcgggccccttgggacctcctggcccccccggcctgcccggacctcaggggcctaagggcaataaagggagcactggaccagccggccagaaaggtgactcgggcttacccggtccgcctggctctccggggcctccgggtgaagtaatacagccactcccaattctgagctcaaaaaagacgcgacggcacactgaggggatgcaggccgacgccgatgacaatatcctcgattactccgatgggatggaagaaattttcggaagcctgaatagtctgaagcaggacatcgaacatatgaagttccctatgggaacgcagaccaatccagcccggacctgtaaagatctgcagctgtcacaccccgatttccctgatggcgaatactggatcgatcctaaccagggttgttcaggtgattcttttaaggtctattgtaactttaccagcgggggtgagacctgcatctacccagataaaaaaagtgagggagttagaattagctcgtggcccaaagagaaacctggttcatggttttcagagttcaagaggggcaagttgcttagttacctcgacgtagaggggaactccatcaatatggtacagatgacattcctgaagctgctgaccgcttccgccagacagaatttcacataccactgccatcagagcgccgcatggtacgatgttagttccggtagttacgacaaagccttacggtttcttggatcaaacgacgaagagatgagctacgacaataatccattcataaagaccctgtacgacggctgcgcttctcgcaagggttatgagaaaactgtcattgaaatcaataccccaaagatcgaccaagttccaattgtggacgtcatgatcaacgattttggagaccagaaccagaagttcggttttgaagtgggccctgtttgttttttgggctag

SEQ ID NO: 337104 - DNA, 3081 bp, Artificial Sequence
  derived and/or modified sequence
atggtcagtgaagtgtcacgggatctgaaggtgaagagagaaaagctggtcaagctggcacaggagggcaaaatggcactgaaggaccccaaggtagaacaggcacaactagaaacacaggtattacaggttaaacaggaaaagcgcgaaaatttggagttccaggactaccaggacatccaggaagataaggttcagcgcatttctgatgtgataggaagcacgggattccccggctttcccggagctaacggggagaagggagcaagaggcgtggcaggaaagcccggtccgcgaggtcagaggggacctacaggacctagggggagtcggggagcgcggggacccacggggaaaccaggtccaaaaggtacaagtgggggcgacgggcctcccggaccgccaggggagcggggaccacaagggccacaaggacccgtgggttttcctggaccaaaggggccacccggaccccccggcaaggacggactccccggtcacccaggtcagaggggcgaaacaggattccaggggaagacaggaccccccggtccaggcggagtagtgggaccgcaggggcctacaggggagacaggtccaatcggcgagcgcggacaccccgggccccccggacccccaggcgaacaaggactgccaggtgccgccggcaaggagggagccaaaggtgacccaggccctcaggggatctcaggcaaagatggtcccgctggtttgaggggattccccggcgaacgcggactacccggagcccagggtgccccaggtctgaaaggcggggaagggccacaaggaccccccggccctgtgggttcccccggtgagagaggttcagccgggacagctggcccaattggcctacccggccgccccggaccccagggtcccccaggtcccgcgggcgaaaagggcgctccaggagaaaaaggtcctcagggccccgccgggcgagacggagtacaaggacccgtgggtctcccaggacccgcaggaccagctggcagcccaggagaagacggagataaaggcgaaataggggagccaggccagaagggatctaaaggcgataagggcgagaacggacccccagggcctccaggactgcagggtcccgttggcgctcccggaatagcaggtggggacggtgaaccgggaccgcgcggtcagcagggtatgttcggtcagaaaggagatgagggtgctcgaggatttccgggcccaccgggccccatcggtctgcaagggctgcccggacctcccggggagaaaggcgagaatggcgacgtcgggccaatgggaccccccgggcccccgggtccccgaggcccacaggggcccaacggagctgacgggcctcagggtccaccgggttctgtggggagcgtaggcggagttggcgagaaaggggagccaggcgaagctgggaaccccggaccaccgggggaagcaggggtaggaggcccgaagggagaaaggggtgaaaaaggggaagctggtcctccaggagccgctggaccacccggggcgaagggaccacccggcgacgatggaccaaaaggtaacccagggcccgtggggttccccggcgaccctggccctccaggcgaaccgggtcctgcaggccaggacggagtaggaggtgataagggagaggacggtgacccaggacaacctggaccccctggaccttcgggggaagcaggaccaccgggaccacccggtaaaagaggaccaccaggtgcagctggcgccgaaggcaggcagggtgagaaaggcgctaaaggagaagcaggggcagagggccctccaggtaagacaggacctgtgggaccccagggcccggccggcaaaccaggcccagaaggactccggggaataccagggcccgtgggtgagcagggccttccgggagcagcaggccaggacggaccaccaggacctatgggtcctccaggactacccggcctcaaaggggacccaggctcaaagggcgaaaaaggccatccaggcttaataggattgatcggccccccaggtgaacagggtgaaaaaggggaccgaggactcccgggcacgcagggcagccctggagcgaagggggacgggggtataccaggcccggcaggcccactgggacccccgggacctccaggactcccaggtccgcaaggcccaaaaggaaacaaagggtcgaccggcccagcgggacagaagggcgacagtggcctcccaggtccccctggctcaccaggaccccccggcgaagttatccaaccattgcccatactgagttcaaagaagaccaggagacacactgagggcatgcaagctgacgctgacgacaatatactagactattctgacggtatggaggaaatatttgggagcttgaattctctgaagcaagatattgaacacatgaaatttcccatggggacgcaaaccaaccccgctagaacgtgcaaagacctgcaactgtcacatcccgatttcccagacggagagtattggatagatccaaaccagggctgctccggagatagcttcaaggtctattgcaattttacttccgggggggagacttgtatctaccctgacaaaaaatctgaaggagtgcgaatatccagctggcctaaagaaaaacctggatcttggttctccgagtttaaacgaggaaaactcctttcctacctagatgtggagggcaactccattaacatggtgcaaatgaccttcttaaagcttttaacagcatcagcccgtcagaatttcacttatcattgtcaccagtccgcagcttggtacgatgtttccagcggttcttacgacaaggcattacgctttcttggtagcaatgacgaagaaatgagctacgataataatcccttcatcaagacactgtacgacggatgcgcatcgcggaagggctatgagaaaacagttattgagatcaatactcctaaaattgaccaagtgcccatagttgatgttatgattaatgacttcggggatcagaaccaaaaatttggattcgaggtggggccagtgtgctttttgggttag

SEQ ID NO: 337105 - RNA, 3081 nt, Artificial Sequence
  derived and/or modified sequence
augguauccgaggugagccgggaccuaaaggucaagcgcgagaaacugguaaaguuggcccaggaagggaaaauggcccuuaaggacccaaagguggaacaggcccaacuggagacccaggucuuacaggugaagcaggagaagcgcgaaaauuuagaauuccaggauuaucaagauauccaagaggauaaagugcagaggaucagcgaugugauuggaucaacaggguucccaggauuucccggagcaaauggagagaagggagcgaggggugucgcuggcaagccugggccuagagggcagagggggccuaccgguccacgcggaaguagaggcgcacgcggaccgaccggcaagccaggcccaaaagggacgucgggaggcgacgggccgccaggaccuccaggagaacguggaccccaggggccgcaggggccgguuggcuuucccgggccaaaggggccuccgggcccuccagggaaagacgggcuccccggacacccaggacaaagaggggagacgggauuucaggguaagacaggaccuccagggccagguggaguggucgguccacagggccccaccggggaaacagggccuauaggugaacggggccaccccgguccacccgggccgccgggcgaacagggccucccgggcgccgcuggaaaagaaggugcuaaaggcgauccaggcccacaagggauuucaggcaaggacgggccagcaggacuccgcgguuucccaggagagagaggucugcccggugcucagggagcuccaggucuuaaggguggcgagggcccacagggaccuccugggccaguuggcagucccggagagagagggagugccggaacugcagguccaaucggccuuccagggcggcccggcccccagggcccccccgggccugccggugaaaaaggggcccccggugaaaagggaccucaaggccccgcaggacgggacggggugcagggcccugugggcuugcccgguccagccgggcccgcugggucucccggcgaggacggggacaaaggcgaaaucggugaacccgggcagaaagguuccaaaggcgauaagggcgagaacgguccucccggaccaccugggcuacagggcccaguuggagccccagguauagccgggggugacggcgaaccagggccuaggggucagcaagguauguucgggcagaagggcgacgagggggcccggggcuucccuggaccuccuggccccauuggacuacagggucugccugguccaccuggugaaaagggcgagaauggcgacgugggcccgauggggcccccuggcccccccgggccaagggggccccagggaccuaacggugccgacggcccacagggcccaccugggagugucggaucugugggcggcgucggggagaagggcgaacccggcgaagcggguaacccgggacccccgggggaagccggggugggaggacccaaaggagaaagaggagaaaaaggggaagcugguccuccaggagccgcuggaccacccggggcgaagggaccacccggcgacgauggaccaaaagguaacccagggcccgugggguuccccggcgacccuggcccuccaggcgaaccggguccugcaggccaggacggaguaggaggugauaagggagaggacggugacccaggacaaccuggacccccuggaccuucgggggaagcaggaccaccgggaccacccgguaaaagaggaccaccaggugcagcuggcgccgaaggcaggcagggugagaaaggcgcuaaaggggaagcuggcgcugaagguccaccagggaaaacagggccgguggguccacagggccccgcugggaaacccgggcccgaaggucugcgaggaauaccuggccccgugggcgagcaggggcucccgggagcagcaggccaggacgguccgcccgggccgaugggcccuccuggccucccuggauuaaagggagacccugguagcaaaggagagaagggccauccuggccugauugggcugaucggaccuccuggagaacagggugagaagggagaucgagggcugcccggaacgcaggguagccccggcgccaaaggcgauggcgguauuccugggcccgcgggccccuugggaccuccuggcccccccggccugcccggaccucaggggccuaagggcaauaaagggagcacuggaccagccggccagaaaggugacucgggcuuacccgguccgccuggcucuccggggccuccgggugaaguaauacagccacucccaauucugagcucaaaaaagacgcgacggcacacugaggggaugcaggccgacgccgaugacaauauccucgauuacuccgaugggauggaagaaauuuucggaagccugaauagucugaagcaggacaucgaacauaugaaguucccuaugggaacgcagaccaauccagcccggaccuguaaagaucugcagcugucacaccccgauuucccugauggcgaauacuggaucgauccuaaccaggguuguucaggugauucuuuuaaggucuauuguaacuuuaccagcgggggugagaccugcaucuacccagauaaaaaaagugagggaguuagaauuagcucguggcccaaagagaaaccugguucaugguuuucagaguucaagaggggcaaguugcuuaguuaccucgacguagaggggaacuccaucaauaugguacagaugacauuccugaagcugcugaccgcuuccgccagacagaauuucacauaccacugccaucagagcgccgcaugguacgauguuaguuccgguaguuacgacaaagccuuacgguuucuuggaucaaacgacgaagagaugagcuacgacaauaauccauucauaaagacccuguacgacggcugcgcuucucgcaaggguuaugagaaaacugucauugaaaucaauaccccaaagaucgaccaaguuccaauuguggacgucaugaucaacgauuuuggagaccagaaccagaaguucgguuuugaagugggcccuguuuguuuuuugggcuag

SEQ ID NO: 337106 - RNA, 3081 nt, Artificial Sequence
  derived and/or modified sequence
auggucagugaagugucacgggaucugaaggugaagagagaaaagcuggucaagcuggcacaggagggcaaaauggcacugaaggaccccaagguagaacaggcacaacuagaaacacagguauuacagguuaaacaggaaaagcgcgaaaauuuggaguuccaggacuaccaggacauccaggaagauaagguucagcgcauuucugaugugauaggaagcacgggauuccccggcuuucccggagcuaacggggagaagggagcaagaggcguggcaggaaagcccgguccgcgaggucagaggggaccuacaggaccuagggggagucggggagcgcggggacccacggggaaaccagguccaaaagguacaagugggggcgacgggccucccggaccgccaggggagcggggaccacaagggccacaaggacccguggguuuuccuggaccaaaggggccacccggaccccccggcaaggacggacuccccggucacccaggucagaggggcgaaacaggauuccaggggaagacaggaccccccgguccaggcggaguagugggaccgcaggggccuacaggggagacagguccaaucggcgagcgcggacaccccgggccccccggacccccaggcgaacaaggacugccaggugccgccggcaaggagggagccaaaggugacccaggcccucaggggaucucaggcaaagauggucccgcugguuugaggggauuccccggcgaacgcggacuacccggagcccagggugccccaggucugaaaggcggggaagggccacaaggaccccccggcccuguggguucccccggugagagagguucagccgggacagcuggcccaauuggccuacccggccgccccggaccccagggucccccaggucccgcgggcgaaaagggcgcuccaggagaaaaagguccucagggccccgccgggcgagacggaguacaaggacccgugggucucccaggacccgcaggaccagcuggcagcccaggagaagacggagauaaaggcgaaauaggggagccaggccagaagggaucuaaaggcgauaagggcgagaacggacccccagggccuccaggacugcagggucccguuggcgcucccggaauagcagguggggacggugaaccgggaccgcgcggucagcaggguauguucggucagaaaggagaugagggugcucgaggauuuccgggcccaccgggccccaucggucugcaagggcugcccggaccucccggggagaaaggcgagaauggcgacgucgggccaaugggaccccccgggcccccggguccccgaggcccacaggggcccaacggagcugacgggccucaggguccaccggguucuguggggagcguaggcggaguuggcgagaaaggggagccaggcgaagcugggaaccccggaccaccgggggaagcagggguaggaggcccgaagggagaaaggggugaaaaaggggaagcugguccuccaggagccgcuggaccacccggggcgaagggaccacccggcgacgauggaccaaaagguaacccagggcccgugggguuccccggcgacccuggcccuccaggcgaaccggguccugcaggccaggacggaguaggaggugauaagggagaggacggugacccaggacaaccuggacccccuggaccuucgggggaagcaggaccaccgggaccacccgguaaaagaggaccaccaggugcagcuggcgccgaaggcaggcagggugagaaaggcgcuaaaggagaagcaggggcagagggcccuccagguaagacaggaccugugggaccccagggcccggccggcaaaccaggcccagaaggacuccggggaauaccagggcccgugggugagcagggccuuccgggagcagcaggccaggacggaccaccaggaccuauggguccuccaggacuacccggccucaaaggggacccaggcucaaagggcgaaaaaggccauccaggcuuaauaggauugaucggccccccaggugaacagggugaaaaaggggaccgaggacucccgggcacgcagggcagcccuggagcgaagggggacggggguauaccaggcccggcaggcccacugggacccccgggaccuccaggacucccagguccgcaaggcccaaaaggaaacaaagggucgaccggcccagcgggacagaagggcgacaguggccucccaggucccccuggcucaccaggaccccccggcgaaguuauccaaccauugcccauacugaguucaaagaagaccaggagacacacugagggcaugcaagcugacgcugacgacaauauacuagacuauucugacgguauggaggaaauauuugggagcuugaauucucugaagcaagauauugaacacaugaaauuucccauggggacgcaaaccaaccccgcuagaacgugcaaagaccugcaacugucacaucccgauuucccagacggagaguauuggauagauccaaaccagggcugcuccggagauagcuucaaggucuauugcaauuuuacuuccgggggggagacuuguaucuacccugacaaaaaaucugaaggagugcgaauauccagcuggccuaaagaaaaaccuggaucuugguucuccgaguuuaaacgaggaaaacuccuuuccuaccuagauguggagggcaacuccauuaacauggugcaaaugaccuucuuaaagcuuuuaacagcaucagcccgucagaauuucacuuaucauugucaccaguccgcagcuugguacgauguuuccagcgguucuuacgacaaggcauuacgcuuucuugguagcaaugacgaagaaaugagcuacgauaauaaucccuucaucaagacacuguacgacggaugcgcaucgcggaagggcuaugagaaaacaguuauugagaucaauacuccuaaaauugaccaagugcccauaguugauguuaugauuaaugacuucggggaucagaaccaaaaauuuggauucgagguggggccagugugcuuuuuggguuag

SEQ ID NO: 337107 - DNA, 453 bp, Artificial Sequence
  derived and/or modified sequence
agctcgggcgagcggcgagcacaggccacgggagctgagcgcagcagagagcagccggagtccgcgcctgactccgcgcgggtcctgagccggccgcagcttgccaggatccccggcgtccttctcgcgccgcttcacgaagagggcgccttcgccgctcgcccagccggagtgcgcacgggcccgctggaaaccgcactcgccgctccctgggcaggccggggcacccgggcacgcagggcgcgcctggcgagcgccccgggagggataagccccagctccgggtcctcgactctgctgcctcgcctggactcctgattcctcattcctctcctttccgtcccaggcggcgtgcaggaccagcggcggccgtgcaggcggaggacttcggcgcggctcctcctgggtgtgaccccgggcgcgcccgccgcgcgacgatgagggcgcggccgc

SEQ ID NO: 337108 - DNA, 627 bp, Artificial Sequence
  derived and/or modified sequence
atgagccccaccaaggacagccaccccagcccccacttcccccgggattcaggcattcacgcccccactccgcccgatagcggagccctgaccctgagccctcctgtgtcccagggccccggcgttgggccacggacaggacgcggcaatcgtctgtgtcgaccacctggacgcagtgccgctcgatcattctgcctgctgcccggtcctccgctggggaccggcgccttgggatcccccagagcagctcaagggctcggtttccggggatccggacagagggcgcgccacaacagctttacttctccatctccacccggagcccatcatccactcggcacgcacacccgggcactgccgcctcctttagcacgttgcccatgcgccgccctactggccgggcgagaatgtcacgggggcccgtcaccagccgctcctcggccactgcctggaacatcgttaacctggccgtcacgagcccccctcccacgccctccgccccgggagcggcagggccccggcgatagatcgccaagtccctcagccccgtcgtgccccggggtgggagcctcaagtcctaggcgcagaaaacctcgtgaagcagccgggctgacaccagacgggtag

SEQ ID NO: 337109 - DNA, 4815 bp, Artificial Sequence
  derived and/or modified sequence
atgtgggtgagctgggcccccggcctgtggctgctgggcctgtgggccaccttcggccacggcgccaacaccggcgcccagtgcccccccagccagcaggagggcctgaagctggagcacagcagcagcctgcccgccaacgtgaccggcttcaacctgatccacagactgagcctgatgaagaccagcgccatcaagaagatcagaaaccccaagggccccctgatcctgagactgggcgccgcccccgtgacccagcccaccagaagagtgttccccagaggcctgcccgaggagttcgccctggtgctgaccctgctgctgaagaagcacacccaccagaagacctggtacctgttccaggtgaccgacgccaacggctacccccagatcagcctggaggtgaacagccaggagagaagcctggagctgagagcccagggccaggacggcgacttcgtgagctgcatcttccccgtgccccagctgttcgacctgagatggcacaagctgatgctgagcgtggccggcagagtggccagcgtgcacgtggactgcagcagcgccagcagccagcccctgggccccagaagacccatgagacccgtgggccacgtgttcctgggcctggacgccgagcagggcaagcccgtgagcttcgacctgcagcaggtgcacatctactgcgaccccgagctggtgctggaggagggctgctgcgagatcctgcccgccggctgcccccccgagaccagcaaggccagaagagacacccagagcaacgagctgatcgagatcaacccccagagcgagggcaaggtgtacaccagatgcttctgcctggaggagccccagaacagcgaggtggacgcccagctgaccggcagaatcagccagaaggccgagagaggcgccaaggtgcaccaggagaccgccgccgacgagtgccccccctgcgtgcacggcgccagagacagcaacgtgagcgagtggagagtgggccccgagggcggcaagggcgagagaggcctgcccggcccccccggcagcaagggcgagaagggcgccagaggcaacgactgcgtgagaatcagccccgacgcccccctgcagtgcgccgagggccccaagggcgagaagggcgagagcggcgccctgggccccagcggcctgcccggcagcaccggcgagaagggccagaagggcgagaagggcgacggcggcatcaagggcgtgcccggcaagcccggcagagacggcagacccggcgagatctgcgtgatcggccccaagggccagaagggcgaccccggcttcgtgggccccgagggcctggccggcgagcccggcccccccggcctgcccggcccccccggcatcggcctgcccggcacccccggcgaccccggcggcccccccggccccaagggcgacaagggcagcagcggcatccccggcaaggagggccccggcggcaagcccggcaagcccggcgtgaagggcgagaagggcgacccctgcgaggtgtgccccaccctgcccgagggcttccagaacttcgtgggcctgcccggcaagcccggccccaagggcgagcccggcgaccccgtgcccgccagaggcgaccccggcatccagggcatcaagggcgagaagggcgagccctgcctgagctgcagcagcgtggtgggcgcccagcacctggtgagcagcaccggcgccagcggcgacgtgggcagccccggcttcggcctgcccggcctgcccgtgaaggccggcgtgcccggcctgagccccggcggcaacttcggcgaggccggccccgccggcagccccggcccccccggccccgtgggccccgccggcatcaagggcgccaagggcgagccctgcgagccctgccccgccctgagcaacctgcaggacggcgacgtgagagtggtggccctgcccggccccagcggcgagaagggcgagcccggcccccccggcttcggcctgcccggcaagcagggcaaggccggcgagagaggcctgaagggccagaagggcgacgccggcaaccccggcgaccccggcacccccggcaccaccggcagacccggcctgagcggcgagcccggcgtgcagggccccgccggccccaagggcgagaagggcgacggctgcaccgcctgccccagcctgcagggcaccgtgaccgacatggccggcagacccggccagcccggccccaagggcgagcagggccccgagggcgtgggcagacccggcaagcccggccagcccggcctgcccggcgtgcagggcccccccggcctgaagggcgtgcagggcgagcccggcccccccggcagaggcgtgcagggcccccagggcgagcccggcgcccccggcctgcccggcatccagggcctgcccggccccagaggcccccccggccccaccggcgagaagggcgcccagggcagccccggcgtgaagggcgccaccggccccgtgggcccccccggcgccagcgtgagcggcccccccggcagagacggccagcagggccagaccggcctgagaggcacccccggcgagaagggccccagaggcgagaagggcgagcccggcgagtgcagctgccccagccagggcgacctgatcttcagcggcatgcccggcgcccccggcctgtggatgggcagcagctggcagcccggcccccagggcccccccggcatccccggcccccccggcccccccggcgtgcccggcctgcagggcgtgcccggcaacaacggcctgcccggccagcccggcctgaccgccgagctgggcgccctggccctgggcagccactggggcagccccagcatctgcggcgactgcgtgcagggccagagagcccaccccggctacctggtggagaagggcgagaagggcgaccagggcatccccggcgtgcccggcctggacaactgcgcccagtgcttcctgagcctggagagacccagagccgaggaggccagaggcgacaacagcgagggcgaccccggctgcgtgggcagccccggcctgcccggcccccccggcctgcccggccagagaggcgaggagggcccccccggcatgagaggcagccccggcccccccggccccatcggcccccccggcttccccggcgccgtgggcagccccggcctgcccggcctgcagggcgagagaggcctgaccggcctgaccggcgacaagggcgagcccggcccccccggccagcccggctaccccggcgccaccggcccccccggcctgcccggcatcaagggcgagagaggctacaccggcagcgccggcgagaagggcgagcccggcccccccggcagcgagggcctgcccggcccccccggccccgccggccccagaggcgagagaggcccccagggcaacagcggcgagaagggcgaccagggcttccagggccagcccggcttccccggcccccccggcccccccggcttccccggcaaggtgggcagccccggcccccccggcccccaggccgagaagggcagcgagggcatcagaggccccagcggcctgcccggcagccccggcccccccggcccccccggcatccagggccccgccggcctggacggcctggacggcaaggacggcaagcccggcctgagaggcgaccccggccccgccggcccccccggcctgatgggcccccccggcttcaagggcaagaccggccaccccggcctgcccggccccaagggcgactgcggcaagcccggcccccccggcagcaccggcagacccggcgccgagggcgagcccggcgccatgggcccccagggcagacccggcccccccggccacgtgggcccccccggcccccccggccagcccggccccgccggcatcagcgccgtgggcctgaagggcgacagaggcgccaccggcgagagaggcctggccggcctgcccggccagcccggcccccccggccaccccggcccccccggcgagcccggcaccgacggcgccgccggcaaggagggcccccccggcaagcagggcttctacggcccccccggccccaagggcgaccccggcgccgccggccagaagggccaggccggcgagaagggcagagccggcatgcccggcggccccggcaagagcggcagcatgggccccgtgggcccccccggccccgccggcgagagaggccaccccggcgcccccggccccagcggcagccccggcctgcccggcgtgcccggcagcatgggcgacatggtgaactacgacgagatcaagagattcatcagacaggagatcatcaagatgttcgacgagagaatggcctactacaccagcagaatgcagttccccatggagatggccgccgcccccggcagacccggcccccccggcaaggacggcgcccccggcagacccggcgcccccggcagccccggcctgcccggccagatcggcagagagggcagacagggcctgcccggcgtgagaggcctgcccggcaccaagggcgagaagggcgacatcggcatcggcatcgccggcgagaacggcctgcccggcccccccggcccccagggcccccccggctacggcaagatgggcgccaccggccccatgggccagcagggcatccccggcatccccggcccccccggccccatgggccagcccggcaaggccggccactgcaaccccagcgactgcttcggcgccatgcccatggagcagcagtacccccccatgaagaccatgaagggccccttcggctag

SEQ ID NO: 337110 - DNA, 4815 bp, Artificial Sequence
  derived and/or modified sequence
atgtgggtgagctgggcccccggcctgtggctgctgggcctgtgggccaccttcggccacggcgccaacaccggcgcccagtgcccccccagccagcaggagggcctgaagctggagcacagcagcagcctgcccgccaacgtgaccggcttcaacctgatccacagactgagcctgatgaagaccagcgccatcaagaagatcagaaaccccaagggccccctgatcctgagactgggcgccgcccccgtgacccagcccaccagaagagtgttccccagaggcctgcccgaggagttcgccctggtgctgaccctgctgctgaagaagcacacccaccagaagacctggtacctgttccaggtgaccgacgccaacggctacccccagatcagcctggaggtgaacagccaggagagaagcctggagctgagagcccagggccaggacggcgacttcgtgagctgcatcttccccgtgccccagctgttcgacctgagatggcacaagctgatgctgagcgtggccggcagagtggccagcgtgcacgtggactgcagcagcgccagcagccagcccctgggccccagaagacccatgagacccgtgggccacgtgttcctgggcctggacgccgagcagggcaagcccgtgagcttcgacctgcagcaggtgcacatctactgcgaccccgagctggtgctggaggagggctgctgcgagatcctgcccgccggctgcccccccgagaccagcaaggccagaagagacacccagagcaacgagctgatcgagatcaacccccagagcgagggcaaggtgtacaccagatgcttctgcctggaggagccccagaacagcgaggtggacgcccagctgaccggcagaatcagccagaaggccgagagaggcgccaaggtgcaccaggagaccgccgccgacgagtgccccccctgcgtgcacggcgccagagacagcaacgtgaccctggcccccagcggccccaagggcggcaagggcgagagaggcctgcccggcccccccggcagcaagggcgagaagggcgccagaggcaacgactgcgtgagaatcagccccgacgcccccctgcagtgcgccgagggccccaagggcgagaagggcgagagcggcgccctgggccccagcggcctgcccggcagcaccggcgagaagggccagaagggcgagaagggcgacggcggcatcaagggcgtgcccggcaagcccggcagagacggcagacccggcgagatctgcgtgatcggccccaagggccagaagggcgaccccggcttcgtgggccccgagggcctggccggcgagcccggcccccccggcctgcccggcccccccggcatcggcctgcccggcacccccggcgaccccggcggcccccccggccccaagggcgacaagggcagcagcggcatccccggcaaggagggccccggcggcaagcccggcaagcccggcgtgaagggcgagaagggcgacccctgcgaggtgtgccccaccctgcccgagggcttccagaacttcgtgggcctgcccggcaagcccggccccaagggcgagcccggcgaccccgtgcccgccagaggcgaccccggcatccagggcatcaagggcgagaagggcgagccctgcctgagctgcagcagcgtggtgggcgcccagcacctggtgagcagcaccggcgccagcggcgacgtgggcagccccggcttcggcctgcccggcctgcccggcagagccggcgtgcccggcctgaagggcgagaagggcaacttcggcgaggccggccccgccggcagccccggcccccccggccccgtgggccccgccggcatcaagggcgccaagggcgagccctgcgagccctgccccgccctgagcaacctgcaggacggcgacgtgagagtggtggccctgcccggccccagcggcgagaagggcgagcccggcccccccggcttcggcctgcccggcaagcagggcaaggccggcgagagaggcctgaagggccagaagggcgacgccggcaaccccggcgaccccggcacccccggcaccaccggcagacccggcctgagcggcgagcccggcgtgcagggccccgccggccccaagggcgagaagggcgacggctgcaccgcctgccccagcctgcagggcaccgtgaccgacatggccggcagacccggccagcccggccccaagggcgagcagggccccgagggcgtgggcagacccggcaagcccggccagcccggcctgcccggcgtgcagggcccccccggcctgaagggcgtgcagggcgagcccggcccccccggcagaggcgtgcagggcccccagggcgagcccggcgcccccggcctgcccggcatccagggcctgcccggccccagaggcccccccggccccaccggcgagaagggcgcccagggcagccccggcgtgaagggcgccaccggccccgtgggcccccccggcgccagcgtgagcggcccccccggcagagacggccagcagggccagaccggcctgagaggcacccccggcgagaagggccccagaggcgagaagggcgagcccggcgagtgcagctgccccagccagggcgacctgatcttcagcggcatgcccggcgcccccggcctgtggatgggcagcagctggcagcccggcccccagggcccccccggcatccccggcccccccggcccccccggcgtgcccggcctgcagggcgtgcccggcaacaacggcctgcccggccagcccggcctgaccgccgagctgggcagcctgcccatcgagcagcacctgctgaagagcatctgcggcgactgcgtgcagggccagagagcccaccccggctacctggtggagaagggcgagaagggcgaccagggcatccccggcgtgcccggcctggacaactgcgcccagtgcttcctgagcctggagagacccagagccgaggaggccagaggcgacaacagcgagggcgaccccggctgcgtgggcagccccggcctgcccggcccccccggcctgcccggccagagaggcgaggagggcccccccggcatgagaggcagccccggcccccccggccccatcggcccccccggcttccccggcgccgtgggcagccccggcctgcccggcctgcagggcgagagaggcctgaccggcctgaccggcgacaagggcgagcccggcccccccggccagcccggctaccccggcgccaccggcccccccggcctgcccggcatcaagggcgagagaggctacaccggcagcgccggcgagaagggcgagcccggcccccccggcagcgagggcctgcccggcccccccggccccgccggccccagaggcgagagaggcccccagggcaacagcggcgagaagggcgaccagggcttccagggccagcccggcttccccggcccccccggcccccccggcttccccggcaaggtgggcagccccggcccccccggcccccaggccgagaagggcagcgagggcatcagaggccccagcggcctgcccggcagccccggcccccccggcccccccggcatccagggccccgccggcctggacggcctggacggcaaggacggcaagcccggcctgagaggcgaccccggccccgccggcccccccggcctgatgggcccccccggcttcaagggcaagaccggccaccccggcctgcccggccccaagggcgactgcggcaagcccggcccccccggcagcaccggcagacccggcgccgagggcgagcccggcgccatgggcccccagggcagacccggcccccccggccacgtgggcccccccggcccccccggccagcccggccccgccggcatcagcgccgtgggcctgaagggcgacagaggcgccaccggcgagagaggcctggccggcctgcccggccagcccggcccccccggccaccccggcccccccggcgagcccggcaccgacggcgccgccggcaaggagggcccccccggcaagcagggcttctacggcccccccggccccaagggcgaccccggcgccgccggccagaagggccaggccggcgagaagggcagagccggcatgcccggcggccccggcaagagcggcagcatgggccccgtgggcccccccggccccgccggcgagagaggccaccccggcgcccccggccccagcggcagccccggcctgcccggcgtgcccggcagcatgggcgacatggtgaactacgacgagatcaagagattcatcagacaggagatcatcaagatgttcgacgagagaatggcctactacaccagcagaatgcagttccccatggagatggccgccgcccccggcagacccggcccccccggcaaggacggcgcccccggcagacccggcgcccccggcagccccggcctgcccggccagatcggcagagagggcagacagggcctgcccggcgtgagaggcctgcccggcaccaagggcgagaagggcgacatcggcatcggcatcgccggcgagaacggcctgcccggcccccccggcccccagggcccccccggctacggcaagatgggcgccaccggccccatgggccagcagggcatccccggcatccccggcccccccggccccatgggccagcccggcaaggccggccactgcaaccccagcgactgcttcggcgccatgcccatggagcagcagtacccccccatgaagaccatgaagggccccttcggctag

SEQ ID NO: 337111 - DNA, 4815 bp, Artificial Sequence
  derived and/or modified sequence
atgtgggtcagctgggccccaggtttgtggctcctcggtttatgggcaacatttggacatggagctaacactggcgctcagtgtccgccctctcagcaagaaggcctgaagctggagcacagttcgtctctacctgccaatgtcacgggctttaacctgattcaccggctgagtctcatgaaaacttctgccattaaaaagatccggaatcccaaaggacctctgatactgaggctcggggcagcccccgtaacacagcctactagacgggtctttccacgcggtttgccagaggaatttgccttagttcttaccctcttgctgaaaaagcatacccaccagaagacctggtatcttttccaggtcacggacgctaatgggtacccacagatttcattagaggttaattctcaggaacgtagcttggaactccgagcccagggccaggacggtgacttcgtatcctgtattttccccgtcccccagcttttcgatctgaggtggcacaaattaatgctttccgtggccggccgggtcgccagtgtgcatgtcgattgcagtagtgcctccagccagcccttagggcctcggagaccaatgcgcccagtgggtcatgtattcctgggacttgacgccgaacaaggtaagcctgtgagctttgacctccagcaagtgcacatatattgcgaccccgagctcgtgctggaggagggttgctgcgaaatcctgcctgcaggatgtcctccagagacgagcaaggctcgaagggacacccaatctaacgaactaatcgaaataaatcctcagtctgagggaaaagtgtacacgaggtgcttttgtcttgaggagcctcagaatagcgaagtggacgcgcaactcactgggagaattagccagaaggccgaaagaggtgctaaggtgcatcaggaaactgctgccgatgagtgtcctccctgcgtccacggcgcaagagacagcaatgtgagcgaatggagggtgggtcccgagggaggcaagggtgagcggggtttaccagggcctcctggcagcaagggcgagaaaggtgccaggggaaacgactgcgttcgcatctctcctgacgctcccctacagtgcgcggagggccccaagggcgagaagggagagtcaggagctctgggtcctagtggactgccagggtctacgggggagaagggccagaagggcgagaaaggggacggcggcatcaagggtgttccaggaaaaccagggagggacggacgccctggagaaatctgcgtgatcgggcccaaggggcaaaagggggatccggggttcgtggggcctgaggggctggcgggagagcctggacctcctggcctacctggacccccaggaattggccttcccgggaccccaggcgatcccggcggaccaccgggccccaaaggagacaaaggctccagcggaatacctggaaaagaggggccaggcggtaagcccggaaagcccggcgttaaaggagaaaaaggagacccctgtgaggtgtgtcccactttgcctgagggtttccagaacttcgtgggactgcctgggaagcctggcccaaagggggagcccggggacccagttcctgcccgcggcgatcccggcattcagggtattaaaggcgaaaaaggagaaccttgtctgtcgtgctcaagcgtggtgggcgctcaacacctggtgtcgtccaccggtgcctctggagatgtggggtctcctggcttcggccttcctggactaccagttaaggcgggggttcctggcctcagccctggcggtaattttggagaagcaggtcccgcaggaagtccaggtcccccgggcccagtgggtcccgccggtatcaaaggcgccaaaggagaaccttgtgagccttgtccagctctgagcaacctgcaagatggagacgtacgtgtagtagcactgcctgggcccagcggcgagaaaggggagcctggaccacctgggttcgggcttcccggcaagcagggaaaagctggcgagcgtggcctgaagggtcaaaaaggggatgcaggcaaccccggggatcctggcacacctggcacgaccggcaggccaggcctgagtggggagccaggagtgcagggcccagctgggcctaagggagaaaagggtgatggatgtaccgcatgtcccagtctgcagggcacggtaacagatatggctggtcgcccggggcagcctggccccaaaggcgaacagggtccagagggcgttggacgccctggaaagccggggcaaccaggtcttccaggggtgcagggaccccccgggttgaaaggcgtacaaggggagccaggcccccctggacgcggcgtgcagggcccacagggtgagccaggtgcacccgggctgccggggattcagggcctgccagggcctcggggtcctccaggtccaacaggtgagaaaggagcccagggctctcctggggtgaagggcgctacgggccctgtgggtccgcctggggccagtgtcagcggacctcccgggagggacggccagcagggccagacaggactacgcggcacacctggagaaaaaggccccagaggagagaagggggagcctggcgaatgtagttgtccttcccaaggtgaccttattttcagtggcatgccaggtgcgcccgggctctggatgggaagcagctggcagcctgggccccagggcccgccgggcattccaggacctcctggccctcccggcgtacctggtttacagggtgtgcctggaaataacggccttcccggtcagccaggcctgaccgcagagctgggagccctggccctggggagtcattggggcagcccaagtatctgtggcgactgcgtgcagggtcagagagcacatccggggtatctggtggagaaaggcgagaagggcgaccagggcattccgggcgtgcctggcctggacaattgtgcccagtgtttcctttcacttgaaagaccacgggccgaagaggcacggggggacaactctgaaggggatcctggctgcgtgggatctcccggcctcccagggcctcctggtcttcccggacagagaggagaggagggaccccctgggatgcgcggctctcctggtccccctggcccaatcggccctccaggcttcccaggcgccgtcggcagcccagggctgcccggactgcagggggaacgcggattgactggactaactggggacaagggtgagcctggtccaccaggccaaccagggtatcccggcgccacagggccccccggcctccccggcatcaaaggcgagcgaggttataccggaagcgccggggagaaaggcgagccagggccacctggatctgagggactacctggccctccaggcccggctggacccaggggcgaaagaggaccacaagggaatagcggggagaaaggcgatcagggttttcaggggcagccgggcttccctggcccccccggtccaccaggttttccaggaaaggtcggttcacctggcccacccggaccccaagctgaaaagggatctgagggtatcaggggcccatcaggattgcctggcagccccggccctcctggacccccgggaattcaaggccctgcggggctcgacggacttgatggtaaagatggaaaacccggcctgagaggagaccctggtcctgcgggcccaccaggactgatggggccccctggatttaaaggcaaaacgggtcaccctggtctaccaggtccgaagggtgactgtggaaaacccggcccccccggaagtaccgggagacctggtgccgagggagagccaggggcgatgggaccacagggccggccagggccgccaggacacgtgggcccacccggccctcctgggcagcccggacccgccggcatttcagctgtggggttaaagggagaccgcggcgctacgggcgagcggggtctcgcggggctgcccggccagcctggcccgccaggccaccccgggccacctggggaaccaggtacagatggagcagcaggcaaagagggaccaccaggcaaacaaggcttctacgggcctccaggcccgaagggggatcctggcgcagctggtcagaagggacaggctggtgagaaggggcgggctggaatgcctgggggcccgggaaagagtggcagtatggggcccgtggggccccccgggccggccggggagagggggcaccctggggccccaggtccttctggatcacccggcctacctggggtgccaggcagtatgggtgacatggtgaactacgatgaaatcaaacggtttatcagacaggagattattaagatgttcgacgaacgaatggcatattacacttcccgtatgcaatttccgatggagatggcagccgctccgggccgcccaggtcctcccggcaaggatggagccccaggccgcccgggggcgcccgggtcacccgggctgccaggccagattgggcgagaaggacgccagggtcttccaggcgtgagaggtctccctggtactaagggggagaaaggggatattggcattggaatcgccggtgaaaacggactgcccggaccgcccggcccacaaggcccgcccggctatggcaagatgggcgcgactggaccaatgggccagcagggaatcccaggaatcccaggacccccaggacccatggggcagccaggcaaggcagggcattgtaatcctagtgactgtttcggggccatgcctatggagcagcagtacccacccatgaagacaatgaagggacccttcggatag

SEQ ID NO: 337112 - DNA, 4815 bp, Artificial Sequence
  derived and/or modified sequence
atgtgggtgagttgggccccaggactctggttgttgggactgtgggccaccttcggacacggtgcgaatactggtgcacagtgtcctccgtcccaacaggagggactaaaactcgagcactcatccagtttgccagccaatgtgacagggttcaatttaatccatcgcctctccctgatgaagacttctgccattaaaaaaataaggaatcccaagggaccactcatactaagactgggcgctgctccagttacccagccaaccagaagggttttccctaggggactcccagaagagtttgctctggtacttacgctcttacttaagaagcatacgcatcaaaagacttggtatttatttcaggtgacggacgccaatggctacccacagattagcctcgaagtgaacagtcaagaaaggagcctcgagctgcgagcacagggacaagacggggacttcgtgagttgcattttcccagtgcctcagttattcgacctgaggtggcataaactgatgttaagcgttgccgggagagtagcatctgtgcacgttgactgcagctccgctagctctcaacctctcggacccaggcgccctatgcggcccgtggggcacgtgtttctcggtctcgacgcagaacagggaaaaccggtcagctttgatcttcagcaggtacacatctattgcgatcccgagctggttttggaagaggggtgctgcgagatcctgcccgctggatgtccaccagaaacctccaaggctcggagggacacccagtccaatgaactgattgagatcaaccctcagtctgagggtaaggtttatacacggtgtttttgtctggaggagccgcagaactcggaggtcgacgctcagcttacgggccggatctctcagaaggcagaacggggggcaaaggttcaccaagaaaccgcggcagatgagtgccccccgtgtgtccatggggctcgggattccaacgtgaccttagcaccaagcgggccaaaagggggaaagggagaaagaggcctgcctgggcccccaggcagcaagggagagaaaggcgcgagaggtaacgattgcgtacggatttctcctgacgccccacttcaatgtgccgaaggtccgaagggtgagaaaggggagtccggagctctgggcccctccggccttccaggctctaccggcgaaaagggacagaagggcgaaaaaggagacggcggcatcaaaggcgtgccaggtaagccgggtagggacgggcgccctggagagatttgcgtgatcggcccaaaaggacagaagggagatcccgggtttgtcgggccggagggcctggccggggaacccggaccacctgggcttccagggccccccggaatcggtttgccagggacgccgggcgatccaggaggacccccaggacccaagggtgacaagggcagttccggcatacccggcaaggaaggtcccggcggtaagccagggaaacccggagtgaaaggtgaaaagggcgatccctgcgaggtgtgccctactctacctgagggtttccagaactttgtgggcctccccggcaagcctgggcctaaaggcgagccaggcgatcctgtgcctgcccggggagatccgggcattcagggcattaagggggaaaaaggagagccctgtttgagttgcagttctgtggtcggcgcccagcatctagtcagttctaccggagcgtctggcgacgttgggtctccaggattcggactgccaggtttacctggccgggccggagtgcctggcttaaagggtgagaagggtaacttcggggaagctggccccgccggctcccctggcccaccgggtcctgtcgggccagcaggtattaagggcgccaaaggggagccgtgtgaaccctgtcctgctctgtcgaacctgcaggacggggatgtcagagttgttgcccttcccgggccctccggagaaaaaggtgagccaggtcctcctggcttcgggctgcctggcaagcaaggaaaggctggtgaacgaggactgaaaggacagaagggagatgcgggcaatcctggggaccccggcacccctggtactaccggtagacccggtctgtctggcgagccgggcgtgcagggaccggccggcccaaaaggggaaaagggggacgggtgcacggcatgtcccagcctccagggaaccgttactgacatggccggtcgccctggacagcctggtcccaaaggagaacaaggcccagagggagttggccggcccggtaagcctggccaacctggacttcccggggtgcaggggccaccaggcctgaagggagtgcagggcgaaccaggacctcccggacggggagtgcaggggccgcaaggagaaccaggtgccccaggcttaccaggtatccaaggcctccccggtcccaggggtcccccggggcctacaggggaaaagggagcacaggggtccccaggggtaaaaggagccacaggacccgtcggacctccaggggcttcagtttctggccccccggggagagatggacagcagggacagaccggcttgcgcggtaccccaggtgagaagggaccaagaggagagaagggcgaacccggtgaatgtagctgtcccagccagggggacctcattttttcaggtatgccaggtgcccctggactttggatgggctcttcgtggcaacctggaccacagggccctccgggcatcccgggtcccccagggccccccggagtgccaggtctgcagggggtacctggcaacaatggcctgccaggtcagcccggcctcacagctgagctgggatccctgcctattgagcagcacctgttaaagtccatatgcggtgattgtgtacagggacagcgcgctcaccccggttacctggtcgagaaaggggagaaaggagatcaaggaatacccggagtgcctggtctggataactgcgctcagtgcttcctcagtctggagcgaccacgcgcagaggaagctcgtggcgacaatagcgagggcgaccccggatgtgtgggaagcccggggctgccagggccccccggtctcccaggacagcgaggggaggagggcccccctgggatgcgcggctccccaggaccccccggacccattggacctcctggtttccctggagcagtgggcagcccaggtcttcccggccttcagggtgagcgaggccttaccggactaactggtgataaaggtgagcctggccccccaggtcagccggggtatcccggggccaccggacccccaggattgccggggattaaaggtgagagaggctacaccgggagtgccggcgaaaagggagagccaggaccacctggcagcgaggggctgcctggccctccagggccagcaggccctagaggggagcggggccctcagggaaactcaggcgaaaagggtgatcaaggcttccaggggcagcctggcttccccggacctccaggacccccagggttcccgggtaaagtaggaagccccggaccgccagggccacaagccgaaaaggggagcgagggaatacgcggaccgtcaggcctgcccggtagtccaggaccacctggtccacccggcattcagggtcccgcgggtttagacggactcgacggcaaggatggcaagcctggcctccgaggcgatcccgggcccgctggaccaccaggcctgatgggccctcctgggtttaagggcaagactgggcaccctggcctcccgggacctaagggcgactgcggaaaaccaggaccacccgggagcaccgggcgtcccggagcagaaggcgaacccggtgctatggggccacagggacggcctggaccaccaggtcatgttggccctcccggcccccccgggcagccaggtcccgccggtattagcgctgtagggctgaaaggagaccggggagcaaccggagagcgaggccttgctggactcccaggccaacccgggccacctggccatcctgggcccccgggcgaacctggaacagacggggcagccggcaaggagggacctcctggcaaacagggattttacggtcctccagggcccaaaggcgatcccggtgccgcaggacagaaagggcaggccggagagaaaggcagagctggcatgcccggcggaccaggcaagtctgggtctatggggccagtcggtcctcccgggcctgctggcgagcgcggccacccaggcgctccaggtccttctggttccccaggcctgcccggtgtgcccggctcaatgggcgatatggttaattacgacgagataaaaaggttcattcgacaagagatcatcaaaatgttcgatgagagaatggcatactacacttcaagaatgcagtttcctatggagatggccgccgctcctggacgacccgggccccccggtaaggacggcgcaccagggcggcccggcgctccgggcagtcctggcttgcccggtcaaatcggccgagagggccggcagggactccctggggtccggggtttaccaggcacaaaaggagaaaaaggcgatattgggatcggcattgccggcgagaacggattgccagggccacccggaccccagggcccacctggatacggaaaaatgggcgccaccgggcctatgggccagcaggggatcccaggaattccaggccctccaggccccatggggcaacctgggaaggcgggccactgcaacccttccgactgcttcggtgcgatgcctatggaacagcagtatcccccaatgaaaactatgaagggacctttcgggtag

SEQ ID NO: 337113 - DNA, 4815 bp, Artificial Sequence
  derived and/or modified sequence
atgtgggtgtcctgggcccctggcctgtggctgctgggcctgtgggccaccttcggccacggggccaacacaggagcccagtgcccccccagccagcaggagggcctgaagctggagcacagcagcagcctgcctgccaacgtgacaggcttcaacctgatccaccggctgagcctgatgaagaccagcgccatcaagaagatccggaaccccaagggccccctcatcctgcggctgggcgccgcccctgtgacccagcccaccaggagggtcttcccccggggcctgcctgaggagtttgccctggtgctgaccctgctgctgaagaagcacacccaccagaagacctggtacctgttccaggtgacagatgccaacggctacccccagatcagcctggaggtgaacagccaggagaggagcctggagctgcgggcccagggccaggatggagactttgtgtcctgcatcttccctgtgccccagctgtttgacctgcgctggcacaagctgatgctgtctgtggccggccgggtggcctctgtgcacgtggactgcagcagcgccagcagccagcccctgggcccccggcggcccatgaggcctgtgggccacgtgttcctgggcctggatgctgagcagggcaagcctgtgtcctttgacctgcagcaggtgcacatctactgtgaccctgagctggtgctggaggagggctgctgtgagatcctgcctgctggctgccccccagagaccagcaaggcccggcgggacacccagagcaatgaactcatcgagatcaacccccagagcgagggcaaggtgtacacccgctgcttctgcctggaggagccccagaacagcgaggtggatgcccagctgaccggccgcatcagccagaaggccgagcggggggccaaggtgcaccaggagacagctgctgatgaatgtcctccctgtgtgcatggagcccgggacagcaatgtgtctgagtggagggtgggccctgagggcggcaaaggagagcggggcctgcccggccccccaggcagcaaaggagagaagggggcccggggaaatgactgtgtgcgcatcagcccagatgcccccctgcagtgtgccgagggccccaagggggagaagggggagagcggggccctgggccccagcggcctgcccggcagcactggagagaagggccagaagggggagaagggagatggcggcatcaagggcgtgcctgggaagccaggaagagatggccggcctggagagatctgtgtgattggccccaagggccagaagggggaccccggctttgtgggccctgagggcctggccggggagcccggccccccaggcctgcccggccccccaggcatcggcctgcccggcacccctggggaccccggcggccccccaggccccaagggggacaagggcagcagcggcatccctgggaaggagggccctgggggcaagccaggcaagccaggagtgaagggggagaagggggacccctgtgaggtgtgccccaccctgcctgagggcttccagaactttgtgggcctgcccgggaagccaggccccaagggggagcccggggaccctgtgcctgcccggggggaccccggcatccagggcatcaagggggagaagggggagccctgcctgagctgcagctctgtggtgggcgcccagcacctggtgagcagcactggagccagcggagatgtgggcagccctggcttcggcctgcccggcctgcctgtgaaggccggcgtgcccggcctgagccctgggggcaactttggagaggccggccctgctggcagccctggccccccaggccctgtgggccctgctggcatcaagggggccaagggggagccctgtgagccctgcccagccctgagcaacctgcaggatggagatgtgcgggtggtggccctgcccggccccagcggggagaagggggagcccggccccccaggcttcggcctgcccgggaagcagggcaaggccggggagcggggcctgaagggccagaagggagatgctggcaaccctggggaccccggcaccccaggcaccaccggccggcccggcctgagcggggagcccggggtgcagggccctgctggccccaagggggagaagggagatggctgcacagcctgccccagcctgcagggcaccgtgacagacatggccggccggcccggccagcccggccccaagggggagcagggccctgagggcgtgggccggcctgggaagccaggccagcccggcctgcccggggtgcagggccccccaggcctgaagggcgtgcagggcgagcccggccccccaggccggggcgtgcagggcccccagggcgagcccggggcccctggcctgcccggcatccagggcctgcccggcccccggggccccccaggccccaccggggagaagggggcccagggcagccctggggtgaagggggccactggacctgtgggccccccaggggcctctgtgtctggccccccaggaagagatggccagcagggccagacaggcctgcggggcaccccaggagagaagggccccagaggagagaagggggagcccggggagtgcagctgccccagccagggcgacctgatcttcagcggcatgcctggggcccctggcctgtggatgggcagctcctggcagcccggcccccagggccccccaggcatccctggccccccaggccccccaggagtgcccggcctgcagggcgtgcccggcaacaacggcctgcccggccagcccggcctgacagctgagctgggcgccctggccctgggcagccactggggcagccccagcatctgtggggactgtgtgcagggccagagggcccaccctggctacctggtggagaagggggagaagggggaccagggcatccctggggtgcccggcctggacaactgtgcccagtgcttcctgagcctggagcggcccagggctgaggaggcccggggggacaacagcgagggggaccccggctgtgtgggcagccctggcctgcccggccccccaggcctgcccggccagagaggagaggagggccccccaggcatgaggggcagccctggccccccaggccccatcggccccccaggcttccctggagctgtgggcagccctggcctgcccggcctgcagggcgagcggggcctgaccggcctgactggagacaagggggagcccggccccccaggccagcccggctacccaggggccactggacctcctggcctgcccggcatcaagggggagcggggctacacaggcagcgctggggagaagggggagcccggccccccaggcagcgagggcctgcccggccccccaggccctgctggccccagaggagagcggggcccccagggcaacagcggggagaagggggaccagggcttccagggccagcccggcttccctggccccccaggccccccaggcttccctgggaaggtgggcagccctggccccccaggcccccaggccgagaagggcagcgagggcatccggggccccagcggcctgcccggcagccctggccccccaggccccccaggcatccagggccctgctggcctggatggcctggatggcaaggatggcaagccaggcctgcggggggaccccggccctgctggccccccaggcctgatgggccccccaggcttcaagggcaagacaggccaccctggcctgcccggccccaagggggactgtgggaagccaggccccccaggcagcacaggccggcctggagctgagggggagcccggggccatgggcccccagggccggcccggccccccaggccacgtgggccccccaggccccccaggccagcccggccctgctggcatctctgctgtgggcctgaagggggacagaggagccactggagagcggggcctggccggcctgcccggccagcccggccccccaggccaccctggccccccaggagagcctggaacagatggagctgctgggaaggagggccccccaggcaagcagggcttctacggccccccaggccccaagggggaccccggggctgctggccagaagggccaggccggggagaagggccgggccggcatgcctgggggccctgggaagagcggctccatgggccctgtgggccccccaggccctgctggggagcggggccaccctggggcccctggccccagcggcagccctggcctgcccggggtgcccggctccatgggagacatggtgaactatgatgagatcaagcgcttcatccggcaggagatcatcaagatgtttgatgagaggatggcctactacaccagcaggatgcagttccccatggagatggccgccgcccctggccggcccggccccccaggcaaggatggagcccctggccggcctggggcccctggcagccctggcctgcccggccagatcggccgggagggccggcagggcctgcccggggtgcggggcctgcccggcaccaagggggagaagggggacattggaattggaattgctggggagaatggcctgcccggccccccaggcccccagggccccccaggctacggcaagatgggcgccaccggccccatgggccagcagggcatccctggcatccctggccccccaggccccatgggccagcccgggaaggccggccactgcaaccccagcgactgcttcggggccatgcccatggagcagcagtacccacccatgaagaccatgaagggcccctttggatag

SEQ ID NO: 337114 - DNA, 4815 bp, Artificial Sequence
  derived and/or modified sequence
atgtgggtgtcctgggcccctggcctgtggctgctgggcctgtgggccaccttcggccacggggccaacacaggagcccagtgcccccccagccagcaggagggcctgaagctggagcacagcagcagcctgcctgccaacgtgacaggcttcaacctgatccaccggctgagcctgatgaagaccagcgccatcaagaagatccggaaccccaagggccccctcatcctgcggctgggcgccgcccctgtgacccagcccaccaggagggtcttcccccggggcctgcctgaggagtttgccctggtgctgaccctgctgctgaagaagcacacccaccagaagacctggtacctgttccaggtgacagatgccaacggctacccccagatcagcctggaggtgaacagccaggagaggagcctggagctgcgggcccagggccaggatggagactttgtgtcctgcatcttccctgtgccccagctgtttgacctgcgctggcacaagctgatgctgtctgtggccggccgggtggcctctgtgcacgtggactgcagcagcgccagcagccagcccctgggcccccggcggcccatgaggcctgtgggccacgtgttcctgggcctggatgctgagcagggcaagcctgtgtcctttgacctgcagcaggtgcacatctactgtgaccctgagctggtgctggaggagggctgctgtgagatcctgcctgctggctgccccccagagaccagcaaggcccggcgggacacccagagcaatgaactcatcgagatcaacccccagagcgagggcaaggtgtacacccgctgcttctgcctggaggagccccagaacagcgaggtggatgcccagctgaccggccgcatcagccagaaggccgagcggggggccaaggtgcaccaggagacagctgctgatgaatgtcctccctgtgtgcatggagcccgggacagcaatgtgaccctggcccccagcggccccaagggcggcaaaggagagcggggcctgcccggccccccaggcagcaaaggagagaagggggcccggggaaatgactgtgtgcgcatcagcccagatgcccccctgcagtgtgccgagggccccaagggggagaagggggagagcggggccctgggccccagcggcctgcccggcagcactggagagaagggccagaagggggagaagggagatggcggcatcaagggcgtgcctgggaagccaggaagagatggccggcctggagagatctgtgtgattggccccaagggccagaagggggaccccggctttgtgggccctgagggcctggccggggagcccggccccccaggcctgcccggccccccaggcatcggcctgcccggcacccctggggaccccggcggccccccaggccccaagggggacaagggcagcagcggcatccctgggaaggagggccctgggggcaagccaggcaagccaggagtgaagggggagaagggggacccctgtgaggtgtgccccaccctgcctgagggcttccagaactttgtgggcctgcccgggaagccaggccccaagggggagcccggggaccctgtgcctgcccggggggaccccggcatccagggcatcaagggggagaagggggagccctgcctgagctgcagctctgtggtgggcgcccagcacctggtgagcagcactggagccagcggagatgtgggcagccctggcttcggcctgcccggcctgcccggccgggccggcgtgcccggcctgaagggggagaagggcaactttggagaggccggccctgctggcagccctggccccccaggccctgtgggccctgctggcatcaagggggccaagggggagccctgtgagccctgcccagccctgagcaacctgcaggatggagatgtgcgggtggtggccctgcccggccccagcggggagaagggggagcccggccccccaggcttcggcctgcccgggaagcagggcaaggccggggagcggggcctgaagggccagaagggagatgctggcaaccctggggaccccggcaccccaggcaccaccggccggcccggcctgtctggagagcccggggtgcagggccctgctggccccaagggggagaagggagatggctgcacagcctgccccagcctgcagggcaccgtgacagacatggccggccggcccggccagcccggccccaagggggagcagggccctgagggcgtgggccggcctgggaagccaggccagcccggcctgcccggggtgcagggccccccaggcctgaagggcgtgcagggcgagcccggccccccaggccggggcgtgcagggcccccagggcgagcccggggcccctggcctgcccggcatccagggcctgcccggcccccggggccccccaggccccactggagagaagggggcccagggcagccctggggtgaagggggccaccggccctgtgggccccccaggggcctctgtgtctggccccccaggaagagatggccagcagggccagacaggcctgcggggcaccccaggagagaagggccccagaggagagaagggggagcctggagaatgtagctgccccagccagggcgacctgatcttcagcggcatgcctggggcccctggcctgtggatgggcagctcctggcagcccggcccccagggccccccaggcatccctggccccccaggccccccaggagtgcccggcctgcagggcgtgcccggcaacaacggcctgcccggccagcccggcctgacagctgagctgggcagcctgcccatcgagcagcacctgctgaagagcatctgtggggactgtgtgcagggccagagggcccaccctggctacctggtggagaagggggagaagggggaccagggcatccctggggtgcccggcctggacaactgtgcccagtgcttcctgagcctggagcggcccagggctgaggaggcccggggggacaacagcgagggggaccccggctgtgtgggcagccctggcctgcccggccccccaggcctgcccggccagagaggagaggagggccccccaggcatgaggggcagccctggccccccaggccccatcggccccccaggcttccctggagctgtgggcagccctggcctgcccggcctgcagggcgagcggggcctgaccggcctgactggagacaagggggagcccggccccccaggccagcccggctacccaggggccactggacctcctggcctgcccggcatcaagggggagcggggctacacaggcagcgctggggagaagggggagcccggccccccaggcagcgagggcctgcccggccccccaggccctgctggccccagaggagagcggggcccccagggcaacagcggggagaagggggaccagggcttccagggccagcccggcttccctggccccccaggccccccaggcttccctgggaaggtgggcagccctggccccccaggcccccaggccgagaagggcagcgagggcatccggggccccagcggcctgcccggcagccctggccccccaggccccccaggcatccagggccctgctggcctggatggcctggatggcaaggatggcaagccaggcctgcggggggaccccggccctgctggccccccaggcctgatgggccccccaggcttcaagggcaagacaggccaccctggcctgcccggccccaagggggactgtgggaagccaggccccccaggcagcacaggccggcctggagctgagggggagcccggggccatgggcccccagggccggcccggccccccaggccacgtgggccccccaggccccccaggccagcccggccctgctggcatctctgctgtgggcctgaagggggacagaggagccactggagagcggggcctggccggcctgcccggccagcccggccccccaggccaccctggccccccaggagagcctggaacagatggagctgctgggaaggagggccccccaggcaagcagggcttctacggccccccaggccccaagggggaccccggggctgctggccagaagggccaggccggggagaagggccgggccggcatgcctgggggccctgggaagagcggctccatgggccctgtgggccccccaggccctgctggggagcggggccaccctggggcccctggccccagcggcagccctggcctgcccggggtgcccggctccatgggagacatggtgaactatgatgagatcaagcgcttcatccggcaggagatcatcaagatgtttgatgagaggatggcctactacaccagcaggatgcagttccccatggagatggccgccgcccctggccggcccggccccccaggcaaggatggagcccctggccggcctggggcccctggcagccctggcctgcccggccagatcggccgggagggccggcagggcctgcccggggtgcggggcctgcccggcaccaagggggagaagggggacattggaattggaattgctggggagaatggcctgcccggccccccaggcccccagggccccccaggctacggcaagatgggcgccaccggccccatgggccagcagggcatccctggcatccctggccccccaggccccatgggccagcccgggaaggccggccactgcaaccccagcgactgcttcggggccatgcccatggagcagcagtacccacccatgaagaccatgaagggcccctttggatag

SEQ ID NO: 337115 - DNA, 4815 bp, Artificial Sequence
  derived and/or modified sequence
atgtgggtgagctgggcccccggcctgtggctgctgggcctgtgggctaccttcgggcacggagccaataccggcgcccagtgcccccccagccagcaagaaggcctgaagctggagcacagcagtagcctgcccgcaaatgtgaccggctttaatcttatccacagactgtctctcatgaagacatctgctataaaaaaaataaggaatcccaaaggtcctcttatcttgaggttgggggcagcgcccgtaacccagcctacacggcgggtgtttccgagagggctcccagaggaattcgcccttgtactgaccttgttattaaagaagcacacccaccagaaaacctggtacttattccaggtgacagatgccaatggatatccccagatcagccttgaggtgaactcccaggaaaggtccctggaattacgcgcacaaggtcaggatggggactttgttagttgtatcttcccagtaccccagcttttcgatctccgatggcataagttgatgctgagcgtcgccggacgcgtcgcgagtgtgcacgttgactgctcgagcgccagttcccagccgttaggtccacgacgccccatgcgtcctgtgggccacgtgttcttaggcctcgacgccgagcaggggaagccggtttcttttgatctgcagcaggtccatatttattgtgatcccgaattggtgctggaggagggttgttgcgaaattctccccgcaggatgccctcctgagaccagcaaagctcgcagagatacacaatcgaacgaactcattgagattaacccacagtctgaaggcaaagtctacacaagatgcttctgtctggaggaaccccagaattccgaggtggatgctcaacttacaggaagaatttcccagaaagcggagcgcggcgccaaggttcatcaagaaactgccgccgatgaatgccccccgtgtgtgcacggggcacgagattctaatgtaagcgaatggagagtggggccagagggtggcaaaggcgagaggggattgccaggccctccaggctccaagggtgagaaaggcgcaagagggaacgattgcgtgagaatctccccagacgctcctctgcagtgcgccgaaggcccaaagggggaaaagggggaatcgggggctcttgggccttccggcttgcctggctctactggcgagaaaggccaaaagggagagaaaggtgatgggggcattaagggggttcctggtaaacctgggcgcgatggccgccccggggagatctgcgtgataggcccaaaggggcagaagggtgaccctggctttgtgggtcctgaggggctcgccggggagcctggcccgcctgggctgccaggaccgcctggcatcggcctcccgggtacaccgggtgatccaggagggcctcccgggcctaagggtgacaagggtagcagcggcattcccggcaaggaggggcccggtggaaaaccgggtaagccaggcgtgaaaggcgaaaaaggggacccctgtgaagtctgcccgaccttgccagaaggtttccagaacttcgtagggctgccaggcaagcctgggcctaagggggagccaggggaccctgtaccggccagaggggatccgggaattcaaggaatcaagggagagaaaggagaaccatgcctttcatgttcctccgtcgtcggtgctcagcatctggtgtctagcaccggcgcctcaggagacgtcggaagcccgggctttggcctcccgggccttcctgtcaaggcaggcgtgcctggcttgagccccggggggaacttcggcgaagcgggccccgccggctctcccgggcctccaggaccagtggggccagctggcattaagggcgcaaaaggagaaccatgcgagccctgtccagcattatctaacttgcaggacggtgacgtccgagtggttgctctgcctggtcccagtggggaaaagggtgagccgggacctcccggctttggattgccaggtaagcaaggcaaggcgggtgaaagaggactgaaaggccagaagggggacgctggcaaccccggcgaccctggcacgcctggcactacaggaagacccggtttgtcaggtgagcctggggttcagggtcctgccggccctaagggagaaaagggtgatggatgcacagcctgtccgagcctgcaaggtacggtcacagatatggccggcaggcctggacagccaggacctaagggggagcagggacctgaaggggttggacgacccggaaaacctgggcagcccgggctacccggagtgcaggggccccccggcttgaagggagtacagggcgagcccggaccccctgggagaggcgtgcagggccctcagggtgagccaggtgctcccggactgcccgggattcaggggcttccaggccccaggggccccccaggacccaccggtgagaagggcgcgcagggaagccctggggtaaagggagcaacaggacctgtgggcccccctggtgccagtgtctcaggccccccggggcgggatggacaacaagggcagactgggctccgtgggacccctggggaaaaggggccacggggggagaaaggggagcccggagagtgctcctgcccttcacagggcgacctgatttttagcggcatgccgggcgcacccggactttggatgggaagctcatggcagccaggcccacaggggccgcctggcatcccgggacctccagggccgccaggggtaccaggccttcagggcgtgccaggaaacaatggactgccgggccagcccggtctgacagcagaactaggggctcttgcgctcggcagtcactggggatctccatccatctgtggggactgcgtgcaaggacagcgcgcccatcccgggtatctcgtcgagaagggggagaagggtgaccagggtatccctggcgtgcctgggctcgacaattgtgcccagtgtttcctgagtcttgaacggccccgtgcagaagaagcccgcggggataactctgagggggatccaggatgtgttggaagtcccggcctgccaggtccaccaggtcttcccggccagaggggtgaggaaggtcccccagggatgcgcggaagtcctggcccacccggaccaatcggaccccctgggtttccaggagctgtggggtcccctgggctcccaggcctccagggagagcgcggtctcacgggactgaccggcgacaaaggagagcccggcccaccgggacaacccggatatccaggagctactggacctcccggtctgcctggcataaagggagagcgcggatataccgggtctgccggggagaaaggggagcctggcccacctggcagcgagggtctgcctggacctccaggacccgccggcccacgtggagagaggggaccacaaggcaacagtggggaaaaaggagatcagggctttcaggggcagcctggatttcccggtcctcccggccccccaggcttcccaggaaaagtgggtagcccaggccctcccggcccccaagccgaaaaagggagcgaaggaatcaggggaccttccggccttccaggatccccaggaccccccggtcccccaggcattcagggcccagccgggctggacgggctcgatggcaaagatggcaagccaggactgcggggggaccccggtcccgcggggccaccgggactgatgggtcccccaggctttaaggggaaaacaggccacccggggctccctggccctaaaggcgactgtggcaaaccgggccccccagggtccaccggacgcccgggggccgagggggaacctggggcgatgggaccacagggtcggcctggtccaccagggcacgttggacccccaggaccccccgggcagcccggcccggctgggatttccgccgtgggcttgaaaggcgaccggggagcaactggagagcggggcctagccggactgccgggccagccagggcctcctgggcatcctggaccacccggagaaccagggacagacggagctgctggaaaggagggcccccctgggaaacagggattctacggacccccagggcctaaaggagaccccggggccgccggccagaagggccaggccggagagaaaggccgggccgggatgcccggggggcccggaaaatctggctctatgggacccgtgggccctcctggccctgcaggtgagcggggccaccccggggcccctggacctagcggcagccctggactgcctggtgtgcctggcagtatgggcgatatggtgaactatgatgagatcaagagattcatacggcaagaaattattaaaatgtttgacgaaagaatggcctactacacctcaaggatgcagtttccaatggagatggccgcagcaccaggcaggccaggcccacctggaaaggatggggcccccgggcgccccggtgctccaggtagtcccggactgcctggccaaatcggccgcgagggccggcaagggctcccaggcgtcaggggactgcctggaaccaagggggagaagggcgatattgggataggcatcgccggagagaacggtcttcccggaccgcctggaccacagggtcccccaggctacggaaaaatgggcgcaacaggccctatggggcagcagggcatccctggtatccccggcccccccgggccaatggggcagccggggaaggctggccattgcaacccctccgactgctttggcgccatgcccatggaacagcagtatccaccaatgaaaactatgaagggaccctttggctag

SEQ ID NO: 337116 - DNA, 4815 bp, Artificial Sequence
  derived and/or modified sequence
atgtgggtgagctgggcccccggcctgtggctgctgggcctgtgggccacattcgggcatggcgcaaacaccggggcacagtgccctcccagtcagcaggagggactaaaactggaacacagctccagcctgcccgcaaacgttacaggctttaacctaatccacagactgtctctcatgaaaaccagtgccataaagaagattaggaacccaaagggtcctcttatcttaaggctgggcgcggcacctgtgacacagcccacccgccgggtctttccacgcgggttgcccgaagaattcgccctcgtcctaacattactgctgaaaaagcacactcaccagaagacttggtacttgttccaggttactgatgctaacggatacccccagatctccctggaggtgaacagccaggagcgttcccttgaactgcgtgcacaagggcaggacggggactttgtcagctgtatctttccagtcccccagctttttgacctccgatggcataagttaatgctttcagtggcgggcagagtcgcctcagtgcacgtcgactgctcctccgcttcctctcaacctctgggcccacgcagacccatgcggcccgtgggacatgtgtttctgggcctggatgccgaacagggcaaacccgtttcttttgacctgcaacaggttcacatttattgtgacccagagttagtactagaagagggctgctgcgaaattctccctgccgggtgcccccctgaaacgtcaaaggcccgcagggatacccaaagcaacgagctgatcgaaattaatcctcaaagtgaggggaaggtatatacacgatgtttctgtcttgaagagccgcagaattcggaagtggacgcgcagctgacggggagaatttcacagaaagcagagaggggggccaaggtccaccaggagactgccgcagacgaatgtccgccctgtgtccatggggcacgggacagtaatgttaccttggccccctctggaccaaaggggggcaagggcgagcggggcctccccgggccaccagggagcaaaggggagaagggggcccgcggaaatgattgcgtgcggatctctcctgatgcccccctacagtgcgcagaggggcccaagggcgaaaaaggtgaatcaggggctctgggcccttcaggtctgccaggctccacaggcgagaaaggccagaagggggagaaaggcgatggcggaattaagggagtgccagggaagccaggccgcgacggtcgcccgggtgagatctgtgttataggacccaagggtcagaaaggtgatcctggattcgtcggccctgagggattggccggggaacctggcccaccgggcctgcccggaccgcccgggatcggactgccaggcaccccaggtgacccgggtggcccgcccgggccgaaaggcgacaaaggttctagcggaatacccggaaaagagggtcctgggggcaagccgggtaagccaggagtgaagggcgagaagggggacccgtgcgaagtttgccccacactcccagagggtttccaaaacttcgtgggtctccccggcaaacccggcccgaagggggagccgggagaccccgtgccagcccgcggcgaccccggtatacaggggattaaaggcgagaaaggcgagccttgtctctcttgttcgagcgtcgtaggggcccagcatttggtgtcctccactggtgcctccggagatgtgggaagcccaggattcggcctgccaggactgcctggcagggcaggagttccgggccttaagggcgagaaaggcaactttggagaagccggcccagctggcagtcccggacccccaggcccggtgggccccgcgggcattaagggcgccaaaggggaaccgtgtgaaccatgccctgccctctctaacctccaggatggcgatgttcgcgtagtagctctgcccggtccttctggcgaaaaaggagaaccagggcccccggggttcgggctgcccggaaagcaggggaaggctggtgagcgaggccttaagggccaaaaaggcgatgccggaaatcctggagaccctggaacaccgggcacaactgggagacccggactctctggagagccgggggtccaggggcccgcaggcccaaagggcgaaaagggtgatggatgcaccgcatgtccctctctacaaggtactgtgaccgatatggcaggccgacccgggcaaccgggcccaaaaggcgaacagggcccggaaggggtgggaagacctggcaaacctggacagccaggccttcctggcgtccagggaccacctggcctgaaaggcgtacagggtgagcccgggcctccgggtaggggcgtccaaggacctcagggcgaaccaggtgctcccggccttccgggtatccaaggcctgccaggcccacgcggacctccaggtccaaccggcgaaaagggcgcgcaagggtcccccggcgtcaagggagccaccggaccagttggtccccccggagcatctgtctcaggccctcccggcagggacgggcagcagggccagactggactgcgcggcacccctggagagaaggggccccggggtgaaaagggggagccaggtgaatgtagctgtccatcccagggggatctaatcttcagcggtatgcccggtgctcccggcttgtggatgggaagctcctggcagcccggacctcagggtccaccggggatccccggaccacctggtccaccgggggtcccaggtctgcaaggcgttcctggcaataatggacttccagggcagcctgggctgaccgctgaactcgggtccctcccaattgagcagcacctcttaaaatcaatctgtggtgactgtgtgcagggccagcgggcccaccccggctatcttgtcgagaagggagaaaaaggggaccagggcatccccggcgttcctgggctcgataattgcgcccagtgtttcctctcgttggagcgaccccgcgccgaagaggcacgcggagacaacagtgagggagatcccgggtgcgtgggttctccaggcctgcctggaccacccgggctgcctggacaacgtggcgaagaaggaccaccaggtatgaggggatcaccaggccctcctgggcccattggccctcctggattcccgggcgctgttggctcaccagggcttccaggactccagggcgagagggggctgaccggacttaccggcgacaaaggcgaacctggcccccctggtcagccaggatacccaggcgccacaggcccacctggtcttccagggattaagggggaacgcggctacacaggtagcgccggtgagaagggtgaacctgggcctccaggcagtgagggcctgcccgggcctcctggtccggctggacctcgtggcgaacgcgggccccaaggcaattccggggagaagggggatcagggatttcaggggcagcccggcttccctgggcctccaggcccccccggatttccaggcaaggtggggtcacctggaccaccaggccctcaggcagagaaggggtccgaggggattaggggacctagtgggttaccgggctccccaggtcctccgggacctcccggcatccagggccctgccgggcttgatggcttggacggaaaggatggcaagcccggcttacggggcgacccgggccccgccggtcctcccggattaatggggccccctggatttaagggaaagacagggcatcccggactgccaggtcctaagggtgattgcggtaagcctggcccaccagggagcaccggcaggccaggagcagagggcgagccaggggctatgggaccccaaggacggccaggccctccagggcatgtgggtccacctggccctcctggacagccaggaccagcaggtatatctgctgtgggcctgaaaggtgatagaggcgctaccggcgaacgggggcttgcaggcttgccggggcagcccggcccccccggacatccaggtccaccaggagagcctggcaccgatggtgccgccggaaaagaagggcctcccggtaaacaaggattttatggcccgcctgggccaaagggcgacccaggtgctgccggccagaagggacaggctggcgagaaaggtagagcgggaatgcctggcggcccagggaagagtggctccatgggtcctgttggtcccccggggcctgctggtgaacggggtcaccctggcgctcctgggccatccggaagcccgggcctccctggagtgcctggctccatgggggatatggtgaattacgatgaaatcaaaaggttcataaggcaggagataattaagatgttcgacgagcggatggcgtactatacctctcgtatgcagttcccaatggagatggcggcggcccctggccggcctgggcctcctggcaaagacggggccccgggtcgccctggagctccagggagtcctggactccccggccagatcggcagggaaggcagacagggcctgccaggagtccggggattgcctgggacgaaaggagagaagggagacattggaatagggatcgctggagagaacgggctacctggacctcctggacctcagggtccacctggctatggtaaaatgggcgccacgggccctatggggcagcaggggatccctggcatccccgggcctcccggcccgatgggccagcccgggaaagccggccactgtaacccgtccgactgcttcggggccatgcctatggagcagcagtatcccccgatgaagacaatgaagggaccattcgggtag

SEQ ID NO: 337117 - DNA, 5584 bp, Artificial Sequence
  derived and/or modified sequence
agtctagccgcctctggtgccgctggagccccctctaggccctcctcctcctcctccctggcgggccggtccagctgtgttccattagtgtccctggcaggcccccagccccctggaaccgcctctcttcccccacccggagtggccggcagtccccggcaggcgtgcgccgggcagcagacagccgggagagctcgagcgccaggaagctggggacccgtgaccgtcacggagagatagagaacccctagcggacctgaggaacctgggctctgcttcctccgcctgctgcctggactgctcagtgaggtggggggatccccggccaccggtgctgtggctgtagctgacctctttggaccgggatgtgggtatcctgggctcctggcctgtggctgctcggtctttgggctaccttcggccatggggcaaatacaggtgcacaatgcccaccttcacagcaggaaggactcaaattggaacacagtagtagcctgccagccaacgtgactggcttcaacctcatccaccgactcagcctcatgaagacgtctgccatcaagaagatccgcaaccccaaggggcctctcatcctgcgcctgggggcggcccccgtgacccagcccacgcgaagagtattccctcggggtctcccggaggagtttgccctggtgctgacactactgctgaagaaacacacccaccagaagacgtggtatctgtttcaagtgaccgatgcaaatgggtatccacagatatccctggaagtcaacagccaagagcggagcctggagctcagggcccagggccaggatggcgactttgtgtcctgcatcttcccagtgccccagctcttcgacttgcgttggcacaagctgatgctgagtgtggctggacgtgtggcctctgtgcacgtggactgcagctcagcctcctcccagcctctggggccccgacgacccatgaggcctgtgggccatgtatttctaggcttggatgctgagcagggcaagcctgtctcgtttgaccttcagcaggtgcacatctactgtgacccggagctcgtgctggaggagggctgctgtgagattttaccagcagggtgccccccagagacctccaaggcccgccgggacacccagagcaatgagctcattgagatcaatccacagtctgaaggcaaggtctacacccgctgcttctgcctggaggagcctcaaaacagcgaggtggatgcccagctgacgggaagaatcagccagaaggcagaaaggggagcaaaggtccatcaggagacagcagccgatgagtgtccgccctgtgtccatggtgcccgggacagcaatgtgagtgaatggagggtggggccagaaggagggaaaggtgagcggggcctgcctggtccaccaggctccaagggagagaagggagcacggggcaatgactgtgttcgaatctccccggatgccccacttcagtgtgcagaaggcccgaagggagagaagggggagtcaggagctctgggaccctcaggactcccaggctcaacaggcgagaagggccagaaaggcgagaagggcgacggaggcatcaagggcgtgccgggaaagccaggccgggacggccggccaggagagatctgtgtcattgggcccaaagggcagaagggagaccctggctttgttgggcctgaggggctggcaggagagcctgggccccccggcctccctggaccccctgggataggactgcctgggaccccgggggatccaggtggcccaccaggccccaagggagacaagggcagctcggggatcccaggaaaggaaggccctggtgggaaacctgggaagccaggtgtgaagggagagaagggtgacccctgtgaagtgtgcccaacactgcctgaagggttccagaactttgttggacttcctggaaagccagggcccaaaggggagcctggtgatcctgtaccagccaggggagaccctggcatccaaggcatcaaaggagagaagggggagccctgcttgtcctgcagctcggttgtaggggcccagcatcttgtgtcctccacaggggccagtggagatgtgggttcccctggctttggtctgcctggccttccggtgaaggcaggtgtcccaggcctgtctcctgggggtaacttcggggaggcagggccagctggcagtccagggccaccaggaccagtggggccagcaggcatcaaaggggcgaagggggagccctgtgagccgtgcccagccctgtccaaccttcaggatggggatgtccgtgtggtggccttgcctggcccatccggagagaagggggaacctgggcctccaggctttggcttgccaggaaaacagggcaaggctggagagcgtggactgaaggggcagaagggtgatgctgggaatcctggagaccctggaacgccgggcaccacagggcggccaggactgtcaggagagcctggagttcagggccccgcggggccaaaaggagaaaagggtgatggctgcactgcctgccccagcctgcaggggacagtgacagacatggcaggacggcctgggcagcccggccccaaaggagagcagggccccgaaggcgtgggccgacctggtaaacccggccaacccggtctaccaggagttcaagggcccccaggactgaagggcgtgcagggagagccagggcctccaggaaggggagtccagggaccccagggggagcctggagccccgggtttgcctggcattcagggacttccgggacctcggggaccacctggccccactggagagaagggtgcccagggatctccaggggtgaaaggagccaccggacctgtgggacctcctggggccagtgtctctgggcctccgggccgtgatgggcagcaaggacagacgggactcagaggaacaccaggtgaaaaaggaccacgaggagagaagggtgagccaggggagtgctcctgcccctctcaaggagacctcatcttctctggcatgccgggtgctccgggactttggatgggcagctcctggcagccgggcccgcagggtccaccaggtattcccggaccaccaggcccccctggagtacctgggctgcagggagtgcctggaaacaacggtttgccaggacagcctgggctcactgcagaactgggagccctggctctgggttctcactggggctccccaagtatctgcggggactgtgtccaggggcagagggcccacccagggtacctcgtggagaagggagagaagggagaccagggcatccctggtgtgccaggcctcgacaactgcgcccagtgctttttgtcactggagcgcccaagagccgaggaggcccggggtgacaacagtgagggagatcctggctgtgttgggagcccaggcctacctggtcctccgggattgccaggccagagaggagaagagggtccgcctggcatgaggggctccccgggtcctccaggccctatcggccccccaggttttcctggtgctgttggctcccccggattgcctggccttcaaggagagcgaggtctcacgggcctgactggagacaagggggagccgggtcctccagggcaaccaggttacccaggtgccacgggccccccaggactgcctggcatcaagggggagcgtggctacaccgggtcagcgggagagaaaggagagccgggccccccaggatctgaaggcctcccaggccccccaggcccagcgggtcccagaggagagcgaggaccccaaggtaactccggtgagaagggcgaccagggatttcaaggccagccaggctttccgggcccaccgggtccccctggattcccaggcaaagttggatcacctggcccacctggccctcaagcagagaagggcagcgaagggattcgaggcccatcaggcctgcctggctcccctgggccaccgggacctcctgggattcagggccccgccggtctggatggtttggatgggaaggacggcaagcctggcttgaggggggaccctggtcctgctggcccccctggactcatgggaccaccgggctttaaggggaaaacaggacatcctggcctcccaggacctaagggtgactgtggcaaaccaggtccccctggcagcactggccggcctggcgcagagggtgaacctggtgccatgggaccccagggaagacccggtcccccgggacacgttgggccaccagggcctccaggccagccaggaccagctgggatctctgcagtgggtctgaaaggagaccgaggagccaccggagaaaggggccttgcaggcctcccaggccagcccggcccccctggacaccctggccccccaggcgaacctggtacggatggtgcagctggcaaagagggaccccctggaaagcagggattctatggacctcctggtcccaagggtgatccaggagctgcaggacagaagggccaggcaggagagaaggggagagccggcatgcctggtggacctggcaagagtggttccatggggcctgttgggccaccgggccctgcaggagagagaggccaccctggagctccggggccttcggggagccctggcttgcctggtgtgcctggctccatgggagacatggtgaattatgatgaaatcaagaggttcatcagacaagagatcattaaaatgtttgatgagagaatggcttactacacctccaggatgcagttccccatggagatggcggcagctccgggacgaccagggcctccagggaaggatggtgctccgggcaggccaggtgctccagggtcacctgggctccctggtcagattggcagagaaggacggcagggcttgccaggagtaagaggattgcctggtaccaaaggtgaaaaaggggacattggtattggcattgcaggagaaaatggtcttcccggccccccaggtcctcaaggtcctccaggctatggcaagatgggtgcaacaggaccaatgggccagcaaggcatccctggcatccctgggcccccgggtcccatgggccagccaggcaaggctggccactgtaatccctctgactgctttggggccatgccgatggagcagcagtacccacccatgaaaaccatgaaggggccttttggctgaaattccccacctgcctttggatgaaagactccgttgggaataaatggccaaagcttataggactctgtgacaggttgtgaatgttttttttgttgttgttgttgtttttaattgctgttaatattttttaaataataaagaaacaaaactatctgccctttcccttccagtgggttcctctggtgctgcagccagagctccctgttgccctccttttcccgtttagtcccaggaacaaaaaagggcattttgggtacaggggcatatacctgtaatcctagctattcaaggggctgaggtgggaggatcgcctgagcccaggagtttgagaccagtctaagcaacataatgagactcagtctccgaaaaataaaaattaaaaaataaagggtatttccctcctt

SEQ ID NO: 337118 - DNA, 5736 bp, Artificial Sequence
  derived and/or modified sequence
cctgactcttaaagggcccgcaggagcccccttccagggcagctctgggcacgtagggtcccgcctagctcgaggatcgctcacctggcggtgaggcaggaggggcgggcctgggagctcggccagacccggggcggggctgtgcaccccgcagtctagccgcctctggtgccgctggagccccctctaggccctcctcctcctcctccctggcgggccggtccagctgtgttccattagtgtccctggcaggcccccagccccctggaaccgcctctcttcccccacccggagtggccggcagtccccggcaggcgtgcgccgggcagcagacagccgggagagctcgagcgccaggaagctggggacccgtgaccgtcacggagagatagagaacccctagcggacctgaggaacctgggctctgcttcctccgcctgctgcctggactgctcagtgaggtggggggatccccggccaccggtgctgtggctgtagctgacctctttggaccgggatgtgggtatcctgggctcctggcctgtggctgctcggtctttgggctaccttcggccatggggcaaatacaggtgcacaatgcccaccttcacagcaggaaggactcaaattggaacacagtagtagcctgccagccaacgtgactggcttcaacctcatccaccgactcagcctcatgaagacgtctgccatcaagaagatccgcaaccccaaggggcctctcatcctgcgcctgggggcggcccccgtgacccagcccacgcgaagagtattccctcggggtctcccggaggagtttgccctggtgctgacactactgctgaagaaacacacccaccagaagacgtggtatctgtttcaagtgaccgatgcaaatgggtatccacagatatccctggaagtcaacagccaagagcggagcctggagctcagggcccagggccaggatggcgactttgtgtcctgcatcttcccagtgccccagctcttcgacttgcgttggcacaagctgatgctgagtgtggctggacgtgtggcctctgtgcacgtggactgcagctcagcctcctcccagcctctggggccccgacgacccatgaggcctgtgggccatgtatttctaggcttggatgctgagcagggcaagcctgtctcgtttgaccttcagcaggtgcacatctactgtgacccggagctcgtgctggaggagggctgctgtgagattttaccagcagggtgccccccagagacctccaaggcccgccgggacacccagagcaatgagctcattgagatcaatccacagtctgaaggcaaggtctacacccgctgcttctgcctggaggagcctcaaaacagcgaggtggatgcccagctgacgggaagaatcagccagaaggcagaaaggggagcaaaggtccatcaggagacagcagccgatgagtgtccgccctgtgtccatggtgcccgggacagcaatgtcacacttgctccctctggccccaagggagggaaaggtgagcggggcctgcctggtccaccaggctccaagggagagaagggagcacggggcaatgactgtgttcgaatctccccggatgccccacttcagtgtgcagaaggcccgaagggagagaagggggagtcaggagctctgggaccctcaggactcccaggctcaacaggcgagaagggccagaaaggcgagaagggcgacggaggcatcaagggcgtgccgggaaagccaggccgggacggccggccaggagagatctgtgtcattgggcccaaagggcagaagggagaccctggctttgttgggcctgaggggctggcaggagagcctgggccccccggcctccctggaccccctgggataggactgcctgggaccccgggggatccaggtggcccaccaggccccaagggagacaagggcagctcggggatcccaggaaaggaaggccctggtgggaaacctgggaagccaggtgtgaagggagagaagggtgacccctgtgaagtgtgcccaacactgcctgaagggttccagaactttgttggacttcctggaaagccagggcccaaaggggagcctggtgatcctgtaccagccaggggagaccctggcatccaaggcatcaaaggagagaagggggagccctgcttgtcctgcagctcggttgtaggggcccagcatcttgtgtcctccacaggggccagtggagatgtgggttcccctggctttggtctgcctggccttccgggtagagctggggttccagggctgaaaggagagaagggtaacttcggggaggcagggccagctggcagtccagggccaccaggaccagtggggccagcaggcatcaaaggggcgaagggggagccctgtgagccgtgcccagccctgtccaaccttcaggatggggatgtccgtgtggtggccttgcctggcccatccggagagaagggggaacctgggcctccaggctttggcttgccaggaaaacagggcaaggctggagagcgtggactgaaggggcagaagggtgatgctgggaatcctggagaccctggaacgccgggcaccacagggcggccaggactgtcaggagagcctggagttcagggccccgcggggccaaaaggagaaaagggtgatggctgcactgcctgccccagcctgcaggggacagtgacagacatggcaggacggcctgggcagcccggccccaaaggagagcagggccccgaaggcgtgggccgacctggtaaacccggccaacccggtctaccaggagttcaagggcccccaggactgaagggcgtgcagggagagccagggcctccaggaaggggagtccagggaccccagggggagcctggagccccgggtttgcctggcattcagggacttccgggacctcggggaccacctggccccactggagagaagggtgcccagggatctccaggggtgaaaggagccaccggacctgtgggacctcctggggccagtgtctctgggcctccgggccgtgatgggcagcaaggacagacgggactcagaggaacaccaggtgaaaaaggaccacgaggagagaagggtgagccaggggagtgctcctgcccctctcaaggagacctcatcttctctggcatgccgggtgctccgggactttggatgggcagctcctggcagccgggcccgcagggtccaccaggtattcccggaccaccaggcccccctggagtacctgggctgcagggagtgcctggaaacaacggtttgccaggacagcctgggctcactgcagaactgggatccttaccaattgaacagcacctccttaagagtatctgcggggactgtgtccaggggcagagggcccacccagggtacctcgtggagaagggagagaagggagaccagggcatccctggtgtgccaggcctcgacaactgcgcccagtgctttttgtcactggagcgcccaagagccgaggaggcccggggtgacaacagtgagggagatcctggctgtgttgggagcccaggcctacctggtcctccgggattgccaggccagagaggagaagagggtccgcctggcatgaggggctccccgggtcctccaggccctatcggccccccaggttttcctggtgctgttggctcccccggattgcctggccttcaaggagagcgaggtctcacgggcctgactggagacaagggggagccgggtcctccagggcaaccaggttacccaggtgccacgggccccccaggactgcctggcatcaagggggagcgtggctacaccgggtcagcgggagagaaaggagagccgggccccccaggatctgaaggcctcccaggccccccaggcccagcgggtcccagaggagagcgaggaccccaaggtaactccggtgagaagggcgaccagggatttcaaggccagccaggctttccgggcccaccgggtccccctggattcccaggcaaagttggatcacctggcccacctggccctcaagcagagaagggcagcgaagggattcgaggcccatcaggcctgcctggctcccctgggccaccgggacctcctgggattcagggccccgccggtctggatggtttggatgggaaggacggcaagcctggcttgaggggggaccctggtcctgctggcccccctggactcatgggaccaccgggctttaaggggaaaacaggacatcctggcctcccaggacctaagggtgactgtggcaaaccaggtccccctggcagcactggccggcctggcgcagagggtgaacctggtgccatgggaccccagggaagacccggtcccccgggacacgttgggccaccagggcctccaggccagccaggaccagctgggatctctgcagtgggtctgaaaggagaccgaggagccaccggagaaaggggccttgcaggcctcccaggccagcccggcccccctggacaccctggccccccaggcgaacctggtacggatggtgcagctggcaaagagggaccccctggaaagcagggattctatggacctcctggtcccaagggtgatccaggagctgcaggacagaagggccaggcaggagagaaggggagagccggcatgcctggtggacctggcaagagtggttccatggggcctgttgggccaccgggccctgcaggagagagaggccaccctggagctccggggccttcggggagccctggcttgcctggtgtgcctggctccatgggagacatggtgaattatgatgaaatcaagaggttcatcagacaagagatcattaaaatgtttgatgagagaatggcttactacacctccaggatgcagttccccatggagatggcggcagctccgggacgaccagggcctccagggaaggatggtgctccgggcaggccaggtgctccagggtcacctgggctccctggtcagattggcagagaaggacggcagggcttgccaggagtaagaggattgcctggtaccaaaggtgaaaaaggggacattggtattggcattgcaggagaaaatggtcttcccggccccccaggtcctcaaggtcctccaggctatggcaagatgggtgcaacaggaccaatgggccagcaaggcatccctggcatccctgggcccccgggtcccatgggccagccaggcaaggctggccactgtaatccctctgactgctttggggccatgccgatggagcagcagtacccacccatgaaaaccatgaaggggccttttggctgaaattccccacctgcctttggatgaaagactccgttgggaataaatggccaaagcttataggactctgtgacaggttgtgaatgttttttttgttgttgttgttgtttttaattgctgttaatattttttaaataataaagaaacaaaactatctgccctttcccttccagtgggttcctctggtgctgcagccagagctccctgttgccctccttttcccgtttagtcccaggaacaaaaaagggcattttgggtacaggggcatatacctgtaatcctagctattcaaggggctgaggtgggaggatcgcctgagcccaggagtttgagaccagtctaagcaacataatgagactcagtctccgaaaaataaaaattaaaaaataaagggtatttccctcctt

SEQ ID NO: 337119 - DNA, 4815 bp, Artificial Sequence
  derived and/or modified sequence
atgtgggttagttgggcacctggcttgtggctactgggcttgtgggcgactttcggacatggagccaacactggggctcaatgccccccaagccaacaagaagggctgaagttggagcactcaagctccttgccagccaatgtgactggttttaacttgattcacagattgtccctgatgaagacatcagccataaagaaaattcgcaacccgaaggggccacttatcctcaggctgggcgctgccccagtgacacagccaacgcgccgtgtgttcccacggggactgcctgaggaatttgcactggtactcacactactacttaagaagcacacacatcaaaaaacctggtacctgtttcaagtgaccgatgctaacggatatcctcaaatcagtctcgaagtaaatagccaggaaaggtctctcgaactcagggcccagggacaggacggggacttcgtcagttgcatctttccagttccccagcttttcgacctcaggtggcacaagttgatgctgtccgtcgcgggtagagtcgcctctgtccacgttgattgcagtagtgcttcaagtcaaccattggggccacgaaggcccatgcggcctgtgggccacgttttcttgggactggatgcagagcaggggaagcctgtctcattcgaccttcagcaggtgcacatttactgcgacccagaactagtattagaagaaggctgttgtgagattctcccagcaggatgtcctccggagaccagcaaggcgaggagggatactcagtctaatgagttaattgaaattaaccctcagagcgagggaaaagtgtatacaagatgtttttgcctggaagagccacagaattccgaggtcgacgcccagctgacagggaggattagccaaaaggccgagcggggagctaaggtgcatcaggagaccgcggcagacgagtgccccccatgcgtgcatggagctcgtgattccaacgtctccgagtggcgagtgggtcctgagggagggaagggtgagcgcggtttgccgggtcctcctggcagcaaaggcgaaaaaggtgccagaggtaacgactgcgtgcgtatttcccctgatgccccacttcagtgcgcagagggaccaaagggggagaaaggagagagtggtgctcttgggccatccggcctgcctgggagtaccggggagaagggccagaaaggcgaaaagggtgacggcggaattaaaggtgtgcctggcaagcccggaagagacggtaggccaggagaaatatgcgttatcggccctaaaggtcagaaaggtgaccctgggttcgtgggacctgagggacttgcgggtgagccgggaccgcctggcttgcccggacctccgggtatcggacttcctggcactccaggcgaccctgggggacccccaggcccaaagggtgacaagggcagctctggtattcccggaaaggaggggcctgggggaaagcccggaaagcccggagtgaagggtgaaaagggcgacccatgtgaagtgtgcccaacactccctgagggattccagaatttcgtggggcttcctggcaagcctggccctaagggcgaacccggtgacccggtacccgcacgcggagaccccggaattcagggcatcaaaggcgagaaaggcgagccttgcctcagctgctcatcagtggtcggtgcccaacacctggtatcatcaacgggagcttccggcgacgtcgggagcccaggctttggactgccagggctgccggttaaggccggagtcccaggcctgtccccaggagggaatttcggcgaagccggacctgccggatcacctgggcctcccggtccagtgggcccagccggaatcaagggagctaaaggcgaaccctgtgaaccgtgcccggcactgtcaaacttgcaggacggggatgtaagggtcgtggccctgcctggcccatccggtgaaaagggggagccagggccacctgggttcggactgccgggaaaacagggcaaagccggagagcggggtctcaagggtcaaaaaggtgatgccggtaacccaggcgaccctggcacaccagggactactggaaggccgggattatcgggtgagccaggagttcagggcccagctggccctaagggggaaaaaggagatggctgtacggcctgtcctagcctgcaaggaaccgtcaccgatatggccggacggcctggacaacctggccctaaaggcgagcagggcccagaaggcgtagggagacctggtaaacccggtcagcctggcctgcccggagtacaaggaccacccggattgaagggggtgcaaggcgagcctggcccacccggtcgtggagttcagggaccacagggggagcccggagccccaggactgccaggaattcaggggctgccagggcctcggggaccgcctggacccaccggtgaaaaaggagcgcagggcagccccggagtgaagggggcaaccggccctgtaggccctccaggggcttccgtgtccgggccacccggacgtgatggccagcaggggcaaacggggcttaggggcacccctggcgagaaaggcccacggggagagaagggagagccgggagaatgctcctgccctagccagggcgacctaatttttagcggcatgcccggagctcctgggttatggatgggctcaagctggcagcccggtccacagggtcctcccggaattcctgggccaccaggtccccctggggtacccggtttacagggggtacccggtaataatggcctgcctggccagcccggactgacagctgagttaggcgcattggcattggggagccattggggatctcccagtatctgtggggattgtgtacaaggtcaaagagctcaccctggctacctcgtggagaagggagagaaaggtgatcagggaatccctggtgtgcccggattggacaattgcgcacagtgctttctgagcctggaaagaccaagagctgaagaggccaggggagacaattctgaaggggatcccggatgcgtggggtctccaggacttcccggaccaccagggctgccgggtcaaaggggggaagaggggcctccaggcatgcgaggatctcctgggccacctgggcctataggacctcctggatttcccggagctgttggctcccctggactcccgggactgcagggagagcgaggcttgacaggattaactggagacaagggagagcccggacctcccggtcagcctggctaccccggagccaccgggccacctggactgcccggaatcaagggtgagagaggatacaccgggtctgctggcgagaagggcgaaccgggacctcctggcagcgaaggcctcccaggccctcctggccctgcgggacccaggggagagcggggaccccaaggaaacagtggggagaagggggaccaaggtttccaaggccagcctgggtttcctggccctccagggccacctgggtttcccggtaaagtaggctcacctggacctccagggccacaggctgagaaggggtcggaagggatcagaggcccatcgggtctcccgggaagcccaggccctccaggtcccccaggcattcaggggcctgccggactcgatggactcgacggtaaagacggcaagccgggtctaagaggcgatcccggtcctgcgggaccccctggccttatgggcccacccggttttaaaggaaagacggggcaccccggactacccggaccaaagggcgactgcggtaaaccagggccacctggaagcacgggcaggcccggagctgaaggtgagcccggtgcaatgggcccacagggtcggccaggcccacctggacatgtcggtcccccaggcccacctgggcagccaggacccgcagggattagcgctgtggggctgaagggagatcgcggtgctacaggtgagaggggcctagccggtctgccaggacagccaggcccacctgggcatccaggccctcctggagagcccggaactgatggagctgctggaaaggaaggtcctccgggaaaacagggcttttacgggcctcctggccctaaaggggacccaggggctgccggacaaaaagggcaagctggcgaaaaaggacgcgctggcatgcccggaggacccggaaaaagcggctctatgggacctgtgggaccccctggcccagccggagagaggggacaccccggagcgccaggaccctcaggttctcccggactgcccggtgtgcccggtagtatgggtgatatggtcaactatgatgagatcaagaggttcatccggcaggaaattattaagatgttcgatgaaagaatggcatattacactagcagaatgcaatttcctatggagatggcagccgcacccggtcgcccaggcccacccggaaaggacggcgctccagggaggccaggtgcccctggaagccccggactccctggccagatagggagagaggggagacaagggctccctggagtgcgaggtttgccgggtactaaaggtgaaaagggtgatatcgggatcggcatcgcgggagagaatggtctccccggaccacccggaccccaggggccacccggatacgggaagatgggggcaaccggccctatgggacagcaaggtatacccggtatccctggcccacctggtcctatgggccagcccggaaaggccggacattgcaacccttctgactgtttcggggctatgcctatggagcagcaatatccaccgatgaagaccatgaagggccctttcggttag

SEQ ID NO: 337120 - DNA, 4815 bp, Artificial Sequence
  derived and/or modified sequence
atgtgggtatcctgggcacctggactgtggctgctgggtctctgggctaccttcggccacggtgcaaacactggagctcagtgtcctccaagtcaacaggaaggactgaagcttgagcatagctcctcactccctgctaacgtcacaggatttaatctgatacatcgcctgagtctcatgaagacgagtgccattaaaaaaatccggaatccgaaaggcccactgatccttcgactgggagccgctccagtcactcagccgaccaggcgggtgttcccacggggacttccggaagagtttgccctggtgctcaccctcctgctaaaaaaacatacccatcagaagacatggtatctctttcaggtgactgatgctaatggttaccctcagataagcctggaagttaacagtcaggaacgttcccttgaactgagagcccagggccaggacggcgattttgtgagctgcattttcccagtgccgcagctcttcgatctgcgatggcacaaactaatgctctccgtggccggtcgagttgcctccgttcacgtggattgttcctcagcgtctagtcagcccctgggccctcggaggcccatgcggcctgtcgggcacgtcttcctcggactcgacgccgagcaggggaagcctgtgagctttgacttgcaacaggtacacatatattgtgatccagagctcgttctagaagaagggtgttgcgagattttgcccgcaggatgtccgcctgaaacttctaaggcacgacgagatacccagtctaatgagcttatcgaaattaacccacagagtgaaggtaaagtatacactcgctgtttctgtctcgaggaaccccagaactcggaagtcgatgcacagcttactgggaggataagccagaaagccgaacgaggagctaaggtgcatcaagagaccgccgcagatgagtgcccaccctgtgttcacggagccagggattctaatgtcaccctagctccctcgggtcccaaaggtgggaagggcgaacgcggtcttcctggcccaccaggttcaaagggcgaaaaaggagccagagggaacgattgcgtgaggatctcaccagatgccccactccagtgtgcagaagggcctaagggggaaaaaggcgaatctggcgctctaggacctagtgggctccccggaagtaccggtgaaaaaggacagaagggggagaagggggatggaggcatcaaaggggtgccaggtaagcctggcagagatggcaggcctggcgagatttgcgtaatcggtcctaagggccagaagggggatcccggtttcgtcggccctgagggcttggccggagaacccggtcccccaggcctgccgggaccccctggaatcgggctccctggcactccaggggacccaggcggtccccctgggcctaagggggataagggaagctcaggtatccctggcaaagaaggtcctgggggaaaacccggaaagcccggtgtgaaaggagaaaagggggatccttgtgaggtgtgccccacccttccagaggggttccagaactttgtaggcttgccaggcaaacctgggcctaaaggtgaaccaggcgacccggtaccagcacgcggagatccgggtatccagggaatcaaaggagagaagggggaaccgtgcctcagctgcagctctgtcgtgggtgcccaacacctagtctcttccaccggcgcatctggtgacgtaggatctccgggtttcggactccccggattgccaggaagggcaggcgtgccgggtcttaagggcgaaaaaggaaattttggcgaggcaggccctgcaggcagcccaggccctccagggcctgtggggccagctgggatcaaaggggctaaaggtgagccctgcgaaccatgcccagcgttgtcaaatctacaggacggcgacgtgcgggtggtggccctcccaggcccttccggggaaaaaggcgaacccggaccaccgggattcggattaccgggaaagcagggcaaggccggagaaagagggctcaagggacagaagggagatgcaggcaatcccggagatccgggtacgcccggtactactgggaggccagggctgtccggtgaacccggtgtgcagggccctgccggtccaaagggagaaaaaggcgatggctgcacagcgtgcccttccctgcaggggacagtgaccgacatggctggtcgcccaggccaaccagggcctaaaggagaacagggccctgaaggagtgggaaggccaggtaagcctggacagccaggactccccggagtacagggcccacctggccttaagggggtccagggggagccaggaccccctggaagaggcgtacagggaccacaaggagaacctggcgcacctggcttgccgggaattcaggggttgccaggtccaagaggaccccctgggcctaccggagagaagggagcgcagggttcccccggagtaaagggtgcaaccggcccagtgggtcctcctggagctagcgtttcaggaccccctggcagggacggccagcagggacaaaccggcctgcgagggacacctggggaaaagggtccccgtggcgaaaagggtgagccaggcgagtgcagctgccccagccagggtgatctgatctttagcggtatgcccggagcccctggactctggatgggctcatcctggcagcccggacctcaagggccaccgggaattccaggccctcccggacccccaggtgtccccggattgcaaggagtaccagggaataacgggttgcctggccagcctggcttgactgccgaactgggctctcttccaatcgagcagcacctactgaagtctatttgtggggactgcgtgcaaggccaacgggcacaccccggataccttgtcgagaagggtgagaaaggcgatcagggtatccctggtgtgcccggactagataactgtgctcaatgctttttgagcctggaacgaccacgcgctgaggaggctcggggagacaactccgagggagatccaggttgtgttgggtcacccggattgcccggacccccagggctgcctggtcagaggggagaagaggggcctcctggtatgagagggagtccaggccctcccggaccgataggccctcccggtttccctggcgctgtcgggtctcccggactacctgggcttcagggcgagcggggactgacgggcctgactggcgataagggagaacctggaccacctgggcagcctggctatccgggtgcgactggccctcccggtctcccaggcattaaaggggaaagaggttacaccgggagcgccggagagaaaggagagccgggaccgccaggcagtgagggcctgcctggtcctccgggacccgctggtccacgcggagagaggggcccacaggggaattcaggagagaagggcgatcaagggttccaagggcaacctgggttcccgggaccccctggacccccagggttccccggaaaagtgggatccccaggacccccaggtccacaggcagaaaaaggttcagagggaattcgcggaccttccggtctcccagggtctccgggaccccctgggccacccggaatccaggggccagctggtctggatgggctcgacgggaaagatggaaagcctggcctgcgtggggatccaggaccagcaggcccacccggtctcatgggccctcccggtttcaaagggaagaccggccatcccggtctgccaggaccaaaaggggactgcggcaagcccggaccccctgggtcaactgggagaccaggagctgagggtgagccaggagcaatgggtcctcagggacggccaggacccccaggccacgtgggaccaccgggaccacctggacaaccaggaccggcaggtatctctgccgtgggcctgaaaggcgacaggggagccaccggagagcggggtctggcaggcctgcccggtcaacccggaccacctgggcaccctgggcctcccggagaacctgggaccgacggggcagctgggaaagaggggccaccaggtaaacagggtttctacggccctcctgggccaaagggcgacccaggggcagcgggtcagaagggccaggctggggagaaaggacgtgccggtatgcccggtggacctggcaagtcaggctccatgggccctgtggggcctccaggacccgcaggtgaaagaggtcaccctggcgcaccaggtccttccgggtcccctggactccctggggtgccaggctcaatgggtgacatggtgaattatgatgagatcaaacgcttcatccgccaggaaattatcaaaatgttcgatgaacgcatggcctactacaccagcaggatgcaattccccatggagatggcagccgctcctggtagaccgggtcctcccggaaaggacggtgccccaggccgaccaggcgctcccggatcaccgggattgccaggacagatcggcagagagggaagacaggggttaccgggagtgcgcggattaccaggcacaaagggagagaagggcgacataggaatcggaatcgctggtgaaaatgggctgcccggtccacccggaccacagggtcccccaggatacggaaagatgggcgcaactggaccgatgggccagcagggcatcccgggtattccaggacctcccggacctatgggccagccaggcaaagccggtcactgtaacccctctgactgttttggggcaatgccaatggaacagcagtatcctcctatgaaaacaatgaaaggtccctttgggtag

SEQ ID NO: 337121 - DNA, 510 bp, Artificial Sequence
  derived and/or modified sequence
atggtgccccgggcccccccctgcgcctggctgcggcccggccggcgggctcaggccggagagggccccagagatccaggaaatgctgcctggaggacacggaggaccggtttcccagaggccaccgggcccgcacgccacctgcagcttctgtatgtcgactttgggcgatggacccacggtagacctgttccgttatgccgagcgggatggaggccacagtgccctggtgccgcagctgctcttggactcgccggattgggggaccatatttggccacccgggcgtactgtgccccaggatcctcctgcctgggcgccgccctccagcctggcccatagcctgggagctccggttggcgccggggcagctggatgcccgtgcggtcccgctattcatcggccagcccatgcagccagtccaagcacctgtctgccaacaccacctcagccgccaacaagtcacctcgaagaaactatgggcccagctcccccagctcccggctgctag

SEQ ID NO: 337122 - DNA, 372 bp, Artificial Sequence
  derived and/or modified sequence
atgtgcggccagtgccagagcagcagcggccacatggaggaggaggcccaccccgagctgtgcccccactggcccctgcagttcagcccccagagccactgcagacaggcctacggcagagacacccacgccggcggccccggcgccagagtggacagcggccaccacctgggcctgttccccggcctgctgagcacctgccccgacggcctgtgcgtgttccccgtgcccagccccaccttcagcaccagcctgcacgtgctgatggagtgcaaggtgcaccagcccggccccctgcccggcagaggcagcgccgacgccggcctgagaggcctgccccagggcagaaccctgtgcgtgctgaccgcctag

SEQ ID NO: 337123 - DNA, 459 bp, Artificial Sequence
  derived and/or modified sequence
tgaggacggcccccccacaagggggccccccggctgggccggggcgtgggcgccctggtgcctgcccccagggctggcagccaccccccagctggggtgtgtgcctctgtgcacagaaatgctgtgggcgctgggggccctgcccgggccggccagcccggcctggatggcaccggccggcggggggcccgggccggcggggagaggcctgagggccgggcccccaaggtgtggaacccccccagccccctgtggagcgaggaggtgtacagcacagccccctactacacctcctgggcccggggcccccgctgccccccagagctgtgtgccccacccctgaagaggaaggagcagacagagcccaccccatctgtgcgccaccccaccatgatgagatacctggtggagcagaccaacagcgccacagaaaatgatgagagctgcctgaagaagtag

SEQ ID NO: 337124 - DNA, 246 bp, Artificial Sequence
  derived and/or modified sequence
atggaccccggcaagggccactgccactgcggcggccacggccaccctccagggcactgcggccccccccctggccacggacccggaccatgtggcccgcctcctcaccatgggcccgggccatgtgggcctcctcctggtcacggcccgggtccttgtgggcctccgccgcaccacggacctgggccctgtggacctcccccgggccatgggccgggccacccgccaccaggccctcatcactag

SEQ ID NO: 337125 - DNA, 288 bp, Artificial Sequence
  derived and/or modified sequence
atgccctggagaaacaaggaggccagcagccccagcagcgccaacccccccctggaggccctgcagagccccagcttcagaggcaacatggccgacaagctgaaggaccccagcaccctgggcttcctggaggccgccgtgaagatcagccacaccagccccgacatccccgccgaggtgcagatgagcgtgaaggagcacatcatgagacacaccagactgcagagacagaccaccgagcccgccagcagcaccagacacaccagcttcaagagacacctgccctag

SEQ ID NO: 337126 - DNA, 261 bp, Artificial Sequence
  derived and/or modified sequence
atgccctggagaaacaaggaggccagcagccccagcagcgccaacccccccctggaggccctgcagagccccagcttcagaggcaacatggccgacaagctgaaggaccccagcaccctgggcttcctggaggccgccgtgaagatcagccacaccagccccgacatccccgccgaggtgcagatgagcgtgaaggagcacatcatgagacacaccagactgcagagacagaccaccgagcccgccagcagcaccagatag

SEQ ID NO: 337127 - DNA, 288 bp, Artificial Sequence
  derived and/or modified sequence
atgccgtggaggaacaaggaggcttcatcaccctcttctgccaatcccccgctggaggcattacagtctccatctttccgcggaaatatggccgataagctgaaggatccttctacactgggcttcttagaggctgccgtgaaaataagccatacgtcccctgatatcccggcagaggtgcaaatgtccgttaaggagcacattatgcgtcacacgagactgcagaggcaaacaacagagcctgctagctccacacgccacacttccttcaagaggcatctcccgtag

SEQ ID NO: 337128 - DNA, 261 bp, Artificial Sequence
  derived and/or modified sequence
atgccttggcggaacaaagaagcatccagtccttcttcagccaacccaccactagaggccctgcaatcacctagctttcgggggaatatggccgacaagcttaaggatccttcaacattggggttcctggaagccgccgtgaagatctctcacacatctcctgacatccccgcagaggtgcagatgtcagtgaaggagcatattatgcgccacacacgcctgcaaaggcaaactacagagcctgccagctcgaccaggtag

SEQ ID NO: 337129 - DNA, 288 bp, Artificial Sequence
  derived and/or modified sequence
atgccctggaggaacaaggaggccagcagccccagcagcgccaacccccccctggaggccctgcagagccccagcttccggggcaacatggctgacaagctgaaggaccccagcaccctgggcttcctggaggccgctgtgaagatcagccacaccagcccagacatcccagctgaggtgcagatgtctgtgaaggagcacatcatgaggcacacccggctgcagaggcagaccacagagcccgccagcagcaccaggcacaccagcttcaagaggcacctgccctag

SEQ ID NO: 337130 - DNA, 261 bp, Artificial Sequence
  derived and/or modified sequence
atgccctggaggaacaaggaggccagcagccccagcagcgccaacccccccctggaggccctgcagagccccagcttccggggcaacatggctgacaagctgaaggaccccagcaccctgggcttcctggaggccgctgtgaagatcagccacaccagcccagacatcccagctgaggtgcagatgtctgtgaaggagcacatcatgaggcacacccggctgcagaggcagaccacagagcccgccagcagcaccaggtag

SEQ ID NO: 337131 - DNA, 288 bp, Artificial Sequence
  derived and/or modified sequence
atgccctggcggaacaaggaggccagcagccccagcagcgccaaccctccgctggaagcccttcagtctccttcattcaggggcaacatggctgacaagcttaaagatccatcaaccttgggttttctcgaggctgctgtgaaaatcagtcacacatcccccgacattcccgccgaagtgcagatgtctgtcaaagagcatataatgaggcatacaaggcttcagaggcagacaacggaacctgcaagcagtacacgtcacacttcattcaaaagacacttgccctag

SEQ ID NO: 337132 - DNA, 261 bp, Artificial Sequence
  derived and/or modified sequence
atgccctggcggaacaaggaggccagcagccccagcagcgccaacccacccctggaagcgctgcagtcccccagcttccgaggcaatatggccgacaaacttaaggacccgtctacccttggctttttggaagccgcggtaaagatatctcacacgagtcctgacatcccagccgaagtgcagatgagtgttaaggagcacatcatgagacatacacggctacagcgccagacgaccgagcccgcgtcttcaactcgctag

SEQ ID NO: 337133 - DNA, 288 bp, Artificial Sequence
  derived and/or modified sequence
atgccatggcggaataaggaagcatcaagcccatctagtgccaatccacccctggaggcattacagtctcccagttttcgtggcaacatggcagataaactcaaagatccctccacattgggctttctcgaagcagcggttaaaattagtcacacatcaccagacatacccgctgaagttcagatgagtgtgaaagaacacatcatgaggcacacaaggctgcagagacagacaacagagcccgcatcatccaccaggcatacttcctttaaaagacacttgccatag

SEQ ID NO: 337134 - DNA, 261 bp, Artificial Sequence
  derived and/or modified sequence
atgccctggcggaataaagaggcctcaagcccctcaagtgcaaacccaccactggaggcactccagagtccttcattccgtggtaacatggccgacaaacttaaggaccccagcactctcgggttcctggaggcagcagtgaaaatttctcacacctccccagatatcccagccgaggtccagatgagtgtgaaggagcacattatgcgacacacccggctgcaacgacagacaacagagcctgccagcagtacgcgatag

SEQ ID NO: 337135 - DNA, 391 bp, Artificial Sequence
  derived and/or modified sequence
cctgcccgatccgcgctgaccctgcgcgggacgcagccccaggcggctgcctagccgaggcgggagcccgagctgagtcgagctcgccggagcggctgtgctggatgccctggaggaacaaggaggcctccagtccctcttctgctaatccccccttggaagccctccagagccccagcttcagaggcaacatggcggacaagctgaaggaccccagcaccctgggcttcctggaggcggccgtgaagatcagccacacgtccccagatatcccagctgaggtgcagatgtcggtcaaggagcacatcatgcgtcacacccggctgcagcggcaaactacagagccagcgtcatccaccaggcacacgtccttcaagcgccacctgccaag

SEQ ID NO: 337136 - DNA, 565 bp, Artificial Sequence
  derived and/or modified sequence
gtccttcccccaccccctctcgcccctataactcgctccctccgtccctctcggactcggactcggggccggtgcgcgactgagctggcgcctctagccgactttgccaagagggcgcctcctgcccgatccgcgctgaccctgcgcgggacgcagccccaggcggctgcctagccgaggcgggagcccgagctgagtcgagctcgccggagcgggcacctctgtcagcctcctcgcagttgtagttattgtgtgtggcgtggccctggtggcagtttttctctttctcttttggaagctgtgctggatgccctggaggaacaaggaggcctccagtccctcttctgctaatccccccttggaagccctccagagccccagcttcagaggcaacatggcggacaagctgaaggaccccagcaccctgggcttcctggaggcggccgtgaagatcagccacacgtccccagatatcccagctgaggtgcagatgtcggtcaaggagcacatcatgcgtcacacccggctgcagcggcaaactacagagccagcgtcatccaccagg

SEQ ID NO: 337137 - DNA, 390 bp, Artificial Sequence
  derived and/or modified sequence
atgccccggcggggccggtggctgagctgcagccccgaggccgagggtatacgacgtgtgggttctcgcgcagctctccgggttcatcctctggagcacaggccccgttgggggactcccggcgggatgactaaggggagtagattcctggcccctgaatctgaactctcctggggaccaggggacgcaactcctggcttgtggttcttcatttcagatggcgtgggagaggacctctggaattcagcaggttggtcatccgtgccagaagggttcgggcagcgcatgcgcgggcccggattaactcctcacaccgacgccgggggcgatggcaataaaaggcgccactcggaaagattgtgccgggcatctgttctccaaccgccctag

SEQ ID NO: 337138 - DNA, 390 bp, Artificial Sequence
  derived and/or modified sequence
atgcctcgtcgcggtagatggctgtcctgcagtcctgaggctgaagggattcgaagggtgggctcacgcgcagcactgagggtgcatcccttggaacaccgtcctcgttggggcacccctgggggtatgactaaaggctctcggttcctcgcgccagaaagcgagctgtcatgggggccaggcgacgctactcccggactgtggttttttattagtgatggcgtgggcgaggatctctggaatagcgcgggttggtctagcgtgcctgaaggctttggacagcgcatgaggggcccaggtctgaccccccacacggacgcaggcggagacgggaataaacgtcgtcactctgagagattgtgccgggctagtgtattacagccaccctag

SEQ ID NO: 337139 - protein, 226 aa, Artificial Sequence
  derived and/or modified sequence
MHGRAYLLLHRDFCDLKENNYKGITAKPVSEDMMEWEVEIEGLQNSVWQGLVFQLTIHFTSEYNYAPPVVKFITIPFHPNVDPHTGQPCIDFLDNPEKWNTNYTLSSILLALQVMLSNPVLENPVNLEAARILVKDESLYRTILRLFNRPLQMKDDSQELPKDPRKCIRPIKTTSFSDYYQTWSRIATSKATEYYRTPLLKVPNFIGQYYKWKKMDLQHQKEWNLK

SEQ ID NO: 337140 - protein, 321 aa, Artificial Sequence
  derived and/or modified sequence
MHGRAYLLLHRDFCDLKENNYKGITAKPVSEDMMEWEVEIEGLQNSVWQGLVFQLTIHFTSEYNYAPPVVKFITIPFHPNVDPHTGQPCIDFLDNPEKWNTNYTLSSILLALQVMLSNPVLENPVNLEAARILVKDESLYRTILRLFNRPLQMKDDSQELPKDPRKCIRPIKTTSFSDYYQTWSRIATSKATEYYRTPLLKVPNFIGQYYKWKKMDLQHQKEWNLKYSVIKCWLARKRMPHEVTHSMEEIKLCPTLIPTTDEIFLESPTAINSITDIYETEEEGWKSDTSLYENDTDEPREEEVEDLISWTNTLNTNTSED

SEQ ID NO: 337141 - DNA, 966 bp, Artificial Sequence
  derived and/or modified sequence
atgcacggcagagcctacctgctgctgcacagagacttctgcgacctgaaggagaacaactacaagggcatcaccgccaagcccgtgagcgaggacatgatggagtgggaggtggagatcgagggcctgcagaacagcgtgtggcagggcctggtgttccagctgaccatccacttcaccagcgagtacaactacgccccccccgtggtgaagttcatcaccatccccttccaccccaacgtggacccccacaccggccagccctgcatcgacttcctggacaaccccgagaagtggaacaccaactacaccctgagcagcatcctgctggccctgcaggtgatgctgagcaaccccgtgctggagaaccccgtgaacctggaggccgccagaatcctggtgaaggacgagagcctgtacagaaccatcctgagactgttcaacagacccctgcagatgaaggacgacagccaggagctgcccaaggaccccagaaagtgcatcagacccatcaagaccaccagcttcagcgactactaccagacctggagcagaatcgccaccagcaaggccaccgagtactacagaacccccctgctgaaggtgcccaacttcatcggccagtactacaagtggaagaagatggacctgcagcaccagaaggagtggaacctgaagtacagcgtgatcaagtgctggctggccagaaagagaatgccccacgaggtgacccacagcatggaggagatcaagctgtgccccaccctgatccccaccaccgacgagatcttcctggagagccccaccgccatcaacagcatcaccgacatctacgagaccgaggaggagggctggaagagcgacaccagcctgtacgagaacgacaccgacgagcccagagaggaggaggtggaggacctgatcagctggaccaacaccctgaacaccaacaccagcgaggactag

SEQ ID NO: 337142 - DNA, 966 bp, Artificial Sequence
  derived and/or modified sequence
atgcacggccgggcttacctgttgttacatcgggacttctgcgatctcaaggagaacaactataagggaatcaccgccaagcccgtaagcgaagacatgatggagtgggaggtagagatcgagggacttcagaacagcgtctggcagggcctggtgttccagttgacaattcatttcacctccgagtacaattacgcacccccagtggttaaattcattactatacccttccatccgaacgtggatcctcacacaggccagccctgcatcgacttcctggataatccagagaagtggaatacaaattacaccctgagcagcattctgctcgcactgcaggttatgttgtccaacccggtgttagaaaatcccgtaaacttggaagcagctaggattctagtaaaagatgagagcctttataggacaatactccgcctatttaaccggcctctccaaatgaaagatgattctcaggaactgcccaaggacccacgtaaatgtatccggcctatcaagaccaccagcttctctgactactaccagacttggtcccggattgcgactagcaaggcaacagaatattaccgcaccccactcctgaaggtgccaaattttattggacagtactataaatggaaaaagatggacctgcagcatcagaaggaatggaatctaaagtatagcgtcattaagtgctggctcgcacgcaagagaatgcctcatgaagtgacccactctatggaagagattaagctctgccctaccctgatccctacgacggacgagatcttcctggaatctcccactgcaatcaattcgatcactgatatttacgagaccgaggaggaaggctggaagagtgatacctccctctatgagaatgatactgacgaaccccgtgaggaagaagttgaggacctcatttcctggacaaacactctgaataccaatacaagtgaggattag

SEQ ID NO: 337143 - DNA, 966 bp, Artificial Sequence
  derived and/or modified sequence
atgcacggccgggcctacctgctgctgcaccgggacttctgtgacctgaaggagaacaactacaagggcatcacagccaagcctgtgtctgaggacatgatggagtgggaggtggagattgagggcctgcagaacagcgtgtggcagggcctggtgttccagctgaccatccacttcaccagcgagtacaactatgcccctcctgtggtgaagttcatcaccatccccttccaccccaacgtggacccccacacaggccagccctgcatcgacttcctggacaaccctgagaagtggaacaccaactacaccctgagcagcatcctgctggccctgcaggtgatgctgagcaaccctgtgctggagaaccctgtgaacctggaggccgcccgcatcctggtgaaggatgagagcctgtaccgcaccatcctgcggctcttcaaccggcccctgcagatgaaggatgacagccaggagctgcccaaggaccccaggaagtgcatccggcccatcaagaccaccagcttcagtgactactaccagacctggagccgcatcgccaccagcaaggccacagagtactaccgcacccccctgctgaaggtgcccaacttcatcggccagtactacaagtggaagaagatggacctgcagcaccagaaggagtggaacctgaagtacagcgtcatcaagtgctggctggccaggaagaggatgcctcatgaggtgacccacagcatggaggagatcaagctgtgccccaccctcatccccaccacagatgagatcttcctggagagccccacagccatcaacagcatcacagacatctatgaaacagaggaggagggctggaagagtgacaccagcctgtatgaaaatgacacagatgagccccgggaggaggaggtggaggacctgatctcctggaccaacaccctgaacaccaacaccagcgaggactag

SEQ ID NO: 337144 - DNA, 966 bp, Artificial Sequence
  derived and/or modified sequence
atgcacggccgggcctacctgctgctgcaccgggacttctgcgacctcaaagagaataactataagggtatcaccgcgaagcccgtctcagaggacatgatggagtgggaggtggagattgagggcttgcaaaatagcgtctggcaagggcttgtgttccaactgaccatccacttcacgagtgagtataactatgccccccctgtggtgaaattcataaccattccgttccaccccaatgtagacccccatactggtcagccctgtatcgacttcctggataaccctgagaagtggaatacaaattatacactgtcatcgattcttcttgccctacaggtgatgctaagcaatcctgttcttgagaaccctgtgaatcttgaagctgcccggattctggtgaaagatgagtccctatacagaaccatactacgattgtttaatagaccccttcaaatgaaggatgattcccaagagctgcctaaagaccctcgaaagtgcatacggccaatcaagaccacatcatttagtgactattaccagacttggagccggatagcaacttctaaggctacggagtattatcgtacacctctcctaaaagttcctaattttatcggccagtattataaatggaagaaaatggatttacagcatcagaaggaatggaacctgaagtactccgtgataaagtgctggcttgcaagaaaacggatgcctcacgaagtcacacacagcatggaagaaatcaaactttgtcccacactcattccaacaacagatgaaattttcctggagagtcctactgccattaattcgattactgatatttacgagactgaggaggagggctggaagtccgatacttctctatacgaaaacgatacagatgagccccgtgaagaggaagtcgaagacctcatcagctggaccaacactttgaataccaatacgtctgaggattag

SEQ ID NO: 337145 - DNA, 966 bp, Artificial Sequence
  derived and/or modified sequence
atgcacggacgtgcctatttactgctccacagggacttctgtgacttgaaggaaaacaactataaagggataactgccaagcccgtttcagaagacatgatggagtgggaagtggagatcgagggcctgcaaaattcagtgtggcagggacttgtgttccagctcacaatccactttacctctgagtacaactacgcccctcctgtggttaagtttataacgattccttttcaccccaacgtggacccccacaccggccagccatgtatcgactttctcgacaacccggaaaaatggaacaccaattatactctgtctagcatcttgttggcactccaggtcatgctaagtaaccctgtcctggagaatccagtgaatcttgaggccgcaagaattctggtaaaggatgagtctctgtaccgcaccattctgcgactgtttaaccgtccgctgcagatgaaagacgattcacaggagctcccaaaagatcctcggaagtgcataagacctatcaagacaaccagtttttcagactactatcagacgtggtccaggattgctacttcaaaagcaactgaatactataggacccctctgttgaaagtcccgaacttcattggtcaatattataaatggaagaaaatggatctccagcatcagaaggaatggaacttgaagtactcagtgatcaaatgttggctggcacggaaacgcatgccccatgaggtgacccattccatggaggagattaagctttgtccaactctcattcccaccacggacgaaatctttttggagagccccaccgccattaattctattaccgatatttacgaaacagaggaggaggggtggaagagcgatacttcactgtatgaaaatgataccgacgaacccagagaagaggaagtggaagacctgataagctggactaataccctgaacacgaataccagcgaagattag

SEQ ID NO: 337146 - DNA, 1550 bp, Artificial Sequence
  derived and/or modified sequence
gatttgcttcctccggtgcgtggctgcggggttgcacctgtgaagcgaagacaacctgctaggaccctgataggcgtacacctctcactcccactcacgcgccgacgacatgggcttgtctccgttactcatccaagtttgtcttgagactgggctgtgagccggcactgcagtgaaacgccgcagatgaggaagtgcccaagtcttccttcgggaagttctcgtttagaggagtcaggagaaaaagtcattgttatatcccaactttagaagccgcttatcttggtaccgttctgaggttctagaaagcaagtaacttatatcagtttactaagtgtgggaaagtgacccataacttcaaacatctgcctcagagtaaacctgaggcatttggggacaagtgtcagaccctccgctgcctatcatgcacggcagagcttacctcttgctgcacagagacttctgtgatctcaaggagaacaattataagggtatcactgctaagcctgtaagtgaagatatgatggaatgggaagttgaaattgaaggtctacagaattcagtttggcagggtttagtcttccaactgacaatacattttacatcggagtacaactatgctcctccagttgtgaaatttataacaattccgtttcatccaaatgtagacccacacactggtcagccctgtatagactttttggacaaccctgagaagtggaatacaaactatacattgagcagcatcttacttgccctacaggttatgctttctaatccagtgctagagaatccagtgaatttggaagcagccagaatactggttaaagatgaatctctgtacagaacaattctaagacttttcaacaggccattacaaatgaaagatgacagccaggagttacctaaagacccacgtaaatgtatcagaccaattaaaacaacctcatttagtgattactaccagacatggtccagaatagctacatcaaaagccacagaatactacagaactccattgctcaaagttccaaatttcattggacagtattacaaatggaagaaaatggatctacagcatcagaaagaatggaatttaaagtattccgttatcaagtgttggcttgctagaaaaagaatgcctcatgaagtcactcactcaatggaagaaattaagctctgcccaactctaattcccaccacagatgaaatttttcttgagtcaccaactgcaataaatagcatcacagacatttatgaaacagaagaggaggggtggaagagtgacacttcattatatgaaaatgacacagatgagcccagggaagaggaagtggaagatctgatctcctggaccaatactctcaatacaaatacttcagaagattaagcagaacattatcagattcaaaaaataaacagcctccgccatagcccagcgttgtggagcaattttggaagactctcagaacttggatttcattttttttaagttgttctcacccactcactgcaagtacaaattagaaatataagtacaaatcagtaaa

SEQ ID NO: 337147 - protein, 90 aa, Artificial Sequence
  derived and/or modified sequence
  misc_feature (1)..(1): Xaa can be any naturally occurring amino acid
XVIPLLRESVGILMQRTPPLLENSLPQCYQRVQQLQGVYSLQEQHFWTLCSDVYVGTLKLIVAPDADARWILSQTHNIFTQKLEEENENL

SEQ ID NO: 337148 - DNA, 273 bp, Artificial Sequence
  derived and/or modified sequence
taggtgattccactgctgcgcgagtccgtggggattttgatgcagcgcacgccgcccctgctggaaaattcacttccgcagtgttatcagcgtgtccaacaactgcaaggagtttacagtctccaggaacaacacttctggaccctctgtagcgacgtctacgtaggaaccttaaaactgatagtggctcctgacgccgatgctaggtggatcctgtctcaaacgcacaacattttcactcagaagttggaggaggagaatgaaaatctgtag

SEQ ID NO: 337149 - DNA, 273 bp, Artificial Sequence
  derived and/or modified sequence
tgagtcatccccctgctgcgggagagcgtgggcatcctgatgcagaggaccccacccctgctggagaacagcctgccccagtgctaccagagggtgcagcagctgcagggcgtgtacagcctgcaggagcagcacttctggaccctgtgcagtgatgtgtatgtgggcaccctgaagctgattgtggccccagatgctgatgcccgctggatcctgagccagacccacaacatcttcacccagaagctggaggaggagaatgaaaacctgtag

SEQ ID NO: 337150 - DNA, 273 bp, Artificial Sequence
  derived and/or modified sequence
tgagtgatccccctgctgcgggagagcgtgggcatcctgatgcagagaacccctccactactggagaattcactgcctcagtgctaccaacgggttcagcaactccagggtgtgtatagcttgcaggagcagcacttctggaccttgtgctccgatgtgtacgttggtacactgaagcttatagtagccccagatgctgacgcccggtggattctgagccagactcataatattttcacccagaaattggaagaagagaacgagaatctgtag

SEQ ID NO: 337151 - DNA, 273 bp, Artificial Sequence
  derived and/or modified sequence
taagttatcccactccttagagagtctgtcggtattctgatgcagagaaccccaccgctgcttgaaaacagtctcccacaatgttatcagagggtgcaacagctgcagggcgtttattcgctgcaggaacagcacttctggaccctatgttcagacgtttatgttggcactctcaagctaatcgttgccccagatgccgacgccagatggattctgagccaaacccataatatattcacccagaagctcgaagaggagaacgagaacctgtag

SEQ ID NO: 337152 - DNA, 581 bp, Artificial Sequence
  derived and/or modified sequence
tgttattcctcttttaagagaatctgttggaatattaatgcagagaactcctcccctattagaaaatagtctgcctcagtgctatcagagggtacagcagttgcaaggagtttacagtttacaggaacagcacttctggactttatgttctgacgtttatgttgggaccttgaaattaatagtagcacctgatgctgatgctaggtggattttaagccaaacacataatatttttactcagaaactggaagaggaaaatgagaatctgtaaaacttgaagctgtcctcatcgggccagatggataaagcaaaatgacttttttttcttttttttttctgttagactgagcttttgtggaaagctgtaagccctcaggggaaggatatcagcttgagtaattaactcatgattatgcaaagaaaatttacctagcctctttgtttttcctttctttgttattgccttgggctacttcattttttattaccatcttctctgtttagggctaggagtaaggaaaatgacagagacaataaaaagagcccaagttttgcccattttgctttcactaacaatgttg

SEQ ID NO: 337153 - DNA, 273 bp, Artificial Sequence
  derived and/or modified sequence
tgagtgatccccctgctgagagagagcgtgggcatcctgatgcagagaaccccccccctgctggagaacagcctgccccagtgctaccagagagtgcagcagctgcagggcgtgtacagcctgcaggagcagcacttctggaccctgtgcagcgacgtgtacgtgggcaccctgaagctgatcgtggcccccgacgccgacgccagatggatcctgagccagacccacaacatcttcacccagaagctggaggaggagaacgagaacctgtag

SEQ ID NO: 337154 - protein, 222 aa, Artificial Sequence
  derived and/or modified sequence
MNISIYCQAAIKNCQPRKLHFYKNGIKERFQITRINKTTARLWYKNFLEPHASMYCTAECPKHFQETLICGKDISSGYPPDIPDEVTCVIYEYSGNMTCTWNAGKLTYIDTKYVVHVKSLETEEEQQYLTSSYINISTDSLQGGKKYLVWVQAANALGMEESKQLQIHLDDIVIPSAAVISRAETINATVPKTIIYWDSQTTIEKVSCEMRYKATTNQTWND

SEQ ID NO: 337155 - DNA, 2912 bp, Artificial Sequence
  derived and/or modified sequence
gctgacatttccattgacctcagaagtgaaaatctaaagtgagtgctgacaggcaggcagtgaggaaagaagacatgacacagccaacaagggtggcagcctggctctgaagtggaattatgtgcttcaaacaggttgaaagagggaaacagtcttttcctgcttccagacatgaatcaggtcactattcaatgggatgcagtaatagccctttacatactcttcagctggtgtcatggaggaattacaaatataaactgctctggccacatctgggtagaaccagccacaatttttaagatgggtatgaatatctctatatattgccaagcagcaattaagaactgccaaccaaggaaacttcatttttataaaaatggcatcaaagaaagatttcaaatcacaaggattaataaaacaacagctcggctttggtataaaaactttctggaaccacatgcttctatgtactgcactgctgaatgtcccaaacattttcaagagacactgatatgtggaaaagacatttcttctggatatccgccagatattcctgatgaagtaacctgtgtcatttatgaatattcaggcaacatgacttgcacctggaatgctgggaagctcacctacatagacacaaaatacgtggtacatgtgaagagtttagagacagaagaagagcaacagtatctcacctcaagctatattaacatctccactgattcattacaaggtggcaagaagtacttggtttgggtccaagcagcaaacgcactaggcatggaagagtcaaaacaactgcaaattcacctggatgatatagtgataccttctgcagccgtcatttccagggctgagactataaatgctacagtgcccaagaccataatttattgggatagtcaaacaacaattgaaaaggtttcctgtgaaatgagatacaaggctacaacaaaccaaacttggaatgttaaagaatttgacaccaattttacatatgtgcaacagtcagaattctacttggagccaaacattaagtacgtatttcaagtgagatgtcaagaaacaggcaaaaggtactggcagccttggagttcactgttttttcataaaacacctgaaacagttccccaggtcacatcaaaagcattccaacatgacacatggaattctgggctaacagttgcttccatctctacagggcaccttacttctgacaacagaggagacattggacttttattgggaatgatcgtctttgctgttatgttgtcaattctttctttgattgggatatttaacagatcattccgaactgggattaaaagaaggatcttattgttaataccaaagtggctttatgaagatattcctaatatgaaaaacagcaatgttgtgaaaatgctacaggaaaatagtgaacttatgaataataattccagtgagcaggtcctatatgttgatcccatgattacagagataaaagaaatcttcatcccagaacacaagcctacagactacaagaaggagaatacaggacccctggagacaagagactacccgcaaaactcgctattcgacaatactacagttgtatatattcctgatctcaacactggatataaaccccaaatttcaaattttctgcctgagggaagccatctcagcaataataatgaaattacttccttaacacttaaaccaccagttgattccttagactcaggaaataatcccaggttacaaaagcatcctaattttgctttttctgtttcaagtgtgaattcactaagcaacacaatatttcttggagaattaagcctcatattaaatcaaggagaatgcagttctcctgacatacaaaactcagtagaggaggaaaccaccatgcttttggaaaatgattcacccagtgaaactattccagaacagaccctgcttcctgatgaatttgtctcctgtttggggatcgtgaatgaggagttgccatctattaatacttattttccacaaaatattttggaaagccacttcaataggatttcactcttggaaaagtagagctgtgtggtcaaaatcaatatgagaaagctgccttgcaatctgaacttgggttttccctgcaatagaaattgaattctgcctctttttgaaaaaaatgtattcacatacaaatcttcacatggacacatgttttcatttcccttggataaatacctaggtaggggattgctgggccatatgataagcatatgtttcagttctaccaatcttgtttccagagtagtgacatttctgtgctcctaccatcaccatgtaagaattcccgggagctccatgcctttttaattttagccattcttctgcctcatttcttaaaattagagaattaaggtcccgaaggtggaacatgcttcatggtcacacatacaggcacaaaaacagcattatgtggacgcctcatgtattttttatagagtcaactatttcctctttattttccctcattgaaagatgcaaaacagctctctattgtgtacagaaagggtaaataatgcaaaatacctggtagtaaaataaatgctgaaaattttcctttaaaatagaatcattaggccaggcgtggtggctcatgcttgtaatcccagcactttggtaggctgaggtaggtggatcacctgaggtcaggagttcgagtccagcctggccaatatgctgaaaccctgtctctactaaaattacaaaaattagccggccatggtggcaggtgcttgtaatcccagctacttgggaggctgaggcaggagaatcacttgaaccaggaaggcagaggttgcactgagctgagattgtgccactgcactccagcctgggcaacaagagcaaaactctgtctggaaaaaaaaaaaaaa

SEQ ID NO: 337156 - DNA, 2709 bp, Artificial Sequence
  derived and/or modified sequence
acaagggtggcagcctggctctgaagtggaattatgtgcttcaaacaggttgaaagagggaaacagtcttttcctgcttccagacatgaatcaggtcactattcaatgggatgcagtaatagccctttacatactcttcagctggtgtcatggaggaattacaaatataaactgctctggccacatctgggtagaaccagccacaatttttaagatgggtatgaatatctctatatattgccaagcagcaattaagaactgccaaccaaggaaacttcatttttataaaaatggcatcaaagaaagatttcaaatcacaaggattaataaaacaacagctcggctttggtataaaaactttctggaaccacatgcttctatgtactgcactgctgaatgtcccaaacattttcaagagacactgatatgtggaaaagacatttcttctggatatccgccagatattcctgatgaagtaacctgtgtcatttatgaatattcaggcaacatgacttgcacctggaatgctgggaagctcacctacatagacacaaaatacgtggtacatgtgaagagtttagagacagaagaagagcaacagtatctcacctcaagctatattaacatctccactgattcattacaaggtggcaagaagtacttggtttgggtccaagcagcaaacgcactaggcatggaagagtcaaaacaactgcaaattcacctggatgatatagtgataccttctgcagccgtcatttccagggctgagactataaatgctacagtgcccaagaccataatttattgggatagtcaaacaacaattgaaaaggtttcctgtgaaatgagatacaaggctacaacaaaccaaacttggaatgttaaagaatttgacaccaattttacatatgtgcaacagtcagaattctacttggagccaaacattaagtacgtatttcaagtgagatgtcaagaaacaggcaaaaggtactggcagccttggagttcactgttttttcataaaacacctgaaacagttccccaggtcacatcaaaagcattccaacatgacacatggaattctgggctaacagttgcttccatctctacagggcaccttacttctggattaaaagaaggatcttattgttaataccaaagtggctttatgaagatattcctaatatgaaaaacagcaatgttgtgaaaatgctacaggaaaatagtgaacttatgaataataattccagtgagcaggtcctatatgttgatcccatgattacagagataaaagaaatcttcatcccagaacacaagcctacagactacaagaaggagaatacaggacccctggagacaagagactacccgcaaaactcgctattcgacaatactacagttgtatatattcctgatctcaacactggatataaaccccaaatttcaaattttctgcctgagggaagccatctcagcaataataatgaaattacttccttaacacttaaaccaccagttgattccttagactcaggaaataatcccaggttacaaaagcatcctaattttgctttttctgtttcaagtgtgaattcactaagcaacacaatatttcttggagaattaagcctcatattaaatcaaggagaatgcagttctcctgacatacaaaactcagtagaggaggaaaccaccatgcttttggaaaatgattcacccagtgaaactattccagaacagaccctgcttcctgatgaatttgtctcctgtttggggatcgtgaatgaggagttgccatctattaatacttattttccacaaaatattttggaaagccacttcaataggatttcactcttggaaaagtagagctgtgtggtcaaaatcaatatgagaaagctgccttgcaatctgaacttgggttttccctgcaatagaaattgaattctgcctctttttgaaaaaaatgtattcacatacaaatcttcacatggacacatgttttcatttcccttggataaatacctaggtaggggattgctgggccatatgataagcatatgtttcagttctaccaatcttgtttccagagtagtgacatttctgtgctcctaccatcaccatgtaagaattcccgggagctccatgcctttttaattttagccattcttctgcctcatttcttaaaattagagaattaaggtcccgaaggtggaacatgcttcatggtcacacatacaggcacaaaaacagcattatgtggacgcctcatgtattttttatagagtcaactatttcctctttattttccctcattgaaagatgcaaaacagctctctattgtgtacagaaagggtaaataatgcaaaatacctggtagtaaaataaatgctgaaaattttcctttaaaatagaatcattaggccaggcgtggtggctcatgcttgtaatcccagcactttggtaggctgaggtaggtggatcacctgaggtcaggagttcgagtccagcctggccaatatgctgaaaccctgtctctactaaaattacaaaaattagccggccatggtggcaggtgcttgtaatcccagctacttgggaggctgaggcaggagaatcacttgaaccaggaaggcagaggttgcactgagctgagattgtgccactgcactccagcctgggcaacaagagcaaaactctgtctgg

SEQ ID NO: 337157 - DNA, 2415 bp, Artificial Sequence
  derived and/or modified sequence
acaagggtggcagcctggctctgaagtggaattatgtgcttcaaacaggttgaaagagggaaacagtcttttcctgcttccagacatgaatcaggtcactattcaatgggatgcagtaatagccctttacatactcttcagctggtgtcatggaggaattacaaatataaactgctctggccacatctgggtagaaccagccacaatttttaagatgggtatgaatatctctatatattgccaagcagcaattaagaactgccaaccaaggaaacttcatttttataaaaatggcatcaaagaaagatttcaaatcacaaggattaataaaacaacagctcggctttggtataaaaactttctggaaccacatgcttctatgtactgcactgctgaatgtcccaaacattttcaagagacactgatatgtggaaaagacatttcttctggatatccgccagatattcctgatgaagtaacctgtgtcatttatgaatattcaggcaacatgacttgcacctggaatgctgggaagctcacctacatagacacaaaatacgtggtacatgtgaagagtttagagacagaagaagagcaacagtatctcacctcaagctatattaacatctccactgattcattacaaggtggcaagaagtacgtatttcaagtgagatgtcaagaaacaggcaaaaggtactggcagccttggagttcactgttttttcataaaacacctgaaacagttccccaggtcacatcaaaagcattccaacatgacacatggaattctgggctaacagttgcttccatctctacagggcaccttacttctggattaaaagaaggatcttattgttaataccaaagtggctttatgaagatattcctaatatgaaaaacagcaatgttgtgaaaatgctacaggaaaatagtgaacttatgaataataattccagtgagcaggtcctatatgttgatcccatgattacagagataaaagaaatcttcatcccagaacacaagcctacagactacaagaaggagaatacaggacccctggagacaagagactacccgcaaaactcgctattcgacaatactacagttgtatatattcctgatctcaacactggatataaaccccaaatttcaaattttctgcctgagggaagccatctcagcaataataatgaaattacttccttaacacttaaaccaccagttgattccttagactcaggaaataatcccaggttacaaaagcatcctaattttgctttttctgtttcaagtgtgaattcactaagcaacacaatatttcttggagaattaagcctcatattaaatcaaggagaatgcagttctcctgacatacaaaactcagtagaggaggaaaccaccatgcttttggaaaatgattcacccagtgaaactattccagaacagaccctgcttcctgatgaatttgtctcctgtttggggatcgtgaatgaggagttgccatctattaatacttattttccacaaaatattttggaaagccacttcaataggatttcactcttggaaaagtagagctgtgtggtcaaaatcaatatgagaaagctgccttgcaatctgaacttgggttttccctgcaatagaaattgaattctgcctctttttgaaaaaaatgtattcacatacaaatcttcacatggacacatgttttcatttcccttggataaatacctaggtaggggattgctgggccatatgataagcatatgtttcagttctaccaatcttgtttccagagtagtgacatttctgtgctcctaccatcaccatgtaagaattcccgggagctccatgcctttttaattttagccattcttctgcctcatttcttaaaattagagaattaaggtcccgaaggtggaacatgcttcatggtcacacatacaggcacaaaaacagcattatgtggacgcctcatgtattttttatagagtcaactatttcctctttattttccctcattgaaagatgcaaaacagctctctattgtgtacagaaagggtaaataatgcaaaatacctggtagtaaaataaatgctgaaaattttcctttaaaatagaatcattaggccaggcgtggtggctcatgcttgtaatcccagcactttggtaggctgaggtaggtggatcacctgaggtcaggagttcgagtccagcctggccaatatgctgaaaccctgtctctactaaaattacaaaaattagccggccatggtggcaggtgcttgtaatcccagctacttgggaggctgaggcaggagaatcacttgaaccaggaaggcagaggttgcactgagctgagattgtgccactgcactccagcctgggcaacaagagcaaaactctgtctgg

SEQ ID NO: 337158 - DNA, 2722 bp, Artificial Sequence
  derived and/or modified sequence
acaagggtggcagcctggctctgaagtggaattatgtgcttcaaacaggttgaaagagggaaacagtcttttcctgcttccagacatgaatcaggtcactattcaatgggatgcagtaatagccctttacatactcttcagctggtgtcatggaggaattacaaatataaactgctctggccacatctgggtagaaccagccacaatttttaagatgggtatgaatatctctatatattgccaagcagcaattaagaactgccaaccaaggaaacttcatttttataaaaatggcatcaaagaaagatttcaaatcacaaggattaataaaacaacagctcggctttggtataaaaactttctggaaccacatgcttctatgtactgcactgctgaatgtcccaaacattttcaagagacactgatatgtggaaaagacatttcttctggatatccgccagatattcctgatgaagtaacctgtgtcatttatgaatattcaggcaacatgacttgcacctggaatgctgggaagctcacctacatagacacaaaatacgtggtacatgtgaagagtttagagacagaagaagagcaacagtatctcacctcaagctatattaacatctccactgattcattacaaggtggcaagaagtacttggtttgggtccaagcagcaaacgcactaggcatggaagagtcaaaacaactgcaaattcacctggatgatatagtgataccttctgcagccgtcatttccagggctgagactataaatgctacagtgcccaagaccataatttattgggatagtcaaacaacaattgaaaaggtttcctgtgaaatgagatacaaggctacaacaaaccaaacttggaatgttaaagaatttgacaccaattttacatatgtgcaacagtcagaattctacttggagccaaacattaagtacgtatttcaagtgagatgtcaagaaacaggcaaaaggtactggcagccttggagttcactgttttttcataaaacacctgaaacagacaacagaggagacattggacttttattgggaatgatcgtctttgctgttatgttgtcaattctttctttgattgggatatttaacagatcattccgaactgggattaaaagaaggatcttattgttaataccaaagtggctttatgaagatattcctaatatgaaaaacagcaatgttgtgaaaatgctacaggaaaatagtgaacttatgaataataattccagtgagcaggtcctatatgttgatcccatgattacagagataaaagaaatcttcatcccagaacacaagcctacagactacaagaaggagaatacaggacccctggagacaagagactacccgcaaaactcgctattcgacaatactacagttgtatatattcctgatctcaacactggatataaaccccaaatttcaaattttctgcctgagggaagccatctcagcaataataatgaaattacttccttaacacttaaaccaccagttgattccttagactcaggaaataatcccaggttacaaaagcatcctaattttgctttttctgtttcaagtgtgaattcactaagcaacacaatatttcttggagaattaagcctcatattaaatcaaggagaatgcagttctcctgacatacaaaactcagtagaggaggaaaccaccatgcttttggaaaatgattcacccagtgaaactattccagaacagaccctgcttcctgatgaatttgtctcctgtttggggatcgtgaatgaggagttgccatctattaatacttattttccacaaaatattttggaaagccacttcaataggatttcactcttggaaaagtagagctgtgtggtcaaaatcaatatgagaaagctgccttgcaatctgaacttgggttttccctgcaatagaaattgaattctgcctctttttgaaaaaaatgtattcacatacaaatcttcacatggacacatgttttcatttcccttggataaatacctaggtaggggattgctgggccatatgataagcatatgtttcagttctaccaatcttgtttccagagtagtgacatttctgtgctcctaccatcaccatgtaagaattcccgggagctccatgcctttttaattttagccattcttctgcctcatttcttaaaattagagaattaaggtcccgaaggtggaacatgcttcatggtcacacatacaggcacaaaaacagcattatgtggacgcctcatgtattttttatagagtcaactatttcctctttattttccctcattgaaagatgcaaaacagctctctattgtgtacagaaagggtaaataatgcaaaatacctggtagtaaaataaatgctgaaaattttcctttaaaatagaatcattaggccaggcgtggtggctcatgcttgtaatcccagcactttggtaggctgaggtaggtggatcacctgaggtcaggagttcgagtccagcctggccaatatgctgaaaccctgtctctactaaaattacaaaaattagccggccatggtggcaggtgcttgtaatcccagctacttgggaggctgaggcaggagaatcacttgaaccaggaaggcagaggttgcactgagctgagattgtgccactgcactccagcctgggcaacaagagcaaaactctgtctgg

SEQ ID NO: 337159 - DNA, 886 bp, Artificial Sequence
  derived and/or modified sequence
acaagggtggcagcctggctctgaagtggaattatgtgcttcaaacaggttgaaagagggaaacagtcttttcctgcttccagacatgaatcaggtcactattcaatgggatgcagtaatagccctttacatactcttcagctggtgtcatggaggaattacaaatataaactgctctggccacatctgggtagaaccagccacaatttttaagatgggtatgaatatctctatatattgccaagcagcaattaagaactgccaaccaaggaaacttcatttttataaaaatggcatcaaagaaagatttcaaatcacaaggattaataaaacaacagctcggctttggtataaaaactttctggaaccacatgcttctatgtactgcactgctgaatgtcccaaacattttcaagagacactgatatgtggaaaagacatttcttctggatatccgccagatattcctgatgaagtaacctgtgtcatttatgaatattcaggcaacatgacttgcacctggaatgctgggaagctcacctacatagacacaaaatacgtggtacatgtgaagagtttagagacagaagaagagcaacagtatctcacctcaagctatattaacatctccactgattcattacaaggtggcaagaagtacttggtttgggtccaagcagcaaacgcactaggcatggaagagtcaaaacaactgcaaattcacctggatgatatagtgataccttctgcagccgtcatttccagggctgagactataaatgctacagtgcccaagaccataatttattgggatagtcaaacaacaattgaaaaggtttcctgtgaaatgagatacaaggctacaacaaaccaaacttggaatgat

SEQ ID NO: 337160 - protein, 629 aa, Artificial Sequence
  derived and/or modified sequence
MNQVTIQWDAVIALYILFSWCHGGITNINCSGHIWVEPATIFKMGMNISIYCQAAIKNCQPRKLHFYKNGIKERFQITRINKTTARLWYKNFLEPHASMYCTAECPKHFQETLICGKDISSGYPPDIPDEVTCVIYEYSGNMTCTWNAGKLTYIDTKYVVHVKSLETEEEQQYLTSSYINISTDSLQGGKKYLVWVQAANALGMEESKQLQIHLDDIVIPSAAVISRAETINATVPKTIIYWDSQTTIEKVSCEMRYKATTNQTWNVKEFDTNFTYVQQSEFYLEPNIKYVFQVRCQETGKRYWQPWSSLFFHKTPETVPQVTSKAFQHDTWNSGLTVASISTGHLTSDNRGDIGLLLGMIVFAVMLSILSLIGIFNRSFRTGIKRRILLLIPKWLYEDIPNMKNSNVVKMLQENSELMNNNSSEQVLYVDPMITEIKEIFIPEHKPTDYKKENTGPLETRDYPQNSLFDNTTVVYIPDLNTGYKPQISNFLPEGSHLSNNNEITSLTLKPPVDSLDSGNNPRLQKHPNFAFSVSSVNSLSNTIFLGELSLILNQGECSSPDIQNSVEEETTMLLENDSPSETIPEQTLLPDEFVSCLGIVNEELPSINTYFPQNILESHFNRISLLEK

SEQ ID NO: 337161 - protein, 356 aa, Artificial Sequence
  derived and/or modified sequence
MNQVTIQWDAVIALYILFSWCHGGITNINCSGHIWVEPATIFKMGMNISIYCQAAIKNCQPRKLHFYKNGIKERFQITRINKTTARLWYKNFLEPHASMYCTAECPKHFQETLICGKDISSGYPPDIPDEVTCVIYEYSGNMTCTWNAGKLTYIDTKYVVHVKSLETEEEQQYLTSSYINISTDSLQGGKKYLVWVQAANALGMEESKQLQIHLDDIVIPSAAVISRAETINATVPKTIIYWDSQTTIEKVSCEMRYKATTNQTWNVKEFDTNFTYVQQSEFYLEPNIKYVFQVRCQETGKRYWQPWSSLFFHKTPETVPQVTSKAFQHDTWNSGLTVASISTGHLTSGLKEGSYC

SEQ ID NO: 337162 - protein, 374 aa, Artificial Sequence
  derived and/or modified sequence
MILRPYQPCGTVKEFDTNFTYVQQSEFYLEPNIKYVFQVRCQETGKRYWQPWSSLFFHKTPETVPQVTSKAFQHDTWNSGLTVASISTGHLTSDNRGDIGLLLGMIVFAVMLSILSLIGIFNRSFRTGIKRRILLLIPKWLYEDIPNMKNSNVVKMLQENSELMNNNSSEQVLYVDPMITEIKEIFIPEHKPTDYKKENTGPLETRDYPQNSLFDNTTVVYIPDLNTGYKPQISNFLPEGSHLSNNNEITSLTLKPPVDSLDSGNNPRLQKHPNFAFSVSSVNSLSNTIFLGELSLILNQGECSSPDIQNSVEEETTMLLENDSPSETIPEQTLLPDEFVSCLGIVNEELPSINTYFPQNILESHFNRISLLEK

SEQ ID NO: 337163 - protein, 391 aa, Artificial Sequence
  derived and/or modified sequence
  misc_feature (1)..(1): Xaa can be any naturally occurring amino acid
XHFLLPPLSKKSLLPPTMILRPYQPCGTVKEFDTNFTYVQQSEFYLEPNIKYVFQVRCQETGKRYWQPWSSLFFHKTPETVPQVTSKAFQHDTWNSGLTVASISTGHLTSDNRGDIGLLLGMIVFAVMLSILSLIGIFNRSFRTGIKRRILLLIPKWLYEDIPNMKNSNVVKMLQENSELMNNNSSEQVLYVDPMITEIKEIFIPEHKPTDYKKENTGPLETRDYPQNSLFDNTTVVYIPDLNTGYKPQISNFLPEGSHLSNNNEITSLTLKPPVDSLDSGNNPRLQKHPNFAFSVSSVNSLSNTIFLGELSLILNQGECSSPDIQNSVEEETTMLLENDSPSETIPEQTLLPDEFVSCLGIVNEELPSINTYFPQNILESHFNRISLLEK

SEQ ID NO: 337164 - protein, 275 aa, Artificial Sequence
  derived and/or modified sequence
MTCTWNAGKLTYIDTKYVVHVKSLETEEEQQYLTSSYINISTDSLQGGKKYLVWVQAANALGMEESKQLQIHLDDIVIPSAAVISRAETINATVPKTIIYWDSQTTIEKVSCEMRYKATTNQTWNVKEFDTNFTYVQQSEFYLEPNIKYVFQVRCQETGKRYWQPWSSLFFHKTPETDNRGDIGLLLGMIVFAVMLSILSLIGIFNRSFRTGIKRRILLLIPKWLYEDIPNMKNSNVVKMLQENSELMNNNSSEQVLYVDPMITEIKEIFIPEHK

SEQ ID NO: 337165 - protein, 146 aa, Artificial Sequence
  derived and/or modified sequence
MNISIYCQAAIKNCQPRKLHFYKNGIKERFQITRINKTTARLWYKNFLEPHASMYCTAECPKHFQETLICGKDISSGYPPDIPDEVTCVIYEYSGNMTCTWNAGKLTYIDTKYVVHVKRLKNLTPILHMCNSQNSTWSQTLSTYFK

SEQ ID NO: 337166 - protein, 142 aa, Artificial Sequence
  derived and/or modified sequence
MTCTWNAGKLTYIDTKYVVHVKSLETEEEQQYLTSSYINISTDSLQGGKKYLVWVQAANALGMEESKQLQIHLDDIVIPSAAVISRAETINATVPKTIIYWDSQTTIEKVSCEMRYKATTNQTWNFPRSHQKHSNMTHGILG

SEQ ID NO: 337167 - DNA, 1890 bp, Artificial Sequence
  derived and/or modified sequence
atgaaccaggtgaccatccagtgggacgccgtgatcgccctgtacatcctgttcagctggtgccacggcggcatcaccaacatcaactgcagcggccacatctgggtggagcccgccaccatcttcaagatgggcatgaacatcagcatctactgccaggccgccatcaagaactgccagcccagaaagctgcacttctacaagaacggcatcaaggagagattccagatcaccagaatcaacaagaccaccgccagactgtggtacaagaacttcctggagccccacgccagcatgtactgcaccgccgagtgccccaagcacttccaggagaccctgatctgcggcaaggacatcagcagcggctacccccccgacatccccgacgaggtgacctgcgtgatctacgagtacagcggcaacatgacctgcacctggaacgccggcaagctgacctacatcgacaccaagtacgtggtgcacgtgaagagcctggagaccgaggaggagcagcagtacctgaccagcagctacatcaacatcagcaccgacagcctgcagggcggcaagaagtacctggtgtgggtgcaggccgccaacgccctgggcatggaggagagcaagcagctgcagatccacctggacgacatcgtgatccccagcgccgccgtgatcagcagagccgagaccatcaacgccaccgtgcccaagaccatcatctactgggacagccagaccaccatcgagaaggtgagctgcgagatgagatacaaggccaccaccaaccagacctggaacgtgaaggagttcgacaccaacttcacctacgtgcagcagagcgagttctacctggagcccaacatcaagtacgtgttccaggtgagatgccaggagaccggcaagagatactggcagccctggagcagcctgttcttccacaagacccccgagaccgtgccccaggtgaccagcaaggccttccagcacgacacctggaacagcggcctgaccgtggccagcatcagcaccggccacctgaccagcgacaacagaggcgacatcggcctgctgctgggcatgatcgtgttcgccgtgatgctgagcatcctgagcctgatcggcatcttcaacagaagcttcagaaccggcatcaagagaagaatcctgctgctgatccccaagtggctgtacgaggacatccccaacatgaagaacagcaacgtggtgaagatgctgcaggagaacagcgagctgatgaacaacaacagcagcgagcaggtgctgtacgtggaccccatgatcaccgagatcaaggagatcttcatccccgagcacaagcccaccgactacaagaaggagaacaccggccccctggagaccagagactacccccagaacagcctgttcgacaacaccaccgtggtgtacatccccgacctgaacaccggctacaagccccagatcagcaacttcctgcccgagggcagccacctgagcaacaacaacgagatcaccagcctgaccctgaagccccccgtggacagcctggacagcggcaacaaccccagactgcagaagcaccccaacttcgccttcagcgtgagcagcgtgaacagcctgagcaacaccatcttcctgggcgagctgagcctgatcctgaaccagggcgagtgcagcagccccgacatccagaacagcgtggaggaggagaccaccatgctgctggagaacgacagccccagcgagaccatccccgagcagaccctgctgcccgacgagttcgtgagctgcctgggcatcgtgaacgaggagctgcccagcatcaacacctacttcccccagaacatcctggagagccacttcaacagaatcagcctgctggagaagtag

SEQ ID NO: 337168 - DNA, 1071 bp, Artificial Sequence
  derived and/or modified sequence
atgaaccaggtgaccatccagtgggacgccgtgatcgccctgtacatcctgttcagctggtgccacggcggcatcaccaacatcaactgcagcggccacatctgggtggagcccgccaccatcttcaagatgggcatgaacatcagcatctactgccaggccgccatcaagaactgccagcccagaaagctgcacttctacaagaacggcatcaaggagagattccagatcaccagaatcaacaagaccaccgccagactgtggtacaagaacttcctggagccccacgccagcatgtactgcaccgccgagtgccccaagcacttccaggagaccctgatctgcggcaaggacatcagcagcggctacccccccgacatccccgacgaggtgacctgcgtgatctacgagtacagcggcaacatgacctgcacctggaacgccggcaagctgacctacatcgacaccaagtacgtggtgcacgtgaagagcctggagaccgaggaggagcagcagtacctgaccagcagctacatcaacatcagcaccgacagcctgcagggcggcaagaagtacctggtgtgggtgcaggccgccaacgccctgggcatggaggagagcaagcagctgcagatccacctggacgacatcgtgatccccagcgccgccgtgatcagcagagccgagaccatcaacgccaccgtgcccaagaccatcatctactgggacagccagaccaccatcgagaaggtgagctgcgagatgagatacaaggccaccaccaaccagacctggaacgtgaaggagttcgacaccaacttcacctacgtgcagcagagcgagttctacctggagcccaacatcaagtacgtgttccaggtgagatgccaggagaccggcaagagatactggcagccctggagcagcctgttcttccacaagacccccgagaccgtgccccaggtgaccagcaaggccttccagcacgacacctggaacagcggcctgaccgtggccagcatcagcaccggccacctgaccagcggcctgaaggagggcagctactgctag

SEQ ID NO: 337169 - DNA, 828 bp, Artificial Sequence
  derived and/or modified sequence
atgacctgcacctggaacgccggcaagctgacctacatcgacaccaagtacgtggtgcacgtgaagagcctggagaccgaggaggagcagcagtacctgaccagcagctacatcaacatcagcaccgacagcctgcagggcggcaagaagtacctggtgtgggtgcaggccgccaacgccctgggcatggaggagagcaagcagctgcagatccacctggacgacatcgtgatccccagcgccgccgtgatcagcagagccgagaccatcaacgccaccgtgcccaagaccatcatctactgggacagccagaccaccatcgagaaggtgagctgcgagatgagatacaaggccaccaccaaccagacctggaacgtgaaggagttcgacaccaacttcacctacgtgcagcagagcgagttctacctggagcccaacatcaagtacgtgttccaggtgagatgccaggagaccggcaagagatactggcagccctggagcagcctgttcttccacaagacccccgagaccgacaacagaggcgacatcggcctgctgctgggcatgatcgtgttcgccgtgatgctgagcatcctgagcctgatcggcatcttcaacagaagcttcagaaccggcatcaagagaagaatcctgctgctgatccccaagtggctgtacgaggacatccccaacatgaagaacagcaacgtggtgaagatgctgcaggagaacagcgagctgatgaacaacaacagcagcgagcaggtgctgtacgtggaccccatgatcaccgagatcaaggagatcttcatccccgagcacaagtag

SEQ ID NO: 337170 - DNA, 441 bp, Artificial Sequence
  derived and/or modified sequence
atgaacatcagcatctactgccaggccgccatcaagaactgccagcccagaaagctgcacttctacaagaacggcatcaaggagagattccagatcaccagaatcaacaagaccaccgccagactgtggtacaagaacttcctggagccccacgccagcatgtactgcaccgccgagtgccccaagcacttccaggagaccctgatctgcggcaaggacatcagcagcggctacccccccgacatccccgacgaggtgacctgcgtgatctacgagtacagcggcaacatgacctgcacctggaacgccggcaagctgacctacatcgacaccaagtacgtggtgcacgtgaagagactgaagaacctgacccccatcctgcacatgtgcaacagccagaacagcacctggagccagaccctgagcacctacttcaagtag

SEQ ID NO: 337171 - DNA, 429 bp, Artificial Sequence
  derived and/or modified sequence
atgacctgcacctggaacgccggcaagctgacctacatcgacaccaagtacgtggtgcacgtgaagagcctggagaccgaggaggagcagcagtacctgaccagcagctacatcaacatcagcaccgacagcctgcagggcggcaagaagtacctggtgtgggtgcaggccgccaacgccctgggcatggaggagagcaagcagctgcagatccacctggacgacatcgtgatccccagcgccgccgtgatcagcagagccgagaccatcaacgccaccgtgcccaagaccatcatctactgggacagccagaccaccatcgagaaggtgagctgcgagatgagatacaaggccaccaccaaccagacctggaacttccccagaagccaccagaagcacagcaacatgacccacggcatcctgggctag

SEQ ID NO: 337172 - DNA, 669 bp, Artificial Sequence
  derived and/or modified sequence
atgaacatcagcatctactgccaggccgccatcaagaactgccagcccagaaagctgcacttctacaagaacggcatcaaggagagattccagatcaccagaatcaacaagaccaccgccagactgtggtacaagaacttcctggagccccacgccagcatgtactgcaccgccgagtgccccaagcacttccaggagaccctgatctgcggcaaggacatcagcagcggctacccccccgacatccccgacgaggtgacctgcgtgatctacgagtacagcggcaacatgacctgcacctggaacgccggcaagctgacctacatcgacaccaagtacgtggtgcacgtgaagagcctggagaccgaggaggagcagcagtacctgaccagcagctacatcaacatcagcaccgacagcctgcagggcggcaagaagtacctggtgtgggtgcaggccgccaacgccctgggcatggaggagagcaagcagctgcagatccacctggacgacatcgtgatccccagcgccgccgtgatcagcagagccgagaccatcaacgccaccgtgcccaagaccatcatctactgggacagccagaccaccatcgagaaggtgagctgcgagatgagatacaaggccaccaccaaccagacctggaacgactag

SEQ ID NO: 337173 - DNA, 1890 bp, Artificial Sequence
  derived and/or modified sequence
atgaatcaagtgactatacaatgggacgcggtcatcgccctctatattctattttcttggtgtcacgggggcattacgaacatcaactgttccggtcatatttgggtggagcccgctacaatcttcaaaatgggcatgaatatctccatttattgtcaagccgccatcaagaattgtcagccccgcaaactgcatttctacaagaacggcattaaagaacgtttccagattacacggattaacaagaccactgcgcgcctctggtataagaatttccttgagccccacgcctctatgtactgtacagccgaatgtcccaaacactttcaggagacactgatctgtggcaaagatatatcttctggctacccaccagacattcccgacgaagtgacatgcgtcatttatgagtatagcggaaacatgacctgcacttggaacgccgggaaactgacatatatcgatactaagtacgtagtgcacgtcaagagcctggaaacagaagaggaacagcaatatctgacttcatcatatatcaacatcagcacagactcactgcaggggggcaaaaaatacctggtgtgggtgcaggctgcaaacgctctcgggatggaggagtccaagcagttacaaattcaccttgacgacattgtgattccttccgctgcggtcatcagccgtgcagaaaccatcaatgccactgtcccaaagactattatatattgggactctcagactaccattgagaaggtgtcctgcgagatgagatataaggctactaccaaccagacttggaatgtaaaagaattcgacaccaattttacatatgtacagcaatcagagttttacctggagccgaatatcaaatatgtttttcaggtccggtgccaggagaccggcaagcggtactggcagccctggtcctctctgttctttcacaagacccccgaaacggtgccacaagtgacaagtaaggcctttcaacatgatacctggaactcgggactgacagtagctagcattagtacggggcacctgacctccgataacaggggcgacatcgggttactcctagggatgatagtgttcgctgtgatgctctcaattttatcactgatcgggatattcaaccggtcttttaggacgggcataaagcgaaggattctgctcctcatcccgaaatggctttacgaggatattcccaatatgaagaacagtaacgtcgtcaaaatgttgcaagagaactctgagctgatgaacaacaatagcagtgaacaagtgctgtacgtggacccaatgattaccgagattaaagagatattcattcctgagcataagcctacagattacaaaaaggaaaacactggtcccctggagacacgtgattatccacagaactcattattcgataacaccaccgtggtgtacattcctgacttgaatacgggttataaaccacagattagcaattttttgcccgaagggtcccatctgtcaaataacaatgaaataacctccctaacactgaagccccctgtggactccctggactctggaaacaatccaagactacagaaacaccctaatttcgcattttcagtttcttcagtcaactctctgtcaaacacaatatttctgggcgagctgtcgctgatcttaaaccagggtgaatgctctagccccgacattcagaatagcgtagaagaagagacaacgatgcttctcgagaacgacagccctagcgagacaattccggagcagacccttctgccagatgaattcgtatcgtgcctggggattgtgaatgaagagcttccctccattaacacatatttcccccaaaatatcttggagagccacttcaacagaatcagtctcctcgaaaagtag

SEQ ID NO: 337174 - DNA, 1071 bp, Artificial Sequence
  derived and/or modified sequence
atgaatcaagtaaccatacagtgggacgcagtcattgcgttgtacattcttttcagttggtgccacgggggtatcaccaatatcaattgttccggccatatatgggtggagcctgcaaccatctttaaaatggggatgaacatatctatctactgccaagcagccattaagaactgtcaacctcgcaagcttcatttctacaagaacggaatcaaagagagattccagataactagaattaacaaaaccaccgcccggctttggtacaagaactttctagaaccccatgcttctatgtactgtaccgccgagtgccctaaacatttccaggaaacactgatttgtggaaaggatatttcaagtggctacccccccgacatccctgatgaagtgacttgcgtgatctacgagtattccggaaatatgacttgtacctggaacgctgggaagctaacatacatcgatacaaaatacgtcgttcacgttaaaagtctggaaacagaggaggagcaacagtacttgacttccagctacattaacatttcaactgacagcctgcaaggcggcaagaagtatttggtgtgggtccaggctgccaacgctctcggaatggaggaatctaagcagcttcaaattcatctggacgacatcgtgataccgagcgcagcagtgatttcgcgagctgaaaccataaacgccaccgtgcccaaaaccattatttactgggatagtcagaccacgattgaaaaggtgtcatgtgaaatgagatacaaggccactacaaatcagacctggaatgtgaaagagtttgacacgaattttacttacgtgcagcagagtgagttttacttagaaccgaacataaagtacgttttccaggtgcgctgccaagaaacgggcaagcggtactggcagccttggagctcactcttcttccacaaaacgcccgagaccgtcccacaggttacatccaaggccttccagcatgatacttggaactccggcctgaccgtcgcctcaatcagcacggggcatcttactagcggactgaaggaaggttcatactgctag

SEQ ID NO: 337175 - DNA, 828 bp, Artificial Sequence
  derived and/or modified sequence
atgacctgcacatggaatgccggcaaactcacgtacatcgatacaaagtacgtcgtccatgtgaaatcactggaaactgaggaagagcagcaatacctgactagctcctacataaacatcagtacggattccctgcagggcggaaagaagtatctggtctgggtccaggcagctaatgcactgggtatggaggagtcaaaacaactgcagattcacctggatgatattgttatccctagcgccgccgtaatttcccgggctgagacaatcaatgctaccgtcccgaaaacgatcatctactgggactcacagaccacaattgagaaagttagctgtgaaatgcgctacaaggcaacaaccaaccagacttggaatgtaaaggagtttgatactaatttcacctacgtccagcagagtgagttttatctggagcccaatatcaaatatgttttccaggttagatgccaggagaccggaaaaagatactggcagccttggtcctccttgttctttcataagaccccggagactgataataggggcgacatcgggttactgctggggatgattgttttcgcagtcatgctgagtattctatcacttattggtattttcaacaggagttttcgtaccggcattaagcggaggatcttgctcttaatcccaaaatggttgtacgaggatataccaaatatgaaaaatagcaacgtggtgaaaatgttacaggagaactctgaactgatgaacaataactcttcagagcaggtgctgtatgttgatccaatgattactgaaattaaggagatctttattcccgaacataaatag

SEQ ID NO: 337176 - DNA, 441 bp, Artificial Sequence
  derived and/or modified sequence
atgaatattagcatatattgtcaggccgccattaaaaattgtcagcctagaaagcttcacttttacaaaaacggcatcaaagagcgctttcagattactcgaatcaataagactaccgcccggctctggtacaagaattttctggagccacatgctagcatgtattgcactgccgagtgccccaagcatttccaagagacactgatctgtggcaaggatatatcatccggatatccaccagatatccccgacgaagtgacttgtgttatatacgagtacagcggcaacatgacctgtacatggaatgcagggaagctcacttatatagataccaaatacgtagttcacgtaaaaaggctgaagaatcttaccccaatcctacacatgtgtaacagtcagaattcaacctggtcgcaaaccctcagcacctactttaagtag

SEQ ID NO: 337177 - DNA, 429 bp, Artificial Sequence
  derived and/or modified sequence
atgacgtgcacatggaacgctggtaaattaacttacatcgacacaaaatacgtcgtgcatgtcaagtcattggagaccgaagaggaacagcagtacttgacatcttcttacatcaacatcagcacagacagtctgcaaggcggtaaaaagtacctagtttgggttcaagctgctaatgctctgggtatggaggagagtaaacagctgcagatccacttggatgacatcgtgataccatccgctgcggtcatatctcgcgccgagacaatcaatgctaccgtgcctaagactatcatttactgggattcccaaaccaccattgaaaaagtttcatgcgagatgaggtacaaggctactactaatcaaacctggaacttccccaggagtcaccaaaaacatagcaacatgacacacggaattctgggttag

SEQ ID NO: 337178 - DNA, 669 bp, Artificial Sequence
  derived and/or modified sequence
atgaatatcagcatttattgccaggccgccatcaaaaactgccaaccccgaaagttacacttctacaagaacggtattaaggagcgatttcagatcacgcgaattaataagaccacggcccgcttgtggtacaaaaacttcttagaacctcacgcatcaatgtattgcacggccgaatgccctaagcacttccaggagacactgatctgcgggaaggacattagcagcggttacccacccgacatcccagacgaggtcacttgtgtaatttacgaatactccggcaacatgacttgtacatggaacgccgggaaactgacatacattgacaccaagtatgtggtacatgtgaagagcctcgaaaccgaagaggagcagcaataccttacatcatcgtatataaacatatcaacggatagcctgcagggagggaaaaagtatctggtgtgggtccaggcggcaaacgctctaggcatggaagagagtaaacagcttcagattcacctcgacgacatcgtcattccttcagccgccgtgatcagccgggcggagacgattaacgcaaccgtgcccaagacaattatctactgggatagccaaaccacaatagaaaaggtgtcatgtgagatgcgctacaaggcaacgacaaatcaaacctggaatgactag

SEQ ID NO: 337179 - DNA, 1890 bp, Artificial Sequence
  derived and/or modified sequence
atgaaccaggtgaccatccagtgggatgctgtgattgccctgtacatcctcttctcctggtgccacggcggcatcaccaacatcaactgcagcggccacatctgggtggagcccgccaccatcttcaagatgggcatgaacatcagcatctactgccaggccgccatcaagaactgccagcccaggaagctgcacttctacaagaatggcatcaaggagcgcttccagatcacccgcatcaacaagaccacagcccggctgtggtacaagaacttcctggagccccacgcctccatgtactgcacagctgagtgccccaagcacttccaggagaccctcatctgtgggaaggacatcagcagcggctaccccccagacatcccagatgaggtgacctgtgtgatctatgagtacagcggcaacatgacctgcacctggaatgctgggaagctgacctacatcgacaccaagtatgtggtgcacgtgaagagcctggagacagaggaggagcagcagtacctgaccagcagctacatcaacatcagcacagacagcctgcagggcggcaagaagtacctggtgtgggtgcaggccgccaatgccctgggcatggaggagagcaagcagctgcagatccacctggatgacatcgtcatccccagcgctgctgtgatcagcagagctgagaccatcaatgccaccgtgcccaagaccatcatctactgggacagccagaccaccatcgagaaggtgtcctgtgagatgagatacaaggccaccaccaaccagacctggaatgtgaaggagtttgacaccaacttcacctacgtgcagcagagcgagttctacctggagcccaacatcaagtatgtgttccaggtgcgctgccaggagaccgggaagcgctactggcagccctggagcagcctcttcttccacaagaccccagagaccgtgccccaggtgaccagcaaggccttccagcacgacacctggaacagcggcctgactgtggccagcatcagcacaggccacctgaccagtgacaacagaggagacatcggcctgctgctgggcatgattgtgtttgctgtgatgctgagcatcctgagcctgattggcatcttcaacagaagcttcagaacaggcatcaagaggcgcatcctgctgctgatccccaagtggctgtatgaggacatccccaacatgaagaacagcaatgtggtgaagatgctgcaggagaacagcgagctgatgaacaacaacagcagcgagcaggtgctgtatgtggaccccatgatcacagagatcaaggagatcttcatccctgagcacaagcccacagactacaagaaggaaaatacaggccccctggagacccgggactacccccagaacagcctgtttgacaacaccaccgtggtgtacatcccagacctgaacacaggctacaagccccagatcagcaacttcctgcctgagggcagccacctgagcaacaacaatgagatcaccagcctgaccctgaagccccctgtggacagcctggacagcggcaacaacccccggctgcagaagcaccccaactttgccttctctgtgtcctctgtgaacagcctgagcaacaccatcttcctgggggagctgagcctcatcctgaaccagggagaatgtagcagcccagacatccagaacagcgtggaggaggagaccaccatgctgctggagaatgacagccccagcgagaccatccctgagcagaccctgctgcctgatgaatttgtgtcctgcctgggcatcgtgaatgaggagctgcccagcatcaacacctacttcccccagaacatcctggagagccacttcaaccgcatcagcctgctggagaagtag

SEQ ID NO: 337180 - DNA, 1071 bp, Artificial Sequence
  derived and/or modified sequence
atgaaccaggtgaccatccagtgggatgctgtgattgccctgtacatcctcttctcctggtgccacggcggcatcaccaacatcaactgcagcggccacatctgggtggagcccgccaccatcttcaagatgggcatgaacatcagcatctactgccaggccgccatcaagaactgccagcccaggaagctgcacttctacaagaatggcatcaaggagcgcttccagatcacccgcatcaacaagaccacagcccggctgtggtacaagaacttcctggagccccacgcctccatgtactgcacagctgagtgccccaagcacttccaggagaccctcatctgtgggaaggacatcagcagcggctaccccccagacatcccagatgaggtgacctgtgtgatctatgagtacagcggcaacatgacctgcacctggaatgctgggaagctgacctacatcgacaccaagtatgtggtgcacgtgaagagcctggagacagaggaggagcagcagtacctgaccagcagctacatcaacatcagcacagacagcctgcagggcggcaagaagtacctggtgtgggtgcaggccgccaatgccctgggcatggaggagagcaagcagctgcagatccacctggatgacatcgtcatccccagcgctgctgtgatcagcagagctgagaccatcaatgccaccgtgcccaagaccatcatctactgggacagccagaccaccatcgagaaggtgtcctgtgagatgagatacaaggccaccaccaaccagacctggaatgtgaaggagtttgacaccaacttcacctacgtgcagcagagcgagttctacctggagcccaacatcaagtatgtgttccaggtgcgctgccaggagaccgggaagcgctactggcagccctggagcagcctcttcttccacaagaccccagagaccgtgccccaggtgaccagcaaggccttccagcacgacacctggaacagcggcctgactgtggccagcatcagcacaggccacctgaccagcggcctgaaggagggcagctactgctag

SEQ ID NO: 337181 - DNA, 828 bp, Artificial Sequence
  derived and/or modified sequence
atgacctgcacctggaatgccggcaagctgacctacatcgacaccaagtatgtggtgcacgtgaagagcctggagacagaggaggagcagcagtacctgaccagcagctacatcaacatcagcacagacagcctgcagggcggcaagaagtacctggtgtgggtgcaggccgccaatgccctgggcatggaggagagcaagcagctgcagatccacctggatgacatcgtcatccccagcgctgctgtgatcagcagagctgagaccatcaatgccaccgtgcccaagaccatcatctactgggacagccagaccaccatcgagaaggtgtcctgtgagatgagatacaaggccaccaccaaccagacctggaatgtgaaggagtttgacaccaacttcacctacgtgcagcagagcgagttctacctggagcccaacatcaagtatgtgttccaggtgcgctgccaggagaccgggaagcgctactggcagccctggagcagcctcttcttccacaagaccccagagacagacaacagaggagacatcggcctgctgctgggcatgattgtgtttgctgtgatgctgagcatcctgagcctcatcggcatcttcaacagaagcttcagaacaggcatcaagaggcgcatcctgctgctgatccccaagtggctgtatgaggacatccccaacatgaagaacagcaatgtggtgaagatgctgcaggagaacagcgagctgatgaacaacaacagcagcgagcaggtgctgtatgtggaccccatgatcacagagatcaaggagatcttcatccctgagcacaagtag

SEQ ID NO: 337182 - DNA, 441 bp, Artificial Sequence
  derived and/or modified sequence
atgaacatcagcatctactgccaggccgccatcaagaactgccagcccaggaagctgcacttctacaagaatggcatcaaggagcgcttccagatcacccgcatcaacaagaccacagcccggctgtggtacaagaacttcctggagccccacgcctccatgtactgcacagcagaatgtcccaagcacttccaggagaccctcatctgtgggaaggacatcagcagcggctaccccccagacatcccagatgaggtgacctgtgtgatctatgagtacagcggcaacatgacctgcacctggaatgccggcaagctgacctacatcgacaccaagtatgtggtgcacgtgaagaggctgaagaacctgacccccatcctgcacatgtgcaacagccagaacagcacctggagccagaccctgagcacctacttcaagtag

SEQ ID NO: 337183 - DNA, 429 bp, Artificial Sequence
  derived and/or modified sequence
atgacctgcacctggaatgccggcaagctgacctacatcgacaccaagtatgtggtgcacgtgaagagcctggagacagaggaggagcagcagtacctgaccagcagctacatcaacatcagcacagacagcctgcagggcggcaagaagtacctggtgtgggtgcaggccgccaatgccctgggcatggaggagagcaagcagctgcagatccacctggatgacatcgtcatccccagcgctgctgtgatcagcagagctgagaccatcaatgccaccgtgcccaagaccatcatctactgggacagccagaccaccatcgagaaggtgtcctgtgagatgagatacaaggccaccaccaaccagacctggaacttccccaggagccaccagaagcacagcaacatgacccacggcatcctgggctag

SEQ ID NO: 337184 - DNA, 669 bp, Artificial Sequence
  derived and/or modified sequence
atgaacatcagcatctactgccaggccgccatcaagaactgccagcccaggaagctgcacttctacaagaatggcatcaaggagcgcttccagatcacccgcatcaacaagaccacagcccggctgtggtacaagaacttcctggagccccacgcctccatgtactgcacagcagaatgtcccaagcacttccaggagaccctcatctgtgggaaggacatcagcagcggctaccccccagacatcccagatgaggtgacctgtgtgatctatgagtacagcggcaacatgacctgcacctggaatgccggcaagctgacctacatcgacaccaagtatgtggtgcacgtgaagagcctggagacagaggaggagcagcagtacctgaccagcagctacatcaacatcagcacagacagcctgcagggcggcaagaagtacctggtgtgggtgcaggccgccaatgccctgggcatggaggagagcaagcagctgcagatccacctggatgacatcgtcatccccagcgctgctgtgatcagcagagctgagaccatcaatgccaccgtgcccaagaccatcatctactgggacagccagaccaccatcgagaaggtgtcctgtgagatgagatacaaggccaccaccaaccagacctggaatgactag

SEQ ID NO: 337185 - DNA, 1890 bp, Artificial Sequence
  derived and/or modified sequence
atgaaccaggtgaccatccagtgggacgccgtgatcgccctgtacatcctattcagctggtgccacgggggtataactaatataaattgcagtggccatatttgggtggaacccgccactattttcaaaatggggatgaatatcagcatttattgtcaagccgctataaagaactgccagcctagaaaactccatttctacaagaacggaataaaggagagattccaaatcacaagaatcaataagacgacagctagactgtggtacaagaatttcctggagccccacgcctcaatgtactgtacggcggaatgtcccaagcactttcaggagacgctgatctgcgggaaggatatatcttctggttatccacccgacatcccagatgaggtcacgtgcgtgatttatgaatattcgggtaatatgacatgtacttggaatgcaggcaaactcacctacatcgataccaagtacgtggttcacgttaagagcttggaaaccgaggaagagcagcagtatctgacctcctcatatatcaacatcagtactgatagcttgcaaggcggaaaaaaatatcttgtatgggttcaggccgcaaacgcgcttggaatggaggagtcaaaacagctgcagattcatctggatgacatcgttatccctagcgctgcggtaataagccgtgcggaaacaattaatgcaacagtgccaaagacaataatttactgggactcccaaacaacgatcgagaaggtttcttgcgagatgagatataaagccaccacaaatcagacctggaatgtcaaagagttcgatactaatttcacttacgtgcagcagtctgaattctatcttgaacccaatattaagtacgtcttccaggtgaggtgtcaagaaacaggcaagagatattggcagccatggagcagtctcttcttccacaagactcccgagaccgttcctcaggttacaagtaaagcctttcagcatgatacgtggaacagcggactcaccgtggcctctatctctacaggtcacttgacctcagataacagaggcgatattgggctccttctgggaatgatagtttttgccgtgatgttatcaatcctgagtctcattggcatttttaatcgcagcttcaggactgggatcaagaggcgcattttgctcctaatcccaaagtggctgtatgaggacatccctaacatgaaaaattctaacgttgtgaagatgttacaggagaactcagagctcatgaataataacagtagcgagcaagtattgtatgtcgatcccatgatcaccgagatcaaagaaattttcatcccggagcacaagcccaccgattacaagaaagaaaacaccggcccactagagacgagggactatccacagaattcactcttcgataacacaacagttgtttacatccccgacctgaacactggctacaaacctcaaatctcaaatttcctgcccgaggggtcacacttatccaataataatgaaattacatctctcaccctgaaacctcctgtggattctctggattcaggcaataacccgcggctccagaaacaccccaactttgcctttagcgtttcctcagtcaacagtctgtctaacacgatattccttggtgagttgtcattgatcctgaaccagggagaatgcagctcccccgatattcagaacagcgtagaagaggagaccaccatgcttctggaaaacgattcacccagcgagacgattcccgaacagaccctcctccctgatgagtttgtgtcctgtctgggaatagtcaacgaggagctgccaagcatcaacacttattttccacagaacatcctcgagagccacttcaacaggatcagcctattagaaaagtag

SEQ ID NO: 337186 - DNA, 1071 bp, Artificial Sequence
  derived and/or modified sequence
atgaaccaggtgaccatccagtgggacgccgtgatcgccctgtacattctattctcatggtgccacgggggaataactaacatcaattgctctggacatatctgggtggaaccagctacaattttcaagatggggatgaatatcagcatctactgccaggccgcaataaagaactgtcagccccggaagctgcacttctataagaacgggatcaaagaaaggttccagattacacgcatcaacaaaaccacggcaagattgtggtacaagaattttctggaaccccacgcttcaatgtactgcaccgccgagtgtccaaaacattttcaggaaaccctcatttgcggaaaagacatctcttcagggtatccgcctgacattccggacgaagtcacttgcgtgatttatgaatattccggcaacatgacatgtacctggaatgctggcaagctgacctacatcgatactaagtatgtggtgcatgtcaagtctctggagaccgaggaagagcagcaatacctgacctcttcatacattaatatcagtactgatagtttacagggcggcaagaagtacttggtgtgggtccaagctgcaaacgcactgggaatggaagagagcaagcagcttcaaatccatctagatgacatcgtgatccctagcgccgccgtcatctccagggcggagaccattaacgctactgtccctaagaccattatttattgggattcacaaacgaccatcgaaaaggtgtcgtgtgagatgagatacaaagctaccaccaatcagacatggaatgtcaaggaatttgatactaattttacctacgttcagcagtctgaattctatcttgagcctaacattaagtatgtcttccaagtccgctgccaggagaccggtaagagatactggcagccctggtcatctctgtttttccataagacccccgagactgtgcctcaggtcaccagtaaagcattccagcatgacacctggaattcgggtctaaccgttgcttccatttctactggacacctcaccagtggactcaaggagggatcatactgttag

SEQ ID NO: 337187 - DNA, 828 bp, Artificial Sequence
  derived and/or modified sequence
atgacctgcacctggaacgccggcaagctgacctacatcgacaccaaatatgttgtgcacgttaagtctctcgaaacagaggaggaacaacagtaccttacctctagctacatcaatatctctactgacagcctccagggcggaaagaagtacctggtttgggtccaggcagctaacgccttgggcatggaagagtcaaaacagctgcaaatacacttagacgatattgtcatccccagcgcagcggtgatctcaagagccgaaacgatcaacgccaccgtgcctaaaaccataatctactgggattctcagactacaatagaaaaagtatcatgtgagatgcgatataaggccaccaccaaccagacatggaacgtaaaagagtttgataccaactttacttacgtacagcagtccgaattctatctcgaacccaatatcaaatatgtctttcaggtgcgatgtcaagagacgggaaagcggtattggcagccgtggtcgtccctgttttttcacaagacacctgaaaccgacaaccggggagatattggcctgctcctgggtatgatcgttttcgcggtcatgttatccatcctgtccctcatcggcatctttaatagaagcttcagaacgggtataaaacggcgcatattgctgctgattcctaagtggttgtacgaagacattccaaacatgaagaactcaaatgttgttaaaatgttacaggaaaactccgagctgatgaataacaactcttctgaacaggtgctttatgtggaccctatgatcaccgaaattaaagaaattttcatacctgagcataagtag

SEQ ID NO: 337188 - DNA, 441 bp, Artificial Sequence
  derived and/or modified sequence
atgaacatcagcatctactgccaggccgccatcaagaactgccagccaaggaagctgcatttttacaaaaacggaataaaggaacgattccagattacaaggatcaacaaaaccactgcccgcttgtggtacaagaatttcctggagccacatgccagcatgtactgcactgctgagtgccctaagcacttccaggaaactctgatctgcggaaaggacatttcctctggctatccccctgatattcctgatgaagtcacatgcgtaatatatgagtacagcgggaacatgacctgtacatggaatgcaggtaagctgacatacattgacactaaatacgtcgtacacgtgaagcgtctgaagaatctcacaccaatcctgcacatgtgtaattctcaaaacagcacctggagtcagacgctgtcaacctacttcaaatag

SEQ ID NO: 337189 - DNA, 429 bp, Artificial Sequence
  derived and/or modified sequence
atgacctgcacctggaacgccggcaagctgacctacatcgacaccaagtatgtggtgcacgtgaaaagccttgaaacagaagaggaacagcagtacctgacctcctcttacatcaacatctccacggacagcctccagggcggaaaaaaatacctcgtgtgggtgcaggccgctaatgccttggggatggaagagtcaaagcagctgcagatccacctggacgatattgtgattccgtccgccgcagtcatcagcagagcagagactatcaatgcgacagtgcccaagacaattatttactgggatagccagactaccattgaaaaagtgagctgcgagatgcgctacaaagccacaacgaaccagacctggaactttccccgttctcatcagaaacactccaacatgactcacggtattctggggtag

SEQ ID NO: 337190 - DNA, 669 bp, Artificial Sequence
  derived and/or modified sequence
atgaacatcagcatctactgccaggccgccatcaagaactgccagcctaggaaactgcatttctataagaatgggataaaagagcggtttcagatcacccggataaataagacaaccgcccggctctggtataaaaattttctggagcctcacgcgtctatgtactgtaccgccgaatgccccaagcactttcaggaaactttaatttgtgggaaggatatctcatcaggctacccccccgatattcccgacgaggttacatgcgttatttacgagtactccggaaatatgacctgcacatggaacgccgggaagctgacctacatagacacaaaatatgttgtccacgtaaagagcctggaaacagaagaggagcagcagtacctcacctcgagttacatcaacattagtacagactccctgcaggggggaaagaaatacctagtgtgggttcaagcagcaaatgctcttggtatggaggagtcaaagcagttacagatccacctggatgacatcgtaattccatcggcagccgtgatctcacgcgcggagacaatcaatgccaccgtgcccaaaaccatcatatattgggattctcaaacaaccatcgaaaaggtttcatgcgagatgcggtacaaggcaactactaatcagacctggaacgattag

SEQ ID NO: 337191 - DNA, 1890 bp, Artificial Sequence
  derived and/or modified sequence
atgaatcaagtgaccattcaatgggacgccgttatcgccctttacattctattcagctggtgtcacggcggaatcacaaatattaactgtagtggccacatttgggtggaacctgctactatctttaaaatgggtatgaacatctcaatttattgccaagcggcaatcaagaattgccagcctcgaaaattacacttttacaagaacggaatcaaggagagattccagattacaagaatcaacaagaccacggctcgcttatggtataagaattttctggagccacacgcaagcatgtactgtacagccgaatgtcccaaacactttcaggaaacactcatatgtggtaaggacatctcgagcgggtaccccccagatatcccagatgaagtgacctgcgtaatctatgaatactccgggaacatgacttgcacctggaatgctggcaagctaacatacatcgacactaagtacgtggtgcacgtaaagtctctggaaaccgaggaagaacagcaatatctgacatccagctatattaacatatctaccgacagcctgcagggtgggaagaagtacctcgtgtgggtgcaggccgctaacgcccttggtatggaggagtctaagcagctgcagattcacttggacgatattgttattccttctgccgctgtgatatcgagggcagagaccatcaacgccactgtccccaagacgatcatctactgggacagccaaactaccatcgagaaggtcagctgtgaaatgcgttacaaggccacgaccaatcagacatggaacgtgaaagagtttgatacgaatttcacatatgtgcagcagtctgagttttatctggaaccaaatatcaaatacgtgtttcaggtgcggtgccaggagaccggcaaacggtactggcagccttggtccagcctgttctttcacaaaacgccagaaaccgtgccccaggtgacaagcaaggcctttcaacatgacacctggaattctggactcactgtggcttctatctccacaggccatctaacttcagacaacaggggggatattggactgctgttgggtatgattgttttcgctgtcatgctgagcatcctatccctgattggaattttcaacaggagcttccgaaccggaatcaaaaggcggattctgctccttattcctaagtggctgtatgaagatatcccaaacatgaaaaacagtaacgtggttaaaatgctgcaggaaaactccgagcttatgaacaacaacagctccgaacaagtcctttacgtcgaccccatgatcaccgagatcaaggaaatttttatccctgagcacaaacccactgactataagaaagaaaacaccggtcctctggagacccgcgactatccccagaactcactgtttgataacacaactgtggtgtacatcccagacctaaacaccggctataagccacagatttcaaactttttacctgagggatcacatctgtcaaacaacaatgagattacatcactgaccctgaaaccgccagttgacagtttggatagcggcaacaacccccgactgcagaagcatcccaatttcgccttctccgtttcttccgtaaactcactgtccaacaccattttcctgggcgaattgagtttaatcctgaaccagggtgaatgcagctctcccgatatacagaattcagtagaggaggagacaaccatgctgctcgagaacgattcaccctcggagacaattcctgagcagaccctgctgcccgatgaattcgtgtcctgtctcgggattgttaacgaagagctcccatctatcaatacttattttccccaaaacatccttgagtcccatttcaaccgaatttcactgctcgaaaagtag

SEQ ID NO: 337192 - DNA, 1071 bp, Artificial Sequence
  derived and/or modified sequence
atgaatcaggtaactattcagtgggatgccgtcatcgccctctacatcctgttctcatggtgccacggaggaatcaccaatatcaattgcagcggccatatctgggttgaacccgcaactattttcaaaatggggatgaatatttctatttattgccaggccgctattaaaaactgccagcctagaaagctccatttttataaaaatggaattaaggagaggttccagatcactcggatcaataagaccacagccaggctctggtacaagaactttctggaaccacatgcctccatgtattgtacagccgagtgcccaaaacactttcaagaaaccctgatctgcggtaaggacatctccagtggttatccgccagatatacccgacgaggtgacatgcgtgatttacgagtatagcggcaacatgacgtgcacctggaacgcagggaagctaacctatatcgacactaagtacgtggtgcacgttaaaagcctggagaccgaggaggagcaacagtacctgacctcctcctatatcaacattagtacggacagcctgcaggggggtaagaaatatctggtgtgggtgcaggctgcgaacgcacttggcatggaggagtccaagcagctgcagattcacctggatgatatagtgataccatcagctgcggttataagtcgtgcagaaaccatcaacgcgactgtcccgaagacaattatttattgggacagccagaccacgatcgaaaaggtgagctgtgagatgcgctataaggccaccactaaccagacttggaacgtgaaagaatttgacacaaacttcacgtacgttcagcagagtgaattttaccttgagcctaatatcaaatacgtgtttcaggtacgatgtcaggagacgggtaagagatactggcaaccctggtcttctctctttttccataagaccccggaaaccgttccacaggtgacctcaaaggcgttccagcacgatacatggaacagcggcttgaccgttgcgtcgatatcaacggggcatctcaccagtgggctcaaagaggggtcatattgttag

SEQ ID NO: 337193 - DNA, 828 bp, Artificial Sequence
  derived and/or modified sequence
atgacctgcacatggaatgccggaaaattgacttatattgacacaaagtacgtagtgcacgtaaaatccctcgagaccgaggaagaacaacaatacctgacctccagctatatcaatatcagtacggacagtttgcagggcggaaagaagtacctagtatgggtccaggcagctaacgcactggggatggaggagtctaagcagcttcaaatccacttagatgacattgtcataccttccgccgctgttatcagcagggcggagactatcaatgccactgtgcccaagacaattatctactgggactcccagacaacgattgagaaggtgagttgcgaaatgcggtacaaggccacaacaaaccagacctggaacgtgaaggaatttgacaccaatttcacttatgtacagcagtctgaattctacctagaacctaacattaaatatgtgttccaggtgcggtgtcaagagacggggaagagatactggcaaccctggtcttccctattcttccataaaactcccgaaacagataatcgcggagatatcggcctgttgctggggatgatagtgttcgctgttatgctgtcaattctaagtttgatcggcatatttaaccgcagcttcaggacaggcatcaagcgacgaattctcttgctgattccaaaatggctctacgaagatatccctaatatgaagaactcgaatgtggtgaagatgctccaggaaaattccgagctgatgaataataatagctccgaacaggttctgtacgtcgatcctatgatcactgagatcaaagagatctttattcccgaacataagtag

SEQ ID NO: 337194 - DNA, 441 bp, Artificial Sequence
  derived and/or modified sequence
atgaatatttctatatactgccaagctgcaattaaaaactgccagcccaggaagctgcacttctacaagaacggcattaaagagcggttccaaattacccgcataaacaaaacaacggcgcgtctgtggtataagaacttcttggagccacacgcatcgatgtattgtaccgctgagtgccctaagcacttccaggaaaccttgatttgtgggaaggatatctcgagcggttaccctccagatattcccgacgaggtaacatgtgtcatatacgaatatagcggaaacatgacctgtacctggaacgccggtaagctaacatatatagataccaaatacgtggttcatgtcaagagactgaagaatctaacaccaattctgcatatgtgtaattcgcagaactctacatggagtcaaacattaagtacatattttaagtag

SEQ ID NO: 337195 - DNA, 429 bp, Artificial Sequence
  derived and/or modified sequence
atgacttgcacttggaacgctgggaaactgacctatattgacaccaagtatgttgtccacgtgaagagccttgagaccgaagaggagcagcagtatctgacgtccagctatatcaacatatccaccgattcactgcaaggcggaaaaaaatacctggtctgggtacaggcagcgaatgctctgggtatggaagagtccaaacaactgcagatccacctggacgacattgtgatcccctcagctgcagtgatatctagggctgagacgatcaacgccacagtcccaaaaaccattatctactgggatagtcagaccaccatcgagaaggtctcttgcgaaatgcggtataaggcaacgacaaaccaaacttggaactttcccagatcacaccaaaaacacagtaacatgacacatggtattctgggctag

SEQ ID NO: 337196 - DNA, 669 bp, Artificial Sequence
  derived and/or modified sequence
atgaatatatctatttactgccaggctgcgatcaagaactgccagcccaggaagctgcatttctacaaaaatggcatcaaagaacgctttcagataacccgtataaataagaccaccgctcgcctttggtacaaaaacttcctggaacctcatgcctctatgtactgcaccgccgaatgcccaaaacatttccaagaaacacttatttgtggcaaggacatttccagcggctacccccctgacatcccagacgaggttacttgcgtgatatatgagtatagcgggaatatgacttgcacatggaacgcagggaaattgacatatattgataccaaatatgtcgtacacgtcaaaagtcttgaaaccgaagaagagcagcagtacctcacatcaagctatattaacatcagtacagattccctccagggcggaaagaaatatctagtgtgggttcaggccgctaacgctttgggtatggaagagagcaagcaattacagatacacctcgatgacatcgtgatcccttcagccgcagtcatctccagggccgaaacgataaacgcaaccgtacctaagaccatcatttattgggactcacagacaacgatcgaaaaggtgtcttgcgagatgcgatataaggctaccaccaatcagacttggaacgattag

SEQ ID NO: 337197 - protein, 166 aa, Artificial Sequence
  derived and/or modified sequence
MSAVVAQTLHVFGLRSHVANNIFYFDEQIIIFPSGNHCVKYNVDQKWQKFIPGSEKSQGMLALSISPNRRYLAISETVQEKPAITIYELSSIPCRKRKVLNNFDFQVQKFISMAFSPDSKYLLAQTSPPESNLVYWLWEKQKVMAIVRIDTQNNPVYQVSFSPQDN

SEQ ID NO: 337198 - protein, 591 aa, Artificial Sequence
  derived and/or modified sequence
MKYILVTGGVISGIGKGIIASSVGTILKSCGLHVTSIKIDPYINIDAGTFSPYEHGEVFVLDDGGEVDLDLGNYERFLDIRLTKDNNLTTGKIYQYVINKERKGDYLGKTVQVVPHITDAIQEWVMRQALIPVDEDGLEPQVCVIELGGTVGDIESMPFIEAFRQFQFKVKRENFCNIHVSLVPQPSSTGEQKTKPTQNSVRELRGLGLSPDLVVCRCSNPLDTSVKEKISMFCHVEPEQVICVHDVSSIYRVPLLLEEQGVVDYFLRRLDLPIERQPRKMLMKWKEMADRYDRLLETCSIALVGKYTKFSDSYASVIKALEHSALAINHKLEIKYIDSADLEPITSQEEPVRYHEAWQKLCSAHGVLVPGGFGVRGTEGKIQAIAWARNQKKPFLGVCLGMQLAVVEFSRNVLGWQDANSTEFDPTTSHPVVVDMPEHNPGQMGGTMRLGKRRTLFQTKNSVMRKLYGDADYLEERHRHRFEVNPVWKKCLEEQGLKFVGQDVEGERMEIVELEDHPFFVGVQYHPEFLSRPIKPSPPYFGLLLASVGRLSHYLQKGCRLSPRDTYSDRSGSSSPDSEITELKFPSINHD

SEQ ID NO: 337199 - protein, 360 aa, Artificial Sequence
  derived and/or modified sequence
MFCHVEPEQVICVHDVSSIYRVPLLLEEQGVVDYFLRRLDLPIERQPRKMLMKWKEMADRYDRLLETCSIALVGKYTKFSDSYASVIKALEHSALAINHKLEIKYIDSADLEPITSQEEPVRYHEAWQKLCSAHGVLVPGGFGVRGTEGKIQAIAWARNQKKPFLGVCLGMQLAVVEFSRNVLGWQDANSTEFDPTTSHPVVVDMPEHNPGQMGGTMRLGKRRTLFQTKNSVMRKLYGDADYLEERHRHRFEVNPVWKKCLEEQGLKFVGQDVEGERMEIVELEDHPFFVGVQYHPEFLSRPIKPSPPYFGLLLASVGRLSHYLQKGCRLSPRDTYSDRSGSSSPDSEITELKFPSINHD

SEQ ID NO: 337200 - DNA, 2037 bp, Artificial Sequence
  derived and/or modified sequence
gaaactgaggcttcaagagggttcatagctaataattggcagagccagtgtttgaacccagatgagtttggtttgttgagatacatttatatcatctgtaatttttccttcttccaggtcaaagagtaaaatgaagtacattctggttactggtggtgttatatcaggaattggaaaaggaatcattgccagcagtgtgggcacaatactcaagtcatgtggtttacatgtaacttcaatcaaaattgacccctacattaacattgatgcaggaacattctctccttatgagcatggtgaggtttttgtgctggatgatggtggggaagtagaccttgacctgggtaactatgagcggttccttgacatccgcctcaccaaggacaataatctgaccactggaaagatataccagtatgtcattaacaaggaacggaaaggagattacttggggaaaactgtccaagttgtccctcatatcacagatgcaatccaggagtgggtgatgagacaggcgttaatacctgtagatgaagatggcctggaacctcaagtgtgtgttattgagcttggtggaaccgtgggggacatagaaagcatgccctttattgaggccttccgtcagttccaattcaaggtcaaaagagagaacttttgtaacatccacgtcagtctagttccccagccaagttcaacaggggaacagaagactaaacctacccagaatagtgttcgggaacttagaggacttgggctttccccagatctggttgtatgcaggtgctcaaatccacttgacacatcagtgaaggagaaaatatcaatgttctgccatgttgagcctgaacaagtgatctgtgtccacgatgtctcatccatctaccgagtccccttgttgttagaggagcaaggggttgtagattattttcttcgaagacttgaccttcctattgagaggcagccaagaaaaatgctgatgaaatggaaagagatggctgacagatatgatcgcttgctggagacctgctctattgcccttgtgggcaaatacacgaagttctcagactcctatgcctctgtcattaaggctctggagcattctgcactggccatcaaccacaaattggaaatcaagtacatagattctgcggacttggagcccatcacctcgcaagaagagcccgtgcgctaccacgaagcttggcagaagctctgtagtgctcatggagtgctggttccaggaggatttggtgttcgaggaacagaaggaaaaatccaagcaattgcctgggctcggaatcagaaaaagccttttttgggcgtgtgcttagggatgcagttggcagtggttgaattctcaagaaacgtgctgggatggcaagatgccaattctacagagtttgaccctacgaccagtcatcccgtggtcgtagacatgccagaacacaacccagggcagatgggcggaaccatgaggctgggcaagaggagaaccctgttccagaccaagaactcagtcatgaggaaactctatggagacgcagactacttggaagagaggcaccgccaccgatttgaggtgaatccagtctggaaaaagtgtttggaagaacaaggcttgaagtttgttggccaagatgttgaaggagagagaatggaaattgtggagttagaagatcatcccttttttgttggggttcagtaccaccctgagttcctgtccaggcctatcaagccctccccaccatactttggcctcctcctggcctctgtggggcggctctcacattacctccagaaaggctgcaggctctcacccagggacacctatagtgacaggagtggaagcagctcccctgactctgaaatcaccgaactgaagtttccatcaataaatcatgactgatcttgtagcggatgattcttcaagagacccttcaaacttgggtagagtttacagctctgactttacactcggctttggagactttctttaaattatgtttttattaagattattttattatgcggaaaggt

SEQ ID NO: 337201 - DNA, 3199 bp, Artificial Sequence
  derived and/or modified sequence
tccctcgcccggaggcagagatgcgctggcgcatcaccgccaggagcccacagtgaaagaccatcggatggaaggcgacgcccagaactccaggagaccgctgtgggaggacgcgaggccaggtgacgaataggccaggcgtgagttcccaaacagcctcctccccttcaagagagtaagcttgggccacaggctgggacggaagcagaggggcagacacgccaccacccgcccggcctcgaacctacggcggcacagttcagcggaggcggcccagcggtcctgtcccgcgcctgcgcactccaggccccgccccgccccgcgccctccaggcccggcccgccctccaacctctgcgtgcgcacagcctagagcccgcctccgtgaaagactgccgggcgcatgcggtcggggttgttcactggctgtccggggctccgcgcgcgtcgccggcccagctctgtcgctgacgggaggatctgaagccggccgcaggtcaaagagtaaaatgaagtacattctggttactggtggtgttatatcaggaattggaaaaggaatcattgccagcagtgtgggcacaatactcaagtcatgtggtttacatgtaacttcaatcaaaattgacccctacattaacattgatgcaggaacattctctccttatgagcatggtgaggtttttgtgctggatgatggtggggaagtagaccttgacctgggtaactatgagcggttccttgacatccgcctcaccaaggacaataatctgaccactggaaagatataccagtatgtcattaacaaggaacggaaaggagattacttggggaaaactgtccaagttgtccctcatatcacagatgcaatccaggagtgggtgatgagacaggcgttaatacctgtagatgaagatggcctggaacctcaagtgtgtgttattgagcttggtggaaccgtgggggacatagaaagcatgccctttattgaggccttccgtcagttccaattcaaggtcaaaagagagaacttttgtaacatccacgtcagtctagttccccagccaagttcaacaggggaacagaagactaaacctacccagaatagtgttcgggaacttagaggacttgggctttccccagatctggttgtatgcaggtgctcaaatccacttgacacatcagtgaaggagaaaatatcaatgttctgccatgttgagcctgaacaagtgatctgtgtccacgatgtctcatccatctaccgagtccccttgttgttagaggagcaaggggttgtagattattttcttcgaagacttgaccttcctattgagaggcagccaagaaaaatgctgatgaaatggaaagagatggctgacagatatgatcgcttgctggagacctgctctattgcccttgtgggcaaatacacgaagttctcagactcctatgcctctgtcattaaggctctggagcattctgcactggccatcaaccacaaattggaaatcaagtacatagattctgcggacttggagcccatcacctcgcaagaagagcccgtgcgctaccacgaagcttggcagaagctctgtagtgctcatggagtgctggttccaggaggatttggtgttcgaggaacagaaggaaaaatccaagcaattgcctgggctcggaatcagaaaaagccttttttgggcgtgtgcttagggatgcagttggcagtggttgaattctcaagaaacgtgctgggatggcaagatgccaattctacagagtttgaccctacgaccagtcatcccgtggtcgtagacatgccagaacacaacccagggcagatgggcggaaccatgaggctgggcaagaggagaaccctgttccagaccaagaactcagtcatgaggaaactctatggagacgcagactacttggaagagaggcaccgccaccgatttgaggtgaatccagtctggaaaaagtgtttggaagaacaaggcttgaagtttgttggccaagatgttgaaggagagagaatggaaattgtggagttagaagatcatcccttttttgttggggttcagtaccaccctgagttcctgtccaggcctatcaagccctccccaccatactttggcctcctcctggcctctgtggggcggctctcacattacctccagaaaggctgcaggctctcacccagggacacctatagtgacaggagtggaagcagctcccctgactctgaaatcaccgaactgaagtttccatcaataaatcatgactgatcttgtagcggatgattcttcaagagacccttcaaacttgggtagagtttacagctctgactttacactcggctttggagactttctttaaattatgtttttattaagattattttattatgcggaaaggtatttgggaaacttgtcacttgcatgtcccatcacgtgtactggctcctctgtggtgtctgcctgttgcgtgacactctccttgcagttcttgagttgcggcagaacatcgcgatgggaaccgatggtgggtggggctgcagagtgccccatcggtcaccttgtttctcaactacctcgcatcattgcagatgctagcgcgttgcctgtcgctttcccttggatacctagaccgttataaagtgtgccacatggacttaccgagcatggagagaggattttagctaggatttgaacacttggtgctgggaacctcagggtattgcttgccactaagccatgaaaccagagacaaaatctctatactgccctgagttggggggaattctcagtgccaactgtggctggtcctcattcaaagggacggtcagtttggtgtcaacatgaaacaccaagatgtctgtctctgaagcgtgattttaaaatccccatgcctgtggctgcgcttcctatttctagggctgggaaacactccttgcatcaaggggtcacttacagaacaaagaatcttttgggggaaacttcctctaaaaccctctcatatatagacagctttgactggagggtccatttttcttccaggatggtgttactgcagttgaaagggcaatatgaagttactttcttaatgtgacctagcaataggcatagctacgtggcactatattctggccagactcgatgtgtactctaacttaagaaataaatcagtaaggcagaacaaga

SEQ ID NO: 337202 - protein, 314 aa, Artificial Sequence
  derived and/or modified sequence
MPKSKSKMKYILVTGGVISGIGKGIIASSVGTILKSCGLHVTSIKIDPYINIDAGTFSPYEHGEVFVLDDGGEVDLDLGNYERFLDIRLTKDNNLTTGKIYQYVINKERKGDYLGKTVQVVPHITDAIQEWVMRQALIPVDEDGLEPQVCVIELGGTVGDIESMPFIEAFRQFQFKVKRENFCNIHVSLVPQPSSTGEQKTKPTQNSVRELRGLGLSPDLVVCRCSNPLDTSVKEKISMFCHVEPEQVICVHDVSSIYRVPLLLEEQGVVDYFLRRLDLPIERQPRKMLMKWKEMADRFACNEELGVLASFTLL

SEQ ID NO: 337203 - DNA, 945 bp, Artificial Sequence
  derived and/or modified sequence
atgcccaaatctaaaagcaagatgaaatatattctcgtgacaggtggcgtgatttccgggattgggaaaggaattatcgccagctcagtggggacaatccttaaaagctgtgggctccacgtcactagtattaaaattgatccatatattaatattgatgccggtactttctctccctatgagcacggtgaagtattcgtcctcgacgacggtggggaagtggacctggatcttgggaattatgagaggttcttagatatcagattgaccaaggacaacaacctcacaaccggcaagatctatcaatatgtcattaacaaggagcgaaaaggcgattacctggggaagacagtccaggtggtgccacacatcaccgacgctattcaggagtgggtcatgaggcaggccttgattcccgtagatgaggacggtctggagccgcaggtatgcgtcattgagctgggcgggacggtgggggacatagaatcaatgccttttattgaagctttccggcagttccagtttaaggttaaacgagaaaatttttgcaatattcacgtatccctagtaccacagcctagcagcacgggtgaacagaaaactaagccaacccagaactccgtgcgcgagcttcgcgggctagggctgtctcctgacctcgtggtctgccggtgctcgaatcccctggacacttcagtgaaagaaaagatatcgatgttttgccatgtggagcccgaacaggttatttgtgtccacgatgtctccagcatctacagggtgcccctactgctggaagaacagggcgttgtcgactatttcttgagaagactggacctgcctatcgagagacagccgcgcaaaatgcttatgaagtggaaagaaatggccgataggtttgcttgcaatgaggagctcggcgttctcgcgagctttacactgctttag

SEQ ID NO: 337204 - DNA, 945 bp, Artificial Sequence
  derived and/or modified sequence
atgcccaagagcaagagcaagatgaagtacatcctggtgactggaggagtcatctctggaattggcaagggcatcatcgccagctctgtgggcaccatcctgaagagctgtggcctgcacgtgaccagcatcaagattgacccctacatcaacattgatgctggcaccttcagcccctatgagcacggggaggtgtttgtgctggatgatggaggagaggtggacctggacctgggcaactatgagcgcttcctggacatccggctgaccaaggacaacaacctgaccaccgggaagatctaccagtatgtgatcaacaaggagaggaagggggactacctgggcaagacagtgcaggtggtgccccacatcacagatgccatccaggagtgggtgatgaggcaggccctgatccctgtggatgaagatggcctggagccccaggtgtgtgtgattgagctgggcggcaccgtgggggacattgaatccatgcccttcatcgaggccttccggcagttccagttcaaggtgaagcgggagaacttctgcaacatccacgtgtccctggtgccccagcccagcagcactggagagcagaagaccaagcccacccagaacagcgtgcgggagctgcggggcctgggcctgagcccagacctggtggtgtgccgctgcagcaaccccctggacacctctgtgaaggagaagatctccatgttctgccacgtggagcctgagcaggtgatctgtgtgcatgatgtgagcagcatctacagagtgcccctgctgctggaggagcagggcgtggtggactacttcctgcggcggctggacctgcccatcgagcggcagcccaggaagatgctgatgaagtggaaggagatggctgacagatttgcctgcaatgaggagctgggcgtgctggccagcttcaccctgctgtag

SEQ ID NO: 337205 - DNA, 945 bp, Artificial Sequence
  derived and/or modified sequence
atgcccaagagcaagagcaagatgaagtacatcctggtgaccggcggcgtaattagcggcattggcaaaggtatcatcgcaagtagtgtgggcaccatattaaaatcttgcgggttacatgtgacctcaattaagatagatccatatattaacatcgacgctggcacgtttagcccctacgaacacggtgaggtgttcgttctggatgatggaggcgaagtcgacctggacttaggcaattacgagaggtttctcgacattcgactgacaaaagacaataacctgactactgggaaaatctaccaatacgtcatcaacaaggagcgtaaaggggactatttgggcaagaccgtacaggtagtgccgcacatcactgatgcgatccaggagtgggtcatgagacaggcgttgatacctgtggatgaagacggacttgaaccccaggtgtgcgtgatcgagctgggcggcactgtgggagacatcgaatccatgccatttattgaggcattcagacagttccagtttaaggtgaagagggagaatttctgcaatatccacgtcagccttgttccgcagccttcaagtacaggagaacaaaaaacgaagccaactcagaactctgtgcgcgagctcagaggtctcggcctgtctcctgatttagtggtatgtaggtgttccaatccactcgacacttccgtcaaggagaagatatccatgttttgccacgtcgaacccgaacaggtcatctgcgtgcatgacgtgtcttcaatctatagagtaccactgctcctggaagaacagggggttgtggactacttcctgcgaaggttggacctgcccatcgagcgacagcctagaaagatgctgatgaaatggaaagagatggccgacagattcgcttgcaacgaggagttgggagtgttggcgagctttacactgctgtag

SEQ ID NO: 337206 - DNA, 945 bp, Artificial Sequence
  derived and/or modified sequence
atgccaaaatcgaagagcaagatgaagtacattctcgtcacagggggagtaatcagcgggattggaaagggtattatcgcttcttccgtcggtaccatactgaaatcttgtggcctccatgtaacctctattaaaatcgatccatacatcaacatcgatgccggaacgttttcaccctacgaacacggcgaggtatttgttctggacgatgggggagaggtcgacttggaccttgggaattatgagcgttttttagacataaggcttactaaagataacaacctcaccacgggtaagatttaccagtatgtcatcaacaaagagaggaaaggggactatcttggaaagaccgtgcaggttgtcccacacattacagacgctattcaggaatgggtcatgcggcaggcattgatcccagtcgatgaggatggcctcgaaccccaggtctgcgtgattgagctcggcggtactgtcggtgacatcgagtccatgccatttatcgaggcgttccgacaatttcagttcaaagtaaaacgggaaaatttctgtaacatacacgtatccctggtcccgcagcccagcagtaccggggaacagaagacaaaacctacccagaatagtgtgagagagctgaggggcctgggcttgtcccctgatcttgtggtgtgtagatgcagtaaccctctggatacaagcgtgaaggagaagatctctatgttttgtcatgttgaaccggagcaggtaatttgcgtccacgacgtctctagtatctacagagtcccccttctcctcgaagagcagggggtagtggactactttcttaggagactcgaccttccaattgaaaggcagccaagaaaaatgttaatgaagtggaaagagatggccgataggtttgcgtgtaacgaagagcttggagttctggccagtttcacattgctgtag

SEQ ID NO: 337207 - DNA, 1232 bp, Artificial Sequence
  derived and/or modified sequence
cataatttggcttcacatggaacgttcctgaggaggaaaatgtcctgaccatgccaaagtcaaagagtaaaatgaagtacattctggttactggtggtgttatatcaggaattggaaaaggaatcattgccagcagtgtgggcacaatactcaagtcatgtggtttacatgtaacttcaatcaaaattgacccctacattaacattgatgcaggaacattctctccttatgagcatggtgaggtttttgtgctggatgatggtggggaagtagaccttgacctgggtaactatgagcggttccttgacatccgcctcaccaaggacaataatctgaccactggaaagatataccagtatgtcattaacaaggaacggaaaggagattacttggggaaaactgtccaagttgtccctcatatcacagatgcaatccaggagtgggtgatgagacaggcgttaatacctgtagatgaagatggcctggaacctcaagtgtgtgttattgagcttggtggaaccgtgggggacatagaaagcatgccctttattgaggccttccgtcagttccaattcaaggtcaaaagagagaacttttgtaacatccacgtcagtctagttccccagccaagttcaacaggggaacagaagactaaacctacccagaatagtgttcgggaacttagaggacttgggctttccccagatctggttgtatgcaggtgctcaaatccacttgacacatcagtgaaggagaaaatatcaatgttctgccatgttgagcctgaacaagtgatctgtgtccacgatgtctcatccatctaccgagtccccttgttgttagaggagcaaggggttgtagattattttcttcgaagacttgaccttcctattgagaggcagccaagaaaaatgctgatgaaatggaaagagatggctgacaggtttgcctgcaatgaggagctgggagtgctagcctcctttactcttttgtagggctggtgaagccgactctagccctagcacttttgtacttttgcacttctgccatccactcattagaagagcctttgtagtaagagatgttcagaaaggatcttagctgtcacgtagctgtggcacagatgaggagatcctgatagggccaggccaggtgccgggcctccagacaatgagttcgggttatgtcttaacacgcttgtctcttaccaactagatcagtgcagatgggcg

SEQ ID NO: 337208 - DNA, 945 bp, Artificial Sequence
  derived and/or modified sequence
atgcccaagagcaagagcaagatgaagtacatcctggtgaccggcggcgtgatcagcggcatcggcaagggcatcatcgccagcagcgtgggcaccatcctgaagagctgcggcctgcacgtgaccagcatcaagatcgacccctacatcaacatcgacgccggcaccttcagcccctacgagcacggcgaggtgttcgtgctggacgacggcggcgaggtggacctggacctgggcaactacgagagattcctggacatcagactgaccaaggacaacaacctgaccaccggcaagatctaccagtacgtgatcaacaaggagagaaagggcgactacctgggcaagaccgtgcaggtggtgccccacatcaccgacgccatccaggagtgggtgatgagacaggccctgatccccgtggacgaggacggcctggagccccaggtgtgcgtgatcgagctgggcggcaccgtgggcgacatcgagagcatgcccttcatcgaggccttcagacagttccagttcaaggtgaagagagagaacttctgcaacatccacgtgagcctggtgccccagcccagcagcaccggcgagcagaagaccaagcccacccagaacagcgtgagagagctgagaggcctgggcctgagccccgacctggtggtgtgcagatgcagcaaccccctggacaccagcgtgaaggagaagatcagcatgttctgccacgtggagcccgagcaggtgatctgcgtgcacgacgtgagcagcatctacagagtgcccctgctgctggaggagcagggcgtggtggactacttcctgagaagactggacctgcccatcgagagacagcccagaaagatgctgatgaagtggaaggagatggccgacagattcgcctgcaacgaggagctgggcgtgctggccagcttcaccctgctgtag

SEQ ID NO: 337209 - protein, 157 aa, Artificial Sequence
  derived and/or modified sequence
MKVILGRSDPKSHGSYRFLAPWIGYGLLLLNGQTWFQHRRMLTPAFHYDILKPYVGLMADSVRVMLDKWEELLGQDSPLEVFQHVSLMTLDTIMKCAFSHQGSIQVDRPSDPTEEGSTTEGGGAGEDQEEEAFGFSGYPPLGQNGEWEHLVRQGPPC

SEQ ID NO: 337210 - DNA, 474 bp, Artificial Sequence
  derived and/or modified sequence
atgaaagtgatcctgggacggtcagatccaaagtctcacgggagctataggtttctcgctccttggatcggatacggcctcctactgctgaacggacagacttggtttcaacacagacgaatgctcactcccgcctttcattacgatattttgaagccttatgtcgggttgatggccgatagcgtcagagtcatgttggacaagtgggaggaactcctgggtcaggatagccccctggaggtgtttcagcatgtttccctgatgacgctggatacaatcatgaagtgtgccttcagccaccagggatccattcaggtggatcgaccctccgatcccacggaggaggggtctacaactgaagggggcggggcgggtgaagaccaggaggaggaggcttttggcttcagcggatacccgcctctgggccaaaacggggaatgggagcacctcgtccggcaggggccgccttgttag

SEQ ID NO: 337211 - DNA, 474 bp, Artificial Sequence
  derived and/or modified sequence
atgaaggtgatcctgggccgcagtgaccccaagagccacggcagctaccgcttcctggccccctggattggctacggcctgctgctgctgaatggccagacctggttccagcacaggaggatgctgaccccagccttccactatgacatcctgaagccctacgtgggcctgatggctgacagcgtgcgggtgatgctggacaagtgggaggagctgctgggccaggacagccccctggaggtgttccagcacgtgtccctgatgaccctggacaccatcatgaagtgtgccttcagccaccagggcagcatccaggtggaccggcccagcgaccccacagaggagggcagcaccacagaaggaggaggagctggggaggaccaggaggaggaggccttcggcttcagcggctacccacccctgggccagaatggagagtgggagcacctggtgcggcagggccccccctgctag

SEQ ID NO: 337212 - DNA, 474 bp, Artificial Sequence
  derived and/or modified sequence
atgaaggtgatcctgggccggagcgaccccaagagccacggcagctatcggttcctggctccttggattgggtacggtcttcttctgctcaatggccagacttggttccagcaccgaaggatgctgacacctgcctttcattacgacatcttgaagccctacgtcggcctaatggcagactccgtacgagtgatgctggataaatgggaggagctgttaggtcaagactccccgctggaagtctttcagcacgtgtcactaatgacacttgacactatcatgaagtgcgcgttcagtcatcagggatccattcaggtggacagaccgtccgaccctaccgaagaggggagtaccactgagggcggtggggcgggagaagatcaggaagaggaggcgtttggcttcagtggctatccaccactgggtcagaatggcgagtgggaacatttagtcaggcagggcccgccctgctag

SEQ ID NO: 337213 - DNA, 474 bp, Artificial Sequence
  derived and/or modified sequence
atgaaggtcattcttggcaggtccgaccccaaaagtcacggctcctaccgatttctagccccatggattggctatggacttcttttgctaaatggccagacttggttccaacatagaaggatgcttactcctgccttccactacgacattctaaagccctacgtaggactcatggctgatagcgtccgcgttatgttggataaatgggaggagctcctgggacaagacagtcctttggaagtatttcagcacgttagcctcatgacgctggacactattatgaagtgcgcatttagccatcagggctcgatacaggtcgacaggcccagcgacccgacagaagaggggtccacgactgagggcggtggggctggcgaagatcaggaggaagaagcatttggattttccgggtacccacctctgggtcagaatggtgagtgggagcatttggttaggcaaggacctccttgttag

SEQ ID NO: 337214 - DNA, 474 bp, Artificial Sequence
  derived and/or modified sequence
atgaaggtgatcctgggcagaagcgaccccaagagccacggcagctacagattcctggccccctggatcggctacggcctgctgctgctgaacggccagacctggttccagcacagaagaatgctgacccccgccttccactacgacatcctgaagccctacgtgggcctgatggccgacagcgtgagagtgatgctggacaagtgggaggagctgctgggccaggacagccccctggaggtgttccagcacgtgagcctgatgaccctggacaccatcatgaagtgcgccttcagccaccagggcagcatccaggtggacagacccagcgaccccaccgaggagggcagcaccaccgagggcggcggcgccggcgaggaccaggaggaggaggccttcggcttcagcggctacccccccctgggccagaacggcgagtgggagcacctggtgagacagggccccccctgctag

SEQ ID NO: 337215 - protein, 497 aa, Artificial Sequence
  derived and/or modified sequence
MVPSFLSLSFSSLGLWASGLILVLGFLKLIHLLLRRQTLAKAMDKFPGPPTHWLFGHALEIQETGSLDKVVSWAHQFPYAHPLWFGQFIGFLNIYEPDYAKAVYSRGGRGLLVLEGPKWLQHRKLLTPGFHYDVLKPYVAVFTESTRIMLDKWEEKAREGKSFDIFCDVGHMALNTLMKCTFGRGDTGLGHSRDSSYYLAVSDLTLLMQQRLVSFQYHNDFIYWLTPHGRRFLRACQVAHDHTDQVIRERKAALQDEKVRKKIQNRRHLDFLDILLGARDEDDIKLSDADLRAEVDTFMFEGHDTTTSGISWFLYCMALYPEHQHRCREEVREILGDQDFFQWDDLGKMTYLTMCIKESFRLYPPVPQVYRQLSKPVTFVDGRSLPAGSLISMHIYALHRNSAVWPDPEVFDSLRFSTENASKRHPFAFMPFSAGPRNCIGQQFAMSEMKVVTAMCLLRFEFSLDPSRLPIKMPQLVLRSKNGFHLHLKPLGPGSGK

SEQ ID NO: 337216 - DNA, 1494 bp, Artificial Sequence
  derived and/or modified sequence
atggtgcccagcttcctgagcctgagcttcagcagcctgggcctgtgggccagcggcctgatcctggtgctgggcttcctgaagctgatccacctgctgctgagaagacagaccctggccaaggccatggacaagttccccggcccccccacccactggctgttcggccacgccctggagatccaggagaccggcagcctggacaaggtggtgagctgggcccaccagttcccctacgcccaccccctgtggttcggccagttcatcggcttcctgaacatctacgagcccgactacgccaaggccgtgtacagcagaggcggcagaggcctgctggtgctggagggccccaagtggctgcagcacagaaagctgctgacccccggcttccactacgacgtgctgaagccctacgtggccgtgttcaccgagagcaccagaatcatgctggacaagtgggaggagaaggccagagagggcaagagcttcgacatcttctgcgacgtgggccacatggccctgaacaccctgatgaagtgcaccttcggcagaggcgacaccggcctgggccacagcagagacagcagctactacctggccgtgagcgacctgaccctgctgatgcagcagagactggtgagcttccagtaccacaacgacttcatctactggctgaccccccacggcagaagattcctgagagcctgccaggtggcccacgaccacaccgaccaggtgatcagagagagaaaggccgccctgcaggacgagaaggtgagaaagaagatccagaacagaagacacctggacttcctggacatcctgctgggcgccagagacgaggacgacatcaagctgagcgacgccgacctgagagccgaggtggacaccttcatgttcgagggccacgacaccaccaccagcggcatcagctggttcctgtactgcatggccctgtaccccgagcaccagcacagatgcagagaggaggtgagagagatcctgggcgaccaggacttcttccagtgggacgacctgggcaagatgacctacctgaccatgtgcatcaaggagagcttcagactgtacccccccgtgccccaggtgtacagacagctgagcaagcccgtgaccttcgtggacggcagaagcctgcccgccggcagcctgatcagcatgcacatctacgccctgcacagaaacagcgccgtgtggcccgaccccgaggtgttcgacagcctgagattcagcaccgagaacgccagcaagagacaccccttcgccttcatgcccttcagcgccggccccagaaactgcatcggccagcagttcgccatgagcgagatgaaggtggtgaccgccatgtgcctgctgagattcgagttcagcctggaccccagcagactgcccatcaagatgccccagctggtgctgagaagcaagaacggcttccacctgcacctgaagcccctgggccccggcagcggcaagtag

SEQ ID NO: 337217 - DNA, 1494 bp, Artificial Sequence
  derived and/or modified sequence
atggtgcccagcttcctctccctgagcttctcctccttgggcctgtgggcttctgggctgatcttggtcttaggctttctcaagctcatccacctgctgctgcggaggcagacgttggctaaggctatggacaaattcccagggcctcccacccactggctttttggacatgccctcgagatccaggagacggggagcctggacaaagtggtgtcctgggcccaccagttcccgtatgcccacccactctggttcggacagttcattggcttcctgaacatctatgagcctgactatgccaaagctgtgtacagccgtggggggagaggcctgctggttcttgaggggcccaagtggttgcagcaccgcaagctgctcacacctggctttcattatgatgtgctgaagccctatgtggccgtgttcactgagtctacacgtatcatgctggacaagtgggaagagaaagctcgggagggtaagtcctttgacatcttctgcgatgtgggtcacatggcgctgaacacactcatgaagtgcacctttggaagaggagacaccggcctgggccacagcagggacagcagctactaccttgcagtcagcgatctcactctgttgatgcagcagcgccttgtgtccttccagtaccataatgacttcatctactggctcaccccacatggccgccgcttcctgcgggcctgccaggtggcccatgaccatacagaccaggtcatcagggagcggaaggcagccctgcaggatgagaaggtgcggaagaagatccagaaccggaggcacctggacttcctggacattctcctgggtgcccgggatgaagatgacatcaaactgtcagatgcagacctccgggctgaagtggacacattcatgtttgaaggccatgacaccaccaccagtggtatctcctggtttctctactgcatggccctgtaccctgagcaccagcatcgttgtagagaggaggtccgcgagatcctaggggaccaggacttcttccagtgggatgatctgggcaaaatgacttatctgaccatgtgcatcaaggagagcttccgcctctacccacctgtgccccaggtgtaccgccagctcagcaagcctgtcacctttgtggatggccggtctctacctgcaggaagcctgatctctatgcatatctatgccctccataggaacagtgctgtatggcccgaccctgaggtctttgactctctgcgcttttccactgagaatgcatccaaacgccatccctttgcctttatgcccttctctgctgggcccaggaactgcattgggcagcagtttgccatgagtgagatgaaggtggtcacagccatgtgcttgctccgctttgagttctctctggacccctcacggctgcccatcaagatgccccagcttgtcctgcgctccaagaatggctttcacctccacctgaagccactgggccctgggtctgggaagtag

SEQ ID NO: 337218 - DNA, 1494 bp, Artificial Sequence
  derived and/or modified sequence
atggtgccctctttcttgagcctcagctttagcagcctgggcctgtgggcatcgggtctcatcttggttctgggttttctcaaactcatacatctactcctccggaggcagaccttggccaaagccatggacaagttcccaggaccccctacacactggctgttcggtcacgccttagagatccaggagactggatctctggacaaagtcgtgagctgggcccaccaattcccatacgctcacccactgtggtttggccagttcattgggttcctgaatatttacgagcctgactacgcaaaggcagtttattcaagaggcggccggggactgcttgttctcgaggggcccaagtggttacagcatagaaaactgttgacccctggttttcactatgatgtcctcaagccttatgtggccgtcttcacggaatcaacacgaataatgctcgacaagtgggaggagaaggcccgggagggtaagtccttcgacatcttctgtgatgtgggtcacatggcactgaacacactgatgaaatgcacatttggccgtggagataccggattaggtcattcaagggacagctcctattacctagccgtctcggacctgaccctactcatgcagcaaagactagtgagcttccagtaccataatgattttatctactggctcacacctcatggcagacgcttcttacgcgcctgtcaggttgctcacgaccatacagaccaggtcatccgtgagcgtaaagcggctttgcaagacgagaaggtgcgaaagaaaattcagaacaggagacacctcgattttctggatattctgcttggcgctagggatgaagacgatattaagctgtctgatgctgatctgcgcgctgaggtagataccttcatgtttgaggggcatgacacgaccacttcaggaattagttggtttctatactgcatggctttataccccgaacatcaacatagatgcagagaggaagtccgcgaaattttgggcgatcaagatttctttcagtgggacgacctaggaaaaatgacctatctcacaatgtgcatcaaagaaagctttaggctttaccctcccgtgcctcaagtttaccggcaactgtcaaaacccgtgacttttgtggatggtcggtccttacctgccggtagtctcatctctatgcacatatatgcactgcatcgcaacagcgccgtctggccagacccagaggtcttcgactcgctccgtttttcaacagagaacgcttccaagaggcaccctttcgcctttatgcctttttcagccggtcccagaaactgcataggccaacagttcgcgatgagtgaaatgaaggtcgtcacagccatgtgtctactgcgcttcgagttttccctcgacccttctcggctcccgattaagatgcctcagctggtgctgcgcagcaaaaacggctttcacttgcatcttaagcccttaggacctggaagtgggaagtag

SEQ ID NO: 337219 - DNA, 1494 bp, Artificial Sequence
  derived and/or modified sequence
atggtgcccagcttcctgagcctgtccttcagcagcctgggcctgtgggccagcggcctcatcctggtgctgggcttcctgaagctgatccacctgctgctgcggcggcagaccctggccaaggccatggacaagtttcctggcccccccacccactggctgtttggacatgccctggagatccaggagaccggcagcctggacaaggtggtgtcctgggcccaccagttcccctatgcccaccccctgtggtttggccagttcatcggcttcctgaacatctatgagccagactatgccaaggctgtgtacagcagaggaggccggggcctgctggtgctggagggccccaagtggctgcagcacaggaagctgctgaccccaggcttccactatgatgtgctgaagccctacgtggccgtgttcacagagagcacccgcatcatgctggacaagtgggaggagaaggcccgggagggcaagagctttgacatcttctgtgatgtgggccacatggccctgaacaccctgatgaagtgcaccttcggccgcggggacaccggcctgggccacagccgggacagcagctactacctggccgtgtctgacctgaccctgctgatgcagcagaggctggtgtccttccagtaccacaatgacttcatctactggctgaccccccacggccgccgcttcctgcgggcctgccaggtggcccatgaccacacagaccaggtgatccgggagaggaaggccgccctgcaggatgagaaggtgaggaagaagatccagaacagaagacacctggacttcctggacatcctgctgggcgccagagatgaagatgacatcaagctgagtgatgctgacctgcgggcagaggtggacaccttcatgtttgagggccatgacaccaccaccagcggcatctcctggttcctgtactgcatggccctgtacccagagcaccagcaccgctgccgggaggaggtgcgggagatcctgggggaccaggacttcttccagtgggatgacctgggcaagatgacctacctgaccatgtgcatcaaggagagcttccggctgtacccacctgtgccccaggtgtaccggcagctgagcaagcctgtgacctttgtggatggccgcagcctgcctgctggcagcctcatctccatgcacatctatgccctgcacaggaacagcgctgtgtggccagaccctgaggtgtttgacagcctgcgcttcagcacagaaaatgccagcaagaggcacccctttgccttcatgcccttctctgctggccccaggaactgcatcggccagcagtttgccatgtctgagatgaaggtggtgacagccatgtgcctgctgcgctttgagttcagcctggaccccagccggctgcccatcaagatgccccagctggtgctgcggagcaagaatggcttccacctgcacctgaagcccctgggccctggcagcggcaagtag

SEQ ID NO: 337220 - DNA, 1494 bp, Artificial Sequence
  derived and/or modified sequence
atggtgcccagcttcctgagcctgagcttcagcagcctgggcctgtgggcaagcggactcattctggtgctgggctttttgaaactcatccatctgctcctcaggagacagaccttagccaaggcaatggacaaattccccggcccacctacccactggcttttcggacatgcgctagagattcaagagacagggtcgctggacaaggtggtctcttgggcgcaccagttcccatatgcccaccccctttggtttggccagtttattggcttcctgaacatctacgagcctgactatgctaaggccgtgtacagtaggggaggccgagggctcctggtcctagaggggccaaaatggctgcagcatcgaaaattattgacccccggcttccattacgatgtgctgaaaccttatgttgccgttttcacagagtccacacgcataatgctagacaagtgggaggaaaaggcgcgtgagggcaaaagtttcgatattttctgcgacgtcggccacatggctctaaacacactgatgaaatgcacttttgggcgaggagacaccggattaggacattcaagagacagctcttactacttggctgttagcgaccttactttgttgatgcagcagcgacttgtctccttccagtaccacaacgacttcatttactggctgacccctcatggccgccggttcctgcgcgcctgccaagtggctcacgaccacacagatcaagtaattagggagaggaaggccgccctccaggacgaaaaagtccggaagaaaatccagaacagaagacatctagattttctagatatcctgttgggggctagagacgaggacgatatcaagttatcagatgccgaccttagggcagaggtggacacctttatgttcgaagggcatgatactacaacaagcggcatcagttggttcctgtactgcatggccctgtatcccgagcatcagcacagatgtcgggaagaagtccgcgagatcctaggagaccaggatttcttccagtgggacgatctgggcaaaatgacctacctgacgatgtgtatcaaggaaagttttcgcctgtatccccctgtgccccaagtctatcgccagctcagtaaaccagtgacctttgtcgacggccgatctcttcccgcagggtcgctgatctccatgcacatatatgcactccacaggaattccgcagtctggccagatccggaagtgttcgactctctccgcttctcaactgaaaacgcctcgaaaaggcaccccttcgctttcatgcccttctccgccggcccacgaaactgcattggccagcagttcgccatgagcgaaatgaaagtggtaacagccatgtgccttcttcgcttcgagttttccctggacccctctcgcctgcccatcaaaatgccccaactggtgcttagatcaaaaaatggattccacttgcacctcaaaccgttaggtccaggctccggaaaatag

SEQ ID NO: 337221 - DNA, 1494 bp, Artificial Sequence
  derived and/or modified sequence
atggtgccttctttcttatctctgtcattctcttcgttgggtctgtgggcttccggcctgatactggtgttgggtttcttaaagctgattcaccttctcctcaggcgccagacgttggccaaggcaatggataaattccctggtccaccaacacactggttgttcggccacgccctggaaatacaagagaccgggagcctggacaaagtcgtctcttgggctcatcagttcccctatgcccacccactctggtttggccaatttattggtttcttgaatatctacgaaccagattacgccaaagcagtttactctagaggtggcaggggtttgctagttttggaaggcccaaaatggctccagcatcgtaagctccttaccccaggcttccattacgatgtcctgaaaccatatgtggctgtgttcacagaaagtacccggattatgctagacaagtgggaggaaaaggcacgcgagggtaagtcgttcgatatcttctgtgatgtggggcacatggctctgaacacattaatgaagtgtacatttgggcgaggcgacactggcctgggccattcaagggactcctcttattacttagccgtgtctgacctgaccctgcttatgcaacagcggcttgtatcctttcagtatcataacgactttatctactggctgacacctcatggccgtcggtttcttcgggcatgccaggtcgcacatgatcacaccgatcaagtaatacgagaacggaaggccgcacttcaggacgagaaggtgcgaaaaaagattcagaacagacggcacctggactttcttgatatcttattgggggctcgtgatgaggacgacataaaactcagcgacgccgatctgcgggcagaggtcgacaccttcatgttcgaaggtcacgacactaccacaagtgggattagctggtttctctactgcatggccttgtaccccgagcaccaacataggtgtagagaggaggtacgagaaatcctcggggaccaagactttttccagtgggacgatctcggtaaaatgacttaccttaccatgtgtattaaagaatccttccgactttacccaccagtaccccaggtgtatcggcaactcagtaagcctgtgacttttgtcgacggccgttctcttcccgctggtagcctcatcagcatgcacatttacgccctgcaccgcaacagcgccgtctggccggatccggaagtatttgacagccttcgtttttctacagagaacgcatctaagagacacccctttgcatttatgcccttcagcgctgggcctcgaaattgtattggacagcaattcgccatgtctgagatgaaggtggtcacagccatgtgcctgctgagattcgagttttccctggacccatctcgcttgccaattaaaatgccgcagctagtactgcgctcgaaaaatggattccacttgcacctcaagcccttggggccaggcagtgggaaatag

SEQ ID NO: 337222 - protein, 367 aa, Artificial Sequence
  derived and/or modified sequence
MEKTDEISPSTSLKSIMKKKDYGFRAGGNGTKKNLQFVGVNGGYETTSSEETSGEDSTPEDLSDSEAEKKCDGPDHKHVKDAHLTCEAGQGIPEGTCHAAQESGPGEEVPHSKAERYKPSEEFLNACRALSQHLPETGTTTDQLLRQSLNTISQEWFRVSSRKSSSPAVVASYLHEVQPHSPHFLKLLVNLADHNGNTALHYSVSHSNFSIVKLLLETGVCNVDHQNKAGYTAVMITPLASAETNEDMAVVWKLLREGNVNIQATQGGQTALMLGVSHDREDMVQALLSCQADVNLQDHDGSSALMVACHHGNVDLVRLLLAHPACDSSLTDKAGRTALSIALKSPTHMEIAGLLRAHAEQGRSLGL

SEQ ID NO: 337223 - DNA, 402 bp, Artificial Sequence
  derived and/or modified sequence
atgatcacccccctggccagcgccgagaccaacgaggacatggccgtggtgtggaagctgctgagagagggcaacgtgaacatccaggccacccagggcggccagaccgccctgatgctgggcgtgagccacgacagagaggacatggtgcaggccctgctgagctgccaggccgacgtgaacctgcaggaccacgacggcagcagcgccctgatggtggcctgccaccacggcaacgtggacctggtgagactgctgctggcccaccccgcctgcgacagcagcctgaccgacaaggccggcagaaccgccctgagcatcgccctgaagagccccacccacatggagatcgccggcctgctgagagcccacgccgagcagggcagaagcctgggcctgtag

SEQ ID NO: 337224 - DNA, 1104 bp, Artificial Sequence
  derived and/or modified sequence
atggagaagaccgacgagatcagccccagcaccagcctgaagagcatcatgaagaagaaggactacggcttcagagccggcggcaacggcaccaagaagaacctgcagttcgtgggcgtgaacggcggctacgagaccaccagcagcgaggagaccagcggcgaggacagcacccccgaggacctgagcgacagcgaggccgagaagaagtgcgacggccccgaccacaagcacgtgaaggacgcccacctgacctgcgaggccggccagggcatccccgagggcacctgccacgccgcccaggagagcggccccggcgaggaggtgccccacagcaaggccgagagatacaagcccagcgaggagttcctgaacgcctgcagagccctgagccagcacctgcccgagaccggcaccaccaccgaccagctgctgagacagagcctgaacaccatcagccaggagtggttcagagtgagcagcagaaagagcagcagccccgccgtggtggccagctacctgcacgaggtgcagccccacagcccccacttcctgaagctgctggtgaacctggccgaccacaacggcaacaccgccctgcactacagcgtgagccacagcaacttcagcatcgtgaagctgctgctggagaccggcgtgtgcaacgtggaccaccagaacaaggccggctacaccgccgtgatgatcacccccctggccagcgccgagaccaacgaggacatggccgtggtgtggaagctgctgagagagggcaacgtgaacatccaggccacccagggcggccagaccgccctgatgctgggcgtgagccacgacagagaggacatggtgcaggccctgctgagctgccaggccgacgtgaacctgcaggaccacgacggcagcagcgccctgatggtggcctgccaccacggcaacgtggacctggtgagactgctgctggcccaccccgcctgcgacagcagcctgaccgacaaggccggcagaaccgccctgagcatcgccctgaagagccccacccacatggagatcgccggcctgctgagagcccacgccgagcagggcagaagcctgggcctgtag

SEQ ID NO: 337225 - DNA, 1056 bp, Artificial Sequence
  derived and/or modified sequence
atgaagaagaaggactacggcttcagagccggcggcaacggcaccaagaagaacctgcagttcgtgggcgtgaacggcggctacgagaccaccagcagcgaggagaccagcggcgaggacagcacccccgaggacctgagcgacagcgaggccgagaagaagtgcgacggccccgaccacaagcacgtgaaggacgcccacctgacctgcgaggccggccagggcatccccgagggcacctgccacgccgcccaggagagcggccccggcgaggaggtgccccacagcaaggccgagagatacaagcccagcgaggagttcctgaacgcctgcagagccctgagccagcacctgcccgagaccggcaccaccaccgaccagctgctgagacagagcctgaacaccatcagccaggagtggttcagagtgagcagcagaaagagcagcagccccgccgtggtggccagctacctgcacgaggtgcagccccacagcccccacttcctgaagctgctggtgaacctggccgaccacaacggcaacaccgccctgcactacagcgtgagccacagcaacttcagcatcgtgaagctgctgctggagaccggcgtgtgcaacgtggaccaccagaacaaggccggctacaccgccgtgatgatcacccccctggccagcgccgagaccaacgaggacatggccgtggtgtggaagctgctgagagagggcaacgtgaacatccaggccacccagggcggccagaccgccctgatgctgggcgtgagccacgacagagaggacatggtgcaggccctgctgagctgccaggccgacgtgaacctgcaggaccacgacggcagcagcgccctgatggtggcctgccaccacggcaacgtggacctggtgagactgctgctggcccaccccgcctgcgacagcagcctgaccgacaaggccggcagaaccgccctgagcatcgccctgaagagccccacccacatggagatcgccggcctgctgagagcccacgccgagcagggcagaagcctgggcctgtag

SEQ ID NO: 337226 - DNA, 402 bp, Artificial Sequence
  derived and/or modified sequence
atgattactccgctcgctagtgccgagacaaacgaagacatggccgttgtgtggaagctactcagggagggaaacgtcaatatccaggccacacaggggggccagacagcactgatgttaggagtgtctcacgacagggaggacatggttcaggctctgctgtcatgtcaggcagatgtgaacctccaggatcacgatgggtcctccgcgctgatggtggcatgccaccacggcaacgtggacttagtaagacttctgctggctcacccagcatgtgactcaagtctgacagacaaagccggccgaaccgcactgtccattgccctgaaatcccccactcacatggagatcgctggactgctccgggcccacgcagagcagggccgttctctcgggctgtag

SEQ ID NO: 337227 - DNA, 1104 bp, Artificial Sequence
  derived and/or modified sequence
atggaaaagacagacgaaatttcacctagtacgagtctgaagtctataatgaaaaagaaagactatggattccgcgccggtggaaatggcaccaagaaaaacctgcagttcgtcggagtgaacggaggctacgagacaacctcatctgaggagacgagcggagaggactctacacctgaagatttgtctgatagcgaggccgaaaaaaagtgtgacggacctgatcataagcacgtgaaagatgctcacctgacctgcgaggcaggacagggcattccagaggggacctgtcacgcagcccaggagtctgggcccggagaggaagttccacactcaaaggccgaacgctacaagcctagcgaggaatttctgaacgcctgcagggcactcagccaacacctccctgagaccggcactaccacagaccagctgttgaggcagagcctcaacaccatctctcaggagtggtttcgagtttcctcgcgaaagagtagttccccagccgtggtagcttcttacttacacgaagtccagccacactccccccacttcctgaagttgttggtgaacctggcggaccacaatggaaatacagcgctccactattcagtttcccacagcaacttttccattgtcaagttactgttggaaactggtgtatgtaacgttgaccatcagaataaggccgggtacacggccgtcatgatcacaccgcttgccagtgccgaaacaaacgaagatatggcggttgtgtggaaactgttacgcgaaggtaacgtgaatattcaggccactcagggaggacagaccgccttgatgttgggagtttctcacgaccgggaggacatggtccaggcattgctgtcctgtcaggccgatgtgaacctccaggaccacgatgggtccagcgctcttatggtagcatgtcatcatggtaatgtagacctggtgcggctgctcctcgctcaccccgcatgtgattcctccttaaccgataaggcaggccggactgcattaagcattgccttgaaaagccccacccatatggagatagctggcctgctgagggctcacgcagaacagggacgatcccttgggctgtag

SEQ ID NO: 337228 - DNA, 1056 bp, Artificial Sequence
  derived and/or modified sequence
atgaaaaagaaggactatggattcagggctgggggcaacggtactaagaagaatctgcagttcgtcggagttaacggtggatacgaaactacaagcagcgaggagacttccggagaggactcaacacctgaagatctgagcgactcggaggccgagaagaagtgtgatgggcctgaccacaaacatgtgaaggacgcacatttaacttgcgaagccgggcaaggtatccctgaggggacatgccacgccgcacaggaatctggtcctggggaggaggtgccgcacagcaaggccgaacgttataaaccatcggaggagtttctgaatgcgtgtagggccctgagccagcatctacccgaaactggcacaactactgatcagcttcttaggcagagtttaaacaccatttcacaggagtggttcagagtcagcagtcggaaatcgagctcgccggccgtggtcgcctcttatttacacgaggttcagccccattcaccacacttccttaagctgcttgtgaatctcgccgatcacaatggaaatactgccctgcattattctgtctcacattccaattttagcatcgtcaagctgttactggaaacaggtgtttgtaacgtagaccatcaaaataaggcaggatatacagccgtgatgataacacctctcgccagcgcagagaccaatgaggatatggctgtagtttggaaactgttgagagagggaaacgtgaatatccaggctactcaaggcggacaaactgccctaatgctaggggtctctcatgacagggaagacatggtgcaggctctcctctcatgtcaggccgatgtgaacctacaggaccatgatgggagctctgctcttatggtcgcctgtcaccacggtaacgttgacctcgtgagattgctacttgctcatcctgcttgtgattcctctctgactgacaaagccggacgtaccgctctgtccatagcactcaagagtcctacgcacatggagattgcggggctcctgagagcccacgcggaacagggcaggagtcttgggctgtag

SEQ ID NO: 337229 - DNA, 402 bp, Artificial Sequence
  derived and/or modified sequence
atgatcacccccctggccagcgctgagaccaatgaagacatggctgtggtgtggaagctgctgcgggagggcaatgtgaacatccaggccacccagggcggccagacagccctgatgctgggcgtgtcccatgaccgggaggacatggtgcaggccctgctgagctgccaggctgatgtgaacctgcaggaccatgatggcagcagcgccctgatggtggcctgccaccacggcaatgtggacctggtgcggctgctgctggcccacccagcctgtgacagcagcctgacagacaaggccggccgcacagccctgagcatcgccctgaagagccccacccacatggagattgctggcctgctgcgggcccatgctgagcagggccgcagcctgggcctgtag

SEQ ID NO: 337230 - DNA, 1104 bp, Artificial Sequence
  derived and/or modified sequence
atggagaagacagatgagatcagccccagcaccagcctgaagagcatcatgaagaagaaggactatggcttccgggccggcggcaatggcaccaagaagaacctgcagtttgtgggcgtgaatggaggctatgagaccaccagcagcgaggagaccagcggggaggacagcaccccagaggacctgagtgacagcgaggccgagaagaagtgtgatggccctgaccacaagcacgtgaaggatgcccacctgacctgtgaggccggccagggcatccctgagggcacctgccacgccgcccaggagagcggccctggagaggaggtgccccacagcaaggccgagcgctacaagcccagcgaggagttcctgaatgcctgccgggccctgagccagcacctgcctgagaccggcaccaccacagaccagctgctgcggcagagcctgaacaccatcagccaggagtggttccgggtgagcagcaggaagagcagcagccctgctgtggtggccagctacctgcacgaggtgcagccccacagcccccacttcctgaagctgctggtgaacctggccgaccacaatggaaacacagccctgcactacagcgtgagccacagcaacttcagcatcgtgaagctgctgctggagaccggggtgtgcaatgtggaccaccagaacaaggccggctacacagctgtgatgatcacccccctggccagcgctgagaccaatgaagacatggctgtggtgtggaagctgctgcgggagggcaatgtgaacatccaggccacccagggcggccagacagccctgatgctgggcgtgtcccatgaccgggaggacatggtgcaggccctgctgagctgccaggctgatgtgaacctgcaggaccatgatggcagcagcgccctgatggtggcctgccaccacggcaatgtggacctggtgcggctgctgctggcccacccagcctgtgacagcagcctgacagacaaggccggccgcacagccctgagcatcgccctgaagagccccacccacatggagattgctggcctgctgcgggcccatgctgagcagggccgcagcctgggcctgtag

SEQ ID NO: 337231 - DNA, 1056 bp, Artificial Sequence
  derived and/or modified sequence
atgaagaagaaggactatggcttccgggccggcggcaatggcaccaagaagaacctgcagtttgtgggcgtgaatggaggctatgagaccaccagcagcgaggagaccagcggggaggacagcaccccagaggacctgagtgacagcgaggccgagaagaagtgtgatggccctgaccacaagcacgtgaaggatgcccacctgacctgtgaggccggccagggcatccctgagggcacctgccacgccgcccaggagagcggccctggagaggaggtgccccacagcaaggccgagcgctacaagcccagcgaggagttcctgaatgcctgccgggccctgagccagcacctgcctgagaccggcaccaccacagaccagctgctgcggcagagcctgaacaccatcagccaggagtggttccgggtgagcagcaggaagagcagcagccctgctgtggtggccagctacctgcacgaggtgcagccccacagcccccacttcctgaagctgctggtgaacctggccgaccacaatggaaacacagccctgcactacagcgtgagccacagcaacttcagcatcgtgaagctgctgctggagaccggggtgtgcaatgtggaccaccagaacaaggccggctacacagctgtgatgatcacccccctggccagcgctgagaccaatgaagacatggctgtggtgtggaagctgctgcgggagggcaatgtgaacatccaggccacccagggcggccagacagccctgatgctgggcgtgtcccatgaccgggaggacatggtgcaggccctgctgagctgccaggctgatgtgaacctgcaggaccatgatggcagcagcgccctgatggtggcctgccaccacggcaatgtggacctggtgcggctgctgctggcccacccagcctgtgacagcagcctgacagacaaggccggccgcacagccctgagcatcgccctgaagagccccacccacatggagattgctggcctgctgcgggcccatgctgagcagggccgcagcctgggcctgtag

SEQ ID NO: 337232 - DNA, 2080 bp, Artificial Sequence
  derived and/or modified sequence
ggcaagctggagggagctgcagggacagaggccaaagctgtctttccttgtgtaagggaggaactcttgctggccggggaacctcttggaattggtcttttttggggtttcagaggcaaagcttgaacaccatcagtcaagagtggttccgcgtctccagccggaagtcgtctagccccgccgtggtggcctcctacctccacgaggtccagcctcactccccacacttcctgaaactgcttgtcaacttggccgatcacaacgggaacacggcccttcactacagcgtgtcccactccaacttctccatcgtgaagctgctgctggagacaggcgtctgcaatgtggaccatcagaacaaagctggctacactgccgtaatgatcactcccttggcttccgcagagaccaatgaagacatggctgttgtctggaagctcttaagagaaggaaatgtgaacattcaagctactcagggaggccagactgcgctgatgctgggagtcagccacgacagggaggacatggttcaagcgctgcttagctgccaggcagatgtcaatctgcaggaccacgatggatcctcggccctcatggtggcctgtcaccatggcaacgtggacctggtgcggctgctcctggcacacccagcctgcgacagcagcctgactgacaaggctggccgcacagctttgtccatcgctctgaagtcacccacccatatggaaattgctgggcttctgagagcccacgcggagcagggcaggtccctggggctgtaggggctgcagaagaactggccgtggggaacaaaagccttcttctctggactcctccctcgcccttgaagagggcagaggtcacaggccagagagccacccttctagagaagaaactatgtcaaatatgcacatacattcctgttgtataattctgctcattaggatgctttgtagtttttgccttaggccaagcctgaaaactacacgggcttcagagcagggttcaaggtgcaaggtgaggggtacgtcggtgtcatccaaacatccaaaacatcttcagccttgaattcctcatgactctaccctctgtaacattgtgtagcaagcaggcaggcaggagcacattagcacattagaaaagcaatactttttacatggaattttacagtgcactatctttctgttttttaagcaagtgtatacaaatatgtcccattgatatgcatgtctatagatgggaggggatttaagccaaccccctggcaagcattctgtaggggaccctagaagaatcaccgtgcagactggtgaaactgaacaagcaccatttgggagctttgtttcgatggggttgacagagaaatcttaaaatctgacagggtagaagaagcactttggcatcaatgccatatgtacagtcttgactatttctgagtcatctagtggctccaatttgctccagggaaattggaattaattaagaaatttattatctagtaagttgctatgtaataaagaaaaaaaagaaattcaatccaatgacacacaccacatgtatttgggcagagtcagattctctcagctattttgagtctgtggaagaaacaaaaaaaagcttcctcctgaggatgggttattgtcatcaagaagccacctgcatagccgtatccattacctcatggtaattcccggtgctttcccctcatatcccctagaagcaaatatctgttctgaggttttttgggacttctggctgcaataggagcaagggacccaggcagggcagagcaataccttccgaagcttccatattccctggggccagcacatgcaaggtttatatggtcagtagctcacgtgaagtcatctgaatctttcttaaatctgctctcttaaaatctcttatgcaaaaaaaaaaaaaaaaagccccttatataaaaagaagtaatgtcaaagtttgatgagctttacattggaaactcaaaagcttgcactctcattttggctcagatgccaatttgctgggtgcccctgtggtgagtcatgaaacctccttgggccgcaatttcatcatctct

SEQ ID NO: 337233 - DNA, 2103 bp, Artificial Sequence
  derived and/or modified sequence
gagaccgtcggccagagggcgcctggagggtgtgcgcgccgcggacgaccagggtgcgccagccccggggtgcgcgcctgggacgcggacagtgcacccggaggttgcgtgcgctccgaagccggggtgtgcgcctagctgccccggccccgtgcaccgcgggccgcctcgcgcaggacttccgcagctcgccaagaaccttcaacaagttttacagactcattggatgaagagtgcctgagacactgagggtcagcgctccaaagatggagaagacagatgagatctccccatcgaccagccttaaatccataatgaaaaagaaagactatggcttccgtgcaggaggtaatgggaccaaaaagaaccttcagtttgttggggttaacggtgggtatgagaccacctcaagtgaggagaccagcggtgaggacagcaccccagaggacttgtctgacagcgaggcagagaagaagtgtgacggcccagatcacaagcatgtcaaagatgcccatctcacctgcgaggctgggcagggcatccctgagggcacctgccatgctgcccaggaaagtgggcctggggaagaagtcccccactccaaggccgagagatataaaccctcagaagaatttcttaatgcatgccgggcactgagccagcatctgccagaaactgggaccaccacagaccagctcttgaggcaaagcttgaacaccatcagtcaagagtggttccgcgtctccagccggaagtcgtctagccccgccgtggtggcctcctacctccacgaggtccagcctcactccccacacttcctgaaactgcttgtcaacttggccgatcacaacgggaacacggcccttcactacagcgtgtcccactccaacttctccatcgtgaagctgctgctggagacaggcgtctgcaatgtggaccatcagaacaaagctggctacactgccgtaatgatcactcccttggcttccgcagagaccaatgaagacatggctgttgtctggaagctcttaagagaaggaaatgtgaacattcaagctactcagggaggccagactgcgctgatgctgggagtcagccacgacagggaggacatggttcaagcgctgcttagctgccaggcagatgtcaatctgcaggaccacgatggatcctcggccctcatggtggcctgtcaccatggcaacgtggacctggtgcggctgctcctggcacacccagcctgcgacagcagcctgactgacaaggctggccgcacagctttgtccatcgctctgaagtcacccacccatatggaaattgctgggcttctgagagcccacgcggagcagggcaggtccctggggctgtaggggctgcagaagaactggccgtggggaacaaaagccttcttctctggactcctccctcgcccttgaagagggcagaggtcacaggccagagagccacccttctagagaagaaactatgtcaaatatgcacatacattcctgttgtataattctgctcattaggatgctttgtagtttttgccttaggccaagcctgaaaactacacgggcttcagagcagggttcaaggtgcaaggtgaggggtacgtcggtgtcatccaaacatccaaaacatcttcagccttgaattcctcatgactctaccctctgtaacattgtgtagcaagcaggcaggcaggagcacattagcacattagaaaagcaatactttttacatggaattttacagtgcactatctttctgttttttaagcaagtgtatacaaatatgtcccattgatatgcatgtctatagatgggaggggatttaagccaaccccctggcaagcattctgtaggggaccctagaagaatcaccgtgcagactggtgaaactgaacaagcaccatttgggagctttgtttcgatggggttgacagagaaatcttaaaatctgacagggtagaagaagcactttggcatcaatgccatatgtacagtcttgactatttctgagtcatctagtggctccaatttgctccagggaaattggaattaattaagaaatttattatctagtaagttgctatgtaat

SEQ ID NO: 337234 - DNA, 3023 bp, Artificial Sequence
  derived and/or modified sequence
aaaaaagattttagtacttccaggaacccagtggaataaaaactgatgtgtgtgacagtggaggctcgggacctctactcttgcctttgctctaaggttgggtctgactatgggcccactgcctacagctgtatggatagcacagggcacaaagatgccagccagggagggcaaatgagagttgaaagccagcccacactccatttgccaagccttgcgctgcagcaccacatccacccagagggggctgttctcatttgcattgtgcaaaggcagtgtctggggccaagaatggccctgctgcgtggactccagacctcttcctgggcttttgcattcctgtgttcctctctggttcttgcatagtagaggttttctctggcctggttttggaggagcattatattgatatctggtatagttcactgaatattttctctgcgtgcatgtgtgtgtgtacgtgcatgtgtgtgtgtacaggggcaggagattaagtgctgctcacatatggaaatgggcccttcggctgagcagcacttcctgttgtaacagatcaaaccctcttcactgtcgggtaaagtggaaccacgttttgctttgcagggcagcatgcgagtctgcttcctgccacaaatcacaatttgactgctttctcattgtttcagtgctagttctagccttccccgttgggagccgcctcctgtcctgttgagcacattgcaagatctgtgtccttgctcgtgtatctactgtgagcacggtgtcatcaccacccccacaaccctagtgtcagtatgcacttgtgagccaggaaggaccactgaggtgcccttgagcagaagtgggtgctagaccatgagtccagaggcctacgttctgctcctacactcccattcactgagcaagtctgggcctcagatttcccagctgtaagacagggacaacaatggcacctacgccacatggttcttcatccacacttagaggggcattgttaacagagacagttctcccaacattgagcagaaagcaaggctcctccaagaggtccccaaaacattgatttacatgatctggttccctgtccctccttacctctccacacacctgcaacccttgtcccctcaaagcaatatcctggttttgctacattcccatgcatccccaagatcattctaacctgtgatgttgtgtctgcctagagatctccccatcgaccagccttaaatccataatgaaaaagaaagactatggcttccgtgcaggaggtaatgggaccaaaaagaaccttcagtttgttggggttaacggtgggtatgagaccacctcaagtgaggagaccagcggtgaggacagcaccccagaggacttgtctgacagcgaggcagagaagaagtgtgacggcccagatcacaagcatgtcaaagatgcccatctcacctgcgaggctgggcagggcatccctgagggcacctgccatgctgcccaggaaagtgggcctggggaagaagtcccccactccaaggccgagagatataaaccctcagaagaatttcttaatgcatgccgggcactgagccagcatctgccagaaactgggaccaccacagaccagctcttgaggcaaagcttgaacaccatcagtcaagagtggttccgcgtctccagccggaagtcgtctagccccgccgtggtggcctcctacctccacgaggtccagcctcactccccacacttcctgaaactgcttgtcaacttggccgatcacaacgggaacacggcccttcactacagcgtgtcccactccaacttctccatcgtgaagctgctgctggagacaggcgtctgcaatgtggaccatcagaacaaagctggctacactgccgtaatgatcactcccttggcttccgcagagaccaatgaagacatggctgttgtctggaagctcttaagagaaggaaatgtgaacattcaagctactcagggaggccagactgcgctgatgctgggagtcagccacgacagggaggacatggttcaagcgctgcttagctgccaggcagatgtcaatctgcaggaccacgatggatcctcggccctcatggtggcctgtcaccatggcaacgtggacctggtgcggctgctcctggcacacccagcctgcgacagcagcctgactgacaaggctggccgcacagctttgtccatcgctctgaagtcacccacccatatggaaattgctgggcttctgagagcccacgcggagcagggcaggtccctggggctgtaggggctgcagaagaactggccgtggggaacaaaagccttcttctctggactcctccctcgcccttgaagagggcagaggtcacaggccagagagccacccttctagagaagaaactatgtcaaatatgcacatacattcctgttgtataattctgctcattaggatgctttgtagtttttgccttaggccaagcctgaaaactacacgggcttcagagcagggttcaaggtgcaaggtgaggggtacgtcggtgtcatccaaacatccaaaacatcttcagccttgaattcctcatgactctaccctctgtaacattgtgtagcaagcaggcaggcaggagcacattagcacattagaaaagcaatactttttacatggaattttacagtgcactatctttctgttttttaagcaagtgtatacaaatatgtcccattgatatgcatgtctatagatgggaggggatttaagccaaccccctggcaagcattctgtaggggaccctagaagaatcaccgtgcagactggtgaaactgaacaagcaccatttgggagctttgtttcgatggggttgacagagaaatcttaaaatctgacagggtagaagaagcactttggcatcaatgccatatgtacagtcttgactatttctgagtcatctagtggctccaatttgctccagggaaattggaattaattaagaaatttattatctagtaagttgctatgtaat

SEQ ID NO: 337235 - DNA, 402 bp, Artificial Sequence
  derived and/or modified sequence
atgatcacccccctggccagcgccgagaccaacgaggacatggccgtagtctggaagctcctgagagaaggcaacgtcaacatccaagccacacaagggggtcaaactgcgttgatgctgggtgtgagtcatgaccgtgaagatatggtgcaggccctgctgtcatgccaggcagatgtgaatctgcaggatcatgatgggtcaagtgcactgatggtggcttgccaccatggcaatgtggatctcgtgaggctgcttctggcacaccctgcttgtgacagttcactgaccgacaaggccgggcgaacagcactgtctatcgctctcaagtcacctacccacatggaaatcgctggattgctccgcgcacatgcagaacagggtcgctcacttggactctag

SEQ ID NO: 337236 - DNA, 1104 bp, Artificial Sequence
  derived and/or modified sequence
atggagaagaccgacgagatcagccccagcaccagcctgaagagcattatgaagaagaaggactatgggttccgcgcaggaggcaacgggactaaaaaaaacctgcagtttgtcggcgtgaacggcggttatgagacaacaagtagcgaagagaccagtggcgaggattcgactccagaagatcttagtgactcagaggccgagaaaaagtgtgatggcccagatcataagcacgttaaagatgcacacctcacatgtgaagcaggccagggaatcccagagggtacgtgtcatgcggcccaggaaagtggcccgggagaggaggtaccacatagcaaggcagaacgctataaaccctcagaggaattcctcaacgcctgtcgtgcgctttcccagcatctccccgaaaccgggaccacaaccgaccagctgctcagacagagcctaaatactataagccaagaatggtttcgcgtgtctagtcgcaaatcctctagccccgctgtagtcgctagttatttgcacgaggtgcagcctcactcccctcatttcttaaaactccttgtgaacctggctgatcacaatggtaacacagcgctccactactccgtgtcccactctaatttctcaattgtgaagctacttctggagacaggggtgtgcaacgtggaccaccagaataaggctggatatacagcagttatgatcacgcctctggccagcgccgagacaaacgaagacatggccgtggtttggaagctgctgagagaggggaacgtcaacattcaggcgacccaagggggccagacggccctgatgttaggtgtgtcccacgatcgggaggacatggtccaggctctgctgtcctgtcaggctgacgtgaatctgcaggaccacgacggttccagtgcattgatggtagcatgccaccatggcaatgtcgacctggtgcgcctgctgctggctcatcctgcatgtgattcctccctcaccgataaggcaggacgaacagcgctctctatcgcacttaagagtccaactcatatggaaatcgcaggactgctgagagctcacgctgaacagggccgttccctaggcctgtag

SEQ ID NO: 337237 - DNA, 1056 bp, Artificial Sequence
  derived and/or modified sequence
atgaagaagaaggactacggcttccgggccggcggcaacggcaccaagaaaaacctccagttcgtgggggtgaacggaggctacgagactactagttcagaggagacctcaggagaggatagtacacccgaggatctatctgactcagaagcggaaaaaaagtgcgacggacctgatcacaaacatgttaaggacgctcatttaacctgtgaagcggggcagggaattcctgagggcacctgtcacgccgcccaggagtcaggaccaggggaggaagtaccacatagcaaagcagaaaggtataaaccttccgaggagttcctgaacgcctgccgggccctcagtcaacaccttccagaaaccggcacgaccaccgatcagctattgagacaaagcttaaatacgataagtcaggagtggttccgggtcagtagtcggaaatcatcatctccagcagttgtggcatcatacctccatgaagtgcagccacactcacctcacttcctcaaattgctggtcaatctggcggaccacaacggcaataccgcacttcactattccgtttcgcacagtaacttcagcatcgtcaagcttctgttggagaccggtgtgtgcaatgtggatcaccagaataaagccggttataccgcagttatgattaccccactggctagtgcagaaaccaacgaggacatggctgtggtgtggaagctcttaagggaaggtaatgtaaacatacaggcgacgcagggcgggcagacagccctgatgctgggcgtatcacacgaccgggaagatatggttcaggcactcttaagttgtcaggcagatgtaaatttgcaggaccatgacggtagcagcgccctgatggtggcttgccatcatggtaatgttgatctcgttcgcctcctcctggctcatcctgcctgtgatagctctctgacagataaggccggcagaacggcactctctatagccttaaaatcgcccactcacatggagatagccggactgctgcgggcccatgcggagcagggaaggagtttgggtctctag

SEQ ID NO: 337238 - DNA, 402 bp, Artificial Sequence
  derived and/or modified sequence
atgattacccctctcgcctcggccgaaacaaacgaggatatggcagtggtttggaagctgcttcgcgaaggaaacgtgaatatccaggccactcagggtggccagacagcgctaatgctcggggtgagtcacgatagggaggacatggtgcaggccctgctaagttgccaggccgacgtcaacctgcaggatcacgatggtagctctgcccttatggttgcttgtcaccacgggaacgtcgacctggtgcgcttgctgctggctcacccagcatgtgactccagccttacggacaaggccggacgtacagccttgagtattgcacttaagagtcccactcatatggaaattgccggtttgttgagagcccacgccgaacagggcagatccctgggcctctag

SEQ ID NO: 337239 - DNA, 1104 bp, Artificial Sequence
  derived and/or modified sequence
atggaaaaaacagacgaaatctccccgagcacctcactgaagagcatcatgaaaaaaaaggattacggttttcgcgcaggtgggaatggtaccaagaaaaaccttcaattcgtaggcgttaatggaggatatgagaccaccagtagtgaggagacatctggcgaggattccaccccagaggatctttcagattctgaggccgagaaaaagtgcgacgggcctgaccacaaacacgtaaaggacgcgcatctgacttgcgaggctggtcagggtattccggagggcacatgccatgccgctcaggaaagcggccctggtgaggaagtgccccacagcaaggccgagcggtacaagccctccgaagagtttctcaatgcttgcagagctctctctcaacacctgccagagacagggactacaacggaccaactgttgagacaaagcctgaacacaattagtcaagagtggttcagagtttccagcagaaaaagttcctccccagccgtggtcgcctcttatctgcacgaagtacaaccccattccccccatttcctcaaactgttagtgaacctggcagaccacaatggaaatactgccttacactatagcgtttcacactccaacttctccattgtcaagcttctgctggagaccggagtatgtaacgtggaccaccagaacaaggcgggatacactgccgttatgatcactccgctcgcatccgctgagaccaatgaggacatggccgtcgtgtggaaacttctcagggagggcaacgtgaacattcaggcgacccaagggggacaaacagcccttatgctgggcgtttctcacgaccgcgaagatatggttcaggccctgctgagctgccaagccgacgtgaaccttcaggatcacgacggaagttctgctctgatggtggcttgccatcacggcaacgtggatctagtcaggcttctgctggcccacccagcctgcgattcttcactcaccgacaaagctggtcgaaccgcactatctatagctctgaaatctcccacacacatggagattgctggtctcctgagggcccacgccgaacagggtagatctctagggctgtag

SEQ ID NO: 337240 - DNA, 1056 bp, Artificial Sequence
  derived and/or modified sequence
atgaagaaaaaagactacggatttagagctgggggaaacgggaccaagaaaaacctgcagtttgtaggagtcaacggaggctatgagacgacttctagtgaagagacgtcaggggaggacagcacacctgaagatctttcagactcagaagcagagaaaaaatgtgatggcccagatcataaacacgtgaaagatgctcaccttacgtgtgaagctgggcaaggcatccctgaaggaacatgccatgctgcccaggaatcaggtcctggagaggaagtgcctcactcaaaggccgagagatacaagccaagcgaagagtttttgaacgcctgcagggcactctctcagcacctgcctgagaccggaactaccacagaccagttgctgaggcagtcgttaaatactatctcccaagagtggtttcgcgtgagtagtcgcaagagcagctcccccgctgtagtcgcctcataccttcacgaggtgcagccccactctccacattttctgaaactgttggtcaatttagcagatcacaatggcaacacggccctgcactattcagtgtcccactccaatttctcgatcgtcaagctgttgctcgaaaccggagtttgtaatgtcgatcatcagaataaggcaggatataccgccgtcatgataacccccttggcctcagcagaaacaaacgaagacatggcggtggtctggaaactactccgggaaggcaatgtcaatattcaggcgacccagggaggccaaaccgccctgatgctcggagtctctcatgatcgagaggacatggtgcaggcactgttgtcttgccaggccgatgtgaacttgcaagatcatgacgggtcatctgcactgatggtggcctgccaccacggaaacgtcgatttagttagactcctattagcccacccagcttgtgattctagccttactgataaggcaggtcgaactgcactgagtattgctctaaagtcgccaacccatatggagattgccggactccttagggcccacgcagaacaggggaggtcactagggctgtag

SEQ ID NO: 337241 - protein, 1435 aa, Artificial Sequence
  derived and/or modified sequence
MLKSNDCLFSLENLFFEKPDEVENHPDNEKSLDWFLPPAPLISEIPDTQELEEELESHKLLGQEKRPKMLTSNLKITNEDTNYISLTQKFQFAFPSDKYEQDDLNLEGVGNNDLSHIAGKLTYASQKYKNHIGTEIAPEKSVPDDTKLVNFAEDKGESTSVFRKRLFKISDNIHGSAYSNDNELDSHIGSVKIVQTEMNKGKSRNYSNSKQKFQYSANVFTANNAFSASEIGEGMFKAPSFSVAFQPHDIQEVTENGLGSLKAVTEIPAKFRSIFKEFPYFNYIQSKAFDDLLYTDRNFVICAPTGSGKTVVFELAITRLLMEVPLPWLNIKIVYMAPIKALCSQRFDDWKEKFGPIGLNCKELTGDTVMDDLFEIQHAHIIMTTPEKWDSMTRKWRDNSLVQLVRLFLIDEVHIVKDENRGPTLEVVVSRMKTVQSVSQTLKNTSTAIPMRFVAVSATIPNAEDIAEWLSDGERPAVCLKMDESHRPVKLQKVVLGFPCSSNQTEFKFDLTLNYKIASVIQMYSDQKPTLVFCATRKGVQQAASVLVKDAKFIMTVEQKQRLQKYAYSVRDSKLRDILKDGAAYHHAGMELSDRKVVEGAFTVGDLPVLFTTSTLAMGVNLPAHLVVIKSTMHYAGGLFEEYSETDILQMIGRAGRPQFDTTATAVIMTRLSTRDKYIQMLACRDTVESSLHRHLIEHLNAEIVLHTITDVNIAVEWIRSTLLYIRALKNPSHYGFASGLNKDGIEAKLQELCLKNLNDLSSLDLIKMDEGVNFKPTEAGRLMAWYYITFETVKKFYTISGKETLSDLVTLIAGCKEFLDIQLRINEKKTLNTLNKDPNRITIRFPMEGRIKTREMKVNCLIQAQLGCIPIQDFALTQDTAKIFRHGSRITRWLSDFVAAQEKKFAVLLNSLILAKCFRCKLWENSLHVSKQLEKIGITLSNAIVNAGLTSFKKIEETDARELELILNRHPPFGTQIKETVMYLPKYELKVEQITRYSDTTAEILVTVILRNFEQLQTKRTASDSHYVTLIIGDADNQVVYLHKITDSVLLKAGSWAKKIAVKRALKSEDLSINLISSEFVGLDIQQKLTVFYLEPKRFGNQITMQRKSETQISHSKHSDISTIAGPNKGTTASKKPGNRECNHLCKSKHTCGHDCCKIGVAQKSEIKESTISSYLSDLRNRNAVSSVPPVKRLKIQMNKSQSVDLKEFGFTPKPSLPSISRSEYLNISELPIMEQWDQPEIYGKVRQEPSEYQDKEVLNVNFELGNEVWDDFDDENLEVTSFSTDTEKTKISGFGNTLSSSTRGSKLPLQESKSKFQREMSNSFVSSHEMSDISLSNSAMPKFSASSMTKLPQQAGNAVIVHFQERKPQNLSPEIEKQCFTFSEKNPNSSNYKKVDFFIRNSECKKEVDFSMYHPDDEADEMKSLLGIFDGIF

SEQ ID NO: 337242 - DNA, 4308 bp, Artificial Sequence
  derived and/or modified sequence
atgctgaagagcaacgactgcctgttcagcctggagaacctgttcttcgagaagcccgacgaggtggagaaccaccccgacaacgagaagagcctggactggttcctgccccccgcccccctgatcagcgagatccccgacacccaggagctggaggaggagctggagagccacaagctgctgggccaggagaagagacccaagatgctgaccagcaacctgaagatcaccaacgaggacaccaactacatcagcctgacccagaagttccagttcgccttccccagcgacaagtacgagcaggacgacctgaacctggagggcgtgggcaacaacgacctgagccacatcgccggcaagctgacctacgccagccagaagtacaagaaccacatcggcaccgagatcgcccccgagaagagcgtgcccgacgacaccaagctggtgaacttcgccgaggacaagggcgagagcaccagcgtgttcagaaagagactgttcaagatcagcgacaacatccacggcagcgcctacagcaacgacaacgagctggacagccacatcggcagcgtgaagatcgtgcagaccgagatgaacaagggcaagagcagaaactacagcaacagcaagcagaagttccagtacagcgccaacgtgttcaccgccaacaacgccttcagcgccagcgagatcggcgagggcatgttcaaggcccccagcttcagcgtggccttccagccccacgacatccaggaggtgaccgagaacggcctgggcagcctgaaggccgtgaccgagatccccgccaagttcagaagcatcttcaaggagttcccctacttcaactacatccagagcaaggccttcgacgacctgctgtacaccgacagaaacttcgtgatctgcgcccccaccggcagcggcaagaccgtggtgttcgagctggccatcaccagactgctgatggaggtgcccctgccctggctgaacatcaagatcgtgtacatggcccccatcaaggccctgtgcagccagagattcgacgactggaaggagaagttcggccccatcggcctgaactgcaaggagctgaccggcgacaccgtgatggacgacctgttcgagatccagcacgcccacatcatcatgaccacccccgagaagtgggacagcatgaccagaaagtggagagacaacagcctggtgcagctggtgagactgttcctgatcgacgaggtgcacatcgtgaaggacgagaacagaggccccaccctggaggtggtggtgagcagaatgaagaccgtgcagagcgtgagccagaccctgaagaacaccagcaccgccatccccatgagattcgtggccgtgagcgccaccatccccaacgccgaggacatcgccgagtggctgagcgacggcgagagacccgccgtgtgcctgaagatggacgagagccacagacccgtgaagctgcagaaggtggtgctgggcttcccctgcagcagcaaccagaccgagttcaagttcgacctgaccctgaactacaagatcgccagcgtgatccagatgtacagcgaccagaagcccaccctggtgttctgcgccaccagaaagggcgtgcagcaggccgccagcgtgctggtgaaggacgccaagttcatcatgaccgtggagcagaagcagagactgcagaagtacgcctacagcgtgagagacagcaagctgagagacatcctgaaggacggcgccgcctaccaccacgccggcatggagctgagcgacagaaaggtggtggagggcgccttcaccgtgggcgacctgcccgtgctgttcaccaccagcaccctggccatgggcgtgaacctgcccgcccacctggtggtgatcaagagcaccatgcactacgccggcggcctgttcgaggagtacagcgagaccgacatcctgcagatgatcggcagagccggcagaccccagttcgacaccaccgccaccgccgtgatcatgaccagactgagcaccagagacaagtacatccagatgctggcctgcagagacaccgtggagagcagcctgcacagacacctgatcgagcacctgaacgccgagatcgtgctgcacaccatcaccgacgtgaacatcgccgtggagtggatcagaagcaccctgctgtacatcagagccctgaagaaccccagccactacggcttcgccagcggcctgaacaaggacggcatcgaggccaagctgcaggagctgtgcctgaagaacctgaacgacctgagcagcctggacctgatcaagatggacgagggcgtgaacttcaagcccaccgaggccggcagactgatggcctggtactacatcaccttcgagaccgtgaagaagttctacaccatcagcggcaaggagaccctgagcgacctggtgaccctgatcgccggctgcaaggagttcctggacatccagctgagaatcaacgagaagaagaccctgaacaccctgaacaaggaccccaacagaatcaccatcagattccccatggagggcagaatcaagaccagagagatgaaggtgaactgcctgatccaggcccagctgggctgcatccccatccaggacttcgccctgacccaggacaccgccaagatcttcagacacggcagcagaatcaccagatggctgagcgacttcgtggccgcccaggagaagaagttcgccgtgctgctgaacagcctgatcctggccaagtgcttcagatgcaagctgtgggagaacagcctgcacgtgagcaagcagctggagaagatcggcatcaccctgagcaacgccatcgtgaacgccggcctgaccagcttcaagaagatcgaggagaccgacgccagagagctggagctgatcctgaacagacacccccccttcggcacccagatcaaggagaccgtgatgtacctgcccaagtacgagctgaaggtggagcagatcaccagatacagcgacaccaccgccgagatcctggtgaccgtgatcctgagaaacttcgagcagctgcagaccaagagaaccgccagcgacagccactacgtgaccctgatcatcggcgacgccgacaaccaggtggtgtacctgcacaagatcaccgacagcgtgctgctgaaggccggcagctgggccaagaagatcgccgtgaagagagccctgaagagcgaggacctgagcatcaacctgatcagcagcgagttcgtgggcctggacatccagcagaagctgaccgtgttctacctggagcccaagagattcggcaaccagatcaccatgcagagaaagagcgagacccagatcagccacagcaagcacagcgacatcagcaccatcgccggccccaacaagggcaccaccgccagcaagaagcccggcaacagagagtgcaaccacctgtgcaagagcaagcacacctgcggccacgactgctgcaagatcggcgtggcccagaagagcgagatcaaggagagcaccatcagcagctacctgagcgacctgagaaacagaaacgccgtgagcagcgtgccccccgtgaagagactgaagatccagatgaacaagagccagagcgtggacctgaaggagttcggcttcacccccaagcccagcctgcccagcatcagcagaagcgagtacctgaacatcagcgagctgcccatcatggagcagtgggaccagcccgagatctacggcaaggtgagacaggagcccagcgagtaccaggacaaggaggtgctgaacgtgaacttcgagctgggcaacgaggtgtgggacgacttcgacgacgagaacctggaggtgaccagcttcagcaccgacaccgagaagaccaagatcagcggcttcggcaacaccctgagcagcagcaccagaggcagcaagctgcccctgcaggagagcaagagcaagttccagagagagatgagcaacagcttcgtgagcagccacgagatgagcgacatcagcctgagcaacagcgccatgcccaagttcagcgccagcagcatgaccaagctgccccagcaggccggcaacgccgtgatcgtgcacttccaggagagaaagccccagaacctgagccccgagatcgagaagcagtgcttcaccttcagcgagaagaaccccaacagcagcaactacaagaaggtggacttcttcatcagaaacagcgagtgcaagaaggaggtggacttcagcatgtaccaccccgacgacgaggccgacgagatgaagagcctgctgggcatcttcgacggcatcttctag

SEQ ID NO: 337243 - DNA, 4308 bp, Artificial Sequence
  derived and/or modified sequence
atgctgaagtcaaacgattgcctattcagtctggagaacttattcttcgagaagccggatgaagttgagaatcacccagacaacgagaaatcactcgattggtttctacctccagcccctctcattagcgaaatccctgacacacaggagctcgaagaagaacttgagtcccacaaactcctcggccaggaaaagcgacctaagatgctcaccagcaatctaaaaatcactaacgaggacactaattacatctccctaacacagaagtttcagttcgcttttccttctgataaatatgagcaggatgacctgaatctggaaggagtgggtaacaatgatctcagccacatcgcaggtaagttgacatacgcatcacaaaaatataagaaccatatcggaaccgagattgcccctgagaagtccgtacccgacgatactaagttggtcaatttcgccgaggacaagggagagagcacctctgtattccggaagcggctttttaagatctctgataatattcacgggtccgcctactccaatgacaacgagcttgattctcacattggaagcgtgaaaattgtacagaccgagatgaacaagggaaaaagtcgcaactactcaaactctaagcagaaatttcagtacagcgctaatgtatttactgccaataacgctttttcagcgtcagagatcggggaaggtatgttcaaggctccatcattttcagttgcatttcagccacacgatatccaggaggttactgaaaacggactgggctccctaaaggccgtgacagagatccccgctaaatttagaagcatttttaaggaattcccttactttaactacattcagtcaaaagctttcgatgatctgctgtacacagatcgcaactttgtgatttgtgcccccacaggctcgggaaaaacggtggtcttcgagttggctataactcggttgctgatggaagtcccgctgccatggctcaacattaagatcgtttatatggcaccaatcaaagcgctgtgctctcagcgcttcgacgactggaaggaaaaatttgggcctattggtctaaattgtaaggagttgaccggcgatacggtcatggatgatttattcgagatacaacacgcacacatcatcatgactacccctgagaagtgggactcgatgacgcggaaatggagggacaacagcctagtgcagctcgtcaggctgtttttgatcgatgaggtgcatattgtgaaggatgagaaccggggccctacactagaggtcgtcgtgtctcggatgaagacggtccaatccgtgagtcagactctcaagaacacctcaacagctatcccgatgcgattcgtcgctgtgagtgcgactattcccaatgcagaggatatcgccgagtggctaagtgatggggagaggccagcagtgtgcctcaaaatggatgagtctcaccggccagttaagctgcagaaggtggtgctggggtttccctgctcttccaatcaaaccgaatttaaattcgatctgactctaaattacaagatcgccagcgtgatacagatgtattcagaccagaagcctactctggtcttttgtgctacccgtaagggagtccagcaagccgcttctgtgttagtgaaagacgcaaagttcattatgaccgtggagcagaaacagcgcctccagaagtatgcttactccgttcgagatagtaagctcagagacatcctcaaagacggggccgcctaccaccatgccggtatggaactgtctgacagaaaggtagtcgagggggcttttactgtgggggatctgccggtattgttcactacgtccacactggctatgggtgtgaacctgccagcgcacctggtggtcatcaaatctactatgcattatgctggcggcctgttcgaagagtacagcgaaactgatatcctccagatgattgggcgagcaggccggccccagtttgatactactgctacagcagtgattatgacaaggctctccacacgagacaagtatatacagatgctggcatgtcgagacacggtggagtcttctctacataggcaccttatcgagcatctgaatgctgaaattgttctgcacacaatcacggacgtcaacatcgcggtggagtggatccggagtacattactctacattcgcgcacttaagaatccctcccactatggcttcgcatcagggttgaataaggatgggatcgaggccaagctccaggaactgtgcttgaagaatctgaatgatctcagcagcctggaccttatcaagatggacgagggtgtcaactttaagcccacagaggcaggcagattaatggcttggtactatattaccttcgagactgtcaaaaagttttacaccattagcggtaaggagactctctccgatcttgtaaccttgattgcagggtgtaaagagttcctcgatatccagttacggattaacgaaaagaagacgttgaacacattgaacaaagatcccaatcgcatcacaatacgcttccctatggagggacgaattaagaccagagagatgaaagtgaattgcctgattcaagcccaacttggatgcatccctatccaagactttgccctgactcaggacactgcaaaaatctttcgacacggctcacggataacaaggtggcttagtgatttcgtcgccgcacaggagaaaaaatttgctgtgctgctcaacagtttgattctggcgaagtgcttcagatgtaagctgtgggagaattcactacatgtgtcaaagcaactcgaaaagattggaattaccttatctaacgcaattgtgaatgcaggcctgaccagtttcaagaagattgaagagactgatgcccgagagcttgagcttatcctgaaccgacaccccccttttggcactcaaattaaagagaccgtcatgtacctgcctaaatacgaattaaaggtcgaacagataacacggtattcagacacgacagcggaaatcctggtgaccgtcattttgagaaactttgagcagttacagacaaaacgcacagcatcagattcccactatgtgaccctgatcataggggatgcagacaatcaggtcgtttatcttcataagattacagactctgtcttgcttaaggccggtagctgggcaaaaaagatcgctgtcaagagggcactcaagtcagaggacctttctatcaaccttatctccagcgagtttgtaggcctagacatccaacagaagctgacagtcttctacctcgaaccaaagcgtttcgggaatcagattaccatgcaaagaaagtcagagacacagatttctcatagcaaacactctgatataagcacgattgcaggcccaaacaaagggaccacggcctctaagaaaccaggcaaccgcgaatgcaatcacctgtgtaagtctaagcatacttgtgggcatgactgttgtaagattggagttgctcagaagtctgagatcaaagagagcaccatctcttcctacctcagcgacttacgcaacagaaatgccgttagctctgttccgcccgtcaagcgactgaagattcaaatgaataagtctcagagcgtggacctgaaagagtttggcttcacacccaagccctcactgccatctatctcccggtccgagtatttaaacattagcgagcttccgattatggaacagtgggaccagcctgaaatctatggaaaggtgcgtcaggaaccctccgagtaccaggacaaagaggtgctcaatgtgaactttgagctcggtaatgaggtctgggatgacttcgacgatgagaatttagaagtcacatcttttagcaccgacaccgaaaagaccaagatcagtggctttggcaataccttatcctcctctacccgcggcagcaaattacctctgcaggagtctaagtccaagtttcagcgggagatgtcgaactccttcgtgtcaagtcacgagatgtccgatatatccctcagtaactccgcaatgccaaaattctctgcttccagcatgacaaaactgcctcaacaagcggggaacgcagtgattgtgcattttcaagagcggaagccgcagaatttgagtcccgaaattgaaaagcagtgtttcaccttcagcgaaaagaaccccaactcaagcaattacaaaaaagtggactttttcattaggaattccgagtgcaaaaaagaggtggacttctctatgtaccaccctgatgatgaggccgatgagatgaagagcctattagggatcttcgatggcattttctag

SEQ ID NO: 337244 - DNA, 4308 bp, Artificial Sequence
  derived and/or modified sequence
atgctgaagagcaatgactgcctcttcagcctggagaacctcttctttgagaagccagatgaggtggagaaccacccagacaatgagaagagcctggactggttcctgcccccagcccccctcatcagcgagatcccagacacccaggagctggaggaggagctggagagccacaagctgctgggccaggagaagaggcccaagatgctgaccagcaacctgaagatcaccaatgaagacaccaactacatcagcctgacccagaagttccagtttgccttccccagcgacaagtatgagcaggatgacctgaacctggagggcgtgggcaacaatgacctgagccacatcgccggcaagctgacctacgccagccagaagtacaagaaccacatcggcacagagatcgcccctgagaagtctgtgcctgatgacaccaagctggtgaactttgctgaagataaaggagagagcaccagcgtcttcaggaagaggctcttcaagatcagtgacaacatccacggcagcgcctacagcaatgacaatgagctggacagccacatcggctctgtgaagatcgtgcagacagagatgaacaagggcaagagcaggaactacagcaacagcaagcagaagttccagtacagcgccaacgtgttcaccgccaacaatgccttcagcgccagcgagattggagagggcatgttcaaggcccccagcttctctgtggccttccagccccatgacatccaggaggtgacagaaaatggcctgggcagcctgaaggctgtgacagagatcccagccaagttccgcagcatcttcaaggagttcccctacttcaactacatccagagcaaggcctttgatgacctgctgtacacagacaggaactttgtgatctgtgcccccactggaagtggcaagacagtggtgtttgagctggccatcacccggctgctgatggaggtgcccctgccctggctgaacatcaagatcgtgtacatggcccccatcaaggccctgtgcagccagagatttgatgactggaaggagaagtttggccccatcggcctgaactgcaaggagctgactggagacacagtgatggatgacctgtttgagatccagcacgcccacatcatcatgaccaccccagagaagtgggacagcatgaccaggaagtggagggacaacagcctggtgcagctggtgcggctcttcctgattgatgaggtgcacatcgtgaaggatgaaaatagaggccccaccctggaggtggtggtgtccaggatgaagacagtgcagagcgtgtcccagaccctgaagaacaccagcacagccatccccatgagatttgtggccgtgtctgccaccatccccaatgctgaggacattgctgagtggctgagtgatggagagaggcctgctgtgtgcctgaagatggatgagagccacaggcctgtgaagctgcagaaggtggtgctgggcttcccctgcagcagcaaccagacagagttcaagtttgacctgaccctgaactacaagatcgccagcgtcatccagatgtacagcgaccagaagcccaccctggtgttctgtgccaccaggaagggcgtgcagcaggccgcctctgtgctggtgaaggatgccaagttcatcatgacagtggagcagaagcagaggctgcagaagtatgcctacagcgtgcgggacagcaagctgcgggacatcctgaaggatggagctgcctaccaccacgccggcatggagctgagtgacaggaaggtggtggagggcgccttcaccgtgggggacctgcctgtgctcttcaccaccagcaccctggccatgggcgtgaacctgcctgcccacctggtggtgatcaagagcaccatgcactacgccggcggcctgtttgaggagtacagcgagacagacatcctgcagatgattggccgggccggccggccccagtttgacaccacagccacagctgtgatcatgacccggctgagcacccgggacaagtacatccagatgctggcctgccgggacacagtggagagcagcctgcaccgccacctgattgagcacctgaatgctgagatcgtgctgcacaccatcacagatgtgaacattgctgtggagtggatccgcagcaccctgctgtacatccgggccctgaagaaccccagccactacggctttgccagcggcctgaacaaggatggcatcgaggccaagctgcaggagctgtgcctgaagaacctgaatgacctgagcagcctggacctgatcaagatggatgagggcgtgaacttcaagcccacagaggccggccgcctgatggcctggtactacatcacctttgaaacagtgaagaagttctacaccatcagcggcaaggagaccctgagtgacctggtgaccctgattgctggctgcaaggagttcctggacatccagctgcgcatcaatgagaagaagaccctgaacaccctgaacaaggaccccaaccgcatcaccatccgcttccccatggagggccgcatcaagacccgggagatgaaggtgaactgcctgatccaggcccagctgggctgcatccccatccaggactttgccctgacccaggacacagccaagatcttcagacatggcagccgcatcacccgctggctgagtgactttgtggccgcccaggagaagaagtttgctgtgctgctgaacagcctcatcctggccaagtgcttccgctgcaagctgtgggagaacagcctgcacgtgtccaagcagctggagaagattggcatcaccctgagcaatgccatcgtgaatgccggcctgaccagcttcaagaagattgaggagacagatgcccgggagctggagctgatcctgaacagacacccccccttcggcacccagatcaaggagaccgtgatgtacctgcccaagtatgagctgaaggtggagcagatcacccgctacagcgacaccacagctgagatcctggtgaccgtcatcctgaggaactttgagcagctgcagaccaagaggacagccagtgacagccactacgtgaccctcatcattggagatgctgacaaccaggtggtgtacctgcacaagatcacagattctgtgctgctgaaggccggctcctgggccaagaagattgctgtgaagagggccctgaagtctgaggacctgagcatcaacctgatcagcagcgagtttgtgggcctggacatccagcagaagctgactgtgttctacctggagcccaagcgcttcggcaaccagatcaccatgcagaggaagtctgagacccagatcagccacagcaagcacagcgacatcagcaccatcgccggccccaacaagggcaccacagccagcaagaagccaggcaaccgggagtgcaaccacctgtgcaagagcaagcacacctgtggccatgactgctgcaagattggagtggcccagaagtctgagatcaaggagagcaccatcagcagctacctgagtgacctgaggaacagaaatgctgtgtcctctgtgccccctgtgaagaggctgaagatccagatgaacaagagccagagcgtggacctgaaggagtttggcttcacccccaagcccagcctgcccagcatcagccgctctgagtacctgaacatcagcgagctgcccatcatggagcagtgggaccagcctgagatctacggcaaggtgcggcaggagcccagcgagtaccaggacaaggaggtgctgaatgtgaactttgagctgggcaatgaggtgtgggatgactttgatgatgagaacctggaggtgaccagcttcagcacagacacagagaagaccaagatcagcggcttcggcaacaccctgagcagcagcacccggggcagcaagctgcccctgcaggagagcaagagcaagttccagcgggagatgagcaacagctttgtgagcagccatgagatgtctgacatcagcctgagcaacagcgccatgcccaagttcagcgccagctccatgaccaagctgccccagcaggccggaaatgctgtgattgtgcacttccaggagaggaagccccagaacctgagccctgagattgagaagcagtgcttcaccttcagcgagaagaaccccaacagcagcaactacaagaaggtggacttcttcatccggaacagcgagtgcaagaaggaggtggacttctccatgtaccacccagatgatgaagcagatgagatgaagagcctgctgggcatctttgatggcatcttctag

SEQ ID NO: 337245 - DNA, 4931 bp, Artificial Sequence
  derived and/or modified sequence
agccaggcttggcggtcctcagaggggctgataaatcggcgctcgactggcctaggagctgtccgcagggagatttatgacaaagtccagttttcaacaatgctgaaatcaaatgattgcctgttttctttggaaaatttgttttttgaaaaaccagatgaagttgaaaaccatccagacaatgaaaagtcattggattggtttctccctcctgctccattgatttcagaaattccagatactcaggagttagaggaagaattagaaagtcataaactgttaggtcaggaaaagaggccaaaaatgttaacatcaaatttaaagataactaatgaagatacaaattatatttcactaacacaaaaattccagtttgcctttccttctgataaatatgaacaggatgatctaaatttagaaggggtaggtaataatgacttatcacatattgctggcaagctgacatatgcttctcagaaatataaaaatcacattggcactgagatagcacctgagaagagtgttcctgatgatacaaaattagttaattttgcagaagataaaggagagagcacatcagtattccggaaaagattatttaaaatatctgacaatatacatgggagtgcttattctaatgacaatgaattggactctcacattggctcagtgaaaattgtacaaacagaaatgaacaaagggaaatcaaggaactatagcaatagtaagcaaaaatttcagtattctgcaaatgtgtttacagcaaataatgctttttctgcttctgaaatcggagaaggcatgttcaaagcaccatctttttcagttgctttccaacctcatgatattcaagaggtaacagaaaatggtttaggttccttgaaggctgtcacagaaattccggcaaaatttagaagtattttcaaagaatttccatatttcaactatatacagtccaaggcctttgatgatcttctttacacagataggaattttgtgatttgtgctccaactggttctggaaaaactgtagtgtttgaactagctataacaagattgttaatggaagtaccattgccatggttgaatattaaaattgtttacatggcaccaataaaagccttgtgcagtcagcgttttgatgactggaaagaaaaatttggaccaataggattgaattgtaaagaacttactggagatacagtaatggatgatctatttgagattcagcatgcccatattattatgacaactccagaaaaatgggatagcatgactaggaaatggagagacaactctttggttcagctggttcgactgtttctcattgatgaggtacatattgtaaaagatgaaaatcgtggtccaactcttgaagttgtagttagcagaatgaaaactgtacagtctgtttctcagactttaaaaaataccagcactgctattccaatgcgatttgtagctgtatctgcaacaattccaaatgctgaggatattgcagaatggctttcagatggtgaaagaccagctgtgtgtctgaaaatggatgagagccatagaccagtgaaacttcagaaagtggtccttggatttccctgcagtagtaaccaaactgagtttaagtttgatttaaccctcaactacaaaattgccagtgttatacaaatgtactctgatcagaaacccacacttgtgttttgtgcaacaaggaagggtgtgcaacaggctgcttctgttcttgtgaaagatgctaaatttattatgactgtggaacagaaacagaggttacagaagtatgcatattccgtaagagattcaaaactgagagatatcttaaaagatggtgctgcttatcatcatgctggtatggagctgtcagatagaaaagtagttgagggagcttttactgttggagatttaccagttctttttactaccagtactttagctatgggagtaaatttgcctgctcacctagtagttataaaatctacaatgcattatgctggaggactgtttgaagagtacagtgaaacagatattctacagatgattggtagagctggtcgacctcaatttgacactacagctactgcagttatcatgactcgattaagcacaagggacaagtacattcagatgttagcttgtagagacactgtagaaagcagtttgcacagacatcttattgaacatttaaatgcagagatagtactgcataccatcacggatgtgaatattgctgtggaatggatacgatcaactctgctttatatcagagccttgaaaaatccatctcattatggttttgcatctggattgaacaaagatggaattgaagcaaaattacaagaattatgtttgaagaatctgaatgatttatcatccctggacttaataaagatggatgaaggtgttaatttcaaaccaactgaagcaggaagattgatggcttggtattatattacatttgagacagtgaagaaattttatacaatcagtggaaaagaaaccttatcagatctggttacattgatagctggctgcaaggaatttctagatatacagttaaggataaatgaaaagaaaacactgaatactttgaacaaagatccaaatcggataactatcagatttccaatggaaggaagaattaaaacaagagaaatgaaagtaaattgtcttattcaggctcaactaggatgcattcccatacaagattttgctttgacacaagataccgcaaagattttcagacatggctcccgaattacaagatggttgtcagattttgtagctgctcaagaaaagaagtttgctgtactattgaatagtttgattttagctaaatgttttaggtgtaaactttgggaaaactctctgcatgtatccaaacaactggaaaaaattggtataacattgtcaaatgcaatcgtaaatgctggtttgacttcctttaaaaaaatagaagagacagatgcaagggaacttgaattgattttaaacagacatcccccctttggaacccagataaaagaaactgtgatgtatctaccaaaatatgaacttaaagtggaacagattacaagatatagtgatacgacggcagaaatattagtgactgttatattaagaaattttgaacagctacaaactaaaagaacagcatcggattctcactatgttaccttaatcataggtgacgcagataatcaagtagtttatctgcacaagattacggattctgttttgctaaaagctggaagttgggctaaaaagattgctgtgaaaagagctcttaaatctgaagatcttagcataaatctaataagttctgaatttgttgggcttgatattcagcagaaacttacagtcttttacttagaacccaagaggtttggaaatcaaatcactatgcaaagaaaatctgaaacacagatttcccattctaaacattcagacatatctacaatagcaggacctaataaaggaacgactgccagcaaaaaacctgggaaccgagaatgcaatcatctttgtaaaagtaaacatacatgtggacatgactgctgtaaaattggagttgcacagaagtcagaaattaaagagtcaacaatttcttcatatttatctgatttaagaaacaggaatgctgtttcatctgttcctccagttaaacgtctgaagatacagatgaataaatctcaaagtgtggaccttaaagagtttggttttactccaaaaccttcccttcctagtatatcaaggtcagaatatttaaacatatctgaattgcctataatggagcagtgggatcagcctgaaatctatggaaaagttagacaagaaccatctgaatatcaagacaaagaagttttgaatgtgaactttgaattgggaaatgaagtttgggatgattttgatgatgaaaacttagaagttactagcttttcaactgatactgagaagacaaaaatatcaggatttggaaacactttgagttcaagtaccaggggaagtaagctaccccttcaagagtcaaagagcaaattccaaagagaaatgtcaaacagttttgtttcatcacatgagatgtcggatatttctttatcaaattctgctatgcccaagttcagtgcatcctccatgacaaaattacctcaacaagccggaaatgcagttattgtccattttcaagaaagaaaaccacaaaatctgtcaccagagattgagaagcaatgctttactttctctgaaaaaaacccaaattcttcaaattataaaaaagtggatttttttattagaaacagtgaatgtaaaaaggaagttgatttcagtatgtatcatcctgatgatgaagctgatgaaatgaagtctttattgggaatatttgatggtattttctaaaacaaacaaatactttttatattgataagagaaagaataaagacacctaatcacaaagcatgctttttatttttaaaaagtagttcataattgttcggatttttttctcctgtatttgattagctttgttcactttttgcaacaaaatgtatgggccgatttattttcccattatattgtaacttcttgaaaagctcttttacagtggctttgtttcaataagcccttaagttaagggctgattgcacttagaaataagttgcacttagaaataattatttggctattaattggattttgacaagaaccaatgtaaaatttcatttttatattttcttaacaagaagaaaaatattctatgaaagcaaagtaatgctaacttaatgaatctgcttattgtatggattaatcactaatattattcccatgtattttgttttactaaagatttttaagaatccagtggctatttgaacctactgttatctaactttgagcaacaataaatgaaacattaatcagta

SEQ ID NO: 337246 - DNA, 4308 bp, Artificial Sequence
  derived and/or modified sequence
atgctgaagagcaacgactgcctgttcagcctggagaacctgttcttcgaaaagcccgacgaggtggaaaatcacccagataacgagaagtccctggattggtttctcccaccagcgccgctcataagtgagatccccgacacacaagaattggaggaagagctggaatcacacaagctgcttggccaggaaaaaagacctaagatgctgacttcgaacttgaaaataacaaatgaagacactaactacatttccctcacccaaaagtttcaattcgcgtttccctccgataaatatgagcaagacgatctgaacctggagggtgtgggaaacaacgatctctcccatattgctggtaagcttacctacgcctcccagaagtataagaaccacataggaaccgaaatcgcaccagaaaagagtgtgcctgacgacacaaaactggtgaattttgcagaggacaagggagaatcaacaagcgtgtttcggaagagactgttcaagattagtgacaatattcatggaagtgcatattccaatgacaacgagttagattcccatattggaagtgtaaagatcgtccagacggaaatgaataaggggaaatcccggaattacagcaattctaaacagaagtttcagtactctgccaatgtgtttacagccaacaatgcattcagcgcctcggagattggcgaggggatgttcaaggcgccttctttttccgtggcctttcagccacacgatattcaggaggtcacagagaacggtttaggtagtctgaaagctgttactgaaattcctgcaaaattcagatccatcttcaaagagtttccatatttcaactacattcagtcaaaagcatttgacgatttattgtataccgaccgtaactttgtgatctgcgcccctacagggtctgggaagacagtggttttcgagttggcgattacgagattactaatggaagtgccactgccttggcttaatatcaaaatcgtctacatggcaccgattaaggcattgtgttcccagcgatttgacgattggaaggagaagttcggtcccataggtctcaactgtaaggaactcacaggtgatacagtcatggatgatctcttcgagattcagcacgcacatataattatgaccacacctgagaagtgggatagcatgacacgtaaatggcgcgacaattcactggtgcagctggtaagactttttctgatcgacgaagtgcacatagtcaaggatgaaaatcgaggccccacgctggaggtggtggtgagcagaatgaagactgtgcagtccgtatcccagaccctcaaaaatactagcaccgctatacctatgcgcttcgttgcagtctctgccaccataccaaacgctgaggatatcgccgaatggctgagcgatggcgagcgaccagccgtttgtctcaagatggacgagtcacacaggcccgtcaagttacagaaggtcgtgctgggatttccgtgttcctccaatcagactgaatttaaatttgacctgactcttaattacaaaattgccagtgttattcagatgtacagcgaccagaaaccaaccctggtattctgtgctacacgcaaaggagtacagcaggccgctagcgtgcttgtgaaagacgccaaattcataatgacagtggagcagaaacagaggctccagaaatacgcttacagtgtgagggatagtaagctgcgtgatattttgaaggacggcgccgcttaccaccatgctgggatggagctctctgatagaaaagtggttgagggagctttcaccgtgggggacctccccgtcctcttcactacgagtacactagccatgggggtgaatctgccggcacatctagtcgtgattaagtcaactatgcactatgcgggcggactgtttgaagaatactctgaaacagacattctccagatgatcggcagggcgggacgtccacagttcgataccaccgccacggctgtgatcatgactcgcttgagtacccgcgataagtatatccagatgctagcctgtagggacacagttgagagctccttgcatcggcacctcatcgagcatcttaacgcagaaattgtactacataccatcacagatgtgaatatagctgtggagtggattcggagtaccctcctgtacattagagccctgaagaacccatcccattatggcttcgcgtccggcctgaacaaggacgggatcgaggcaaagctccaagagctctgcttgaagaatctgaatgatctgagtagtctcgacctcattaaaatggacgaaggggtgaattttaaacccaccgaagctggaaggctgatggcctggtactatatcactttcgagacagttaagaagttttacactatttccggcaaagagaccctatcagacctcgtgacccttattgctggttgcaaggaattcctagatattcagctgcgcattaacgaaaaaaagaccctaaacacactgaacaaagatcccaatcgaataacgatacggttccccatggagggccggataaagacccgggagatgaaggttaactgtctaattcaagctcaacttggctgcatcccaattcaggattttgcattgacacaggatactgctaaaatctttagacacgggagcagaataacacggtggctctccgattttgttgctgctcaagaaaaaaagttcgccgtgctgctaaattcacttatcctggccaagtgttttcggtgtaagctctgggagaatagcctgcacgtttcaaaacagcttgagaaaatcgggatcacattgagcaacgccattgtgaacgccggtctaacgagcttcaagaagattgaagagaccgatgcgcgcgagctggagttgatcctgaaccggcatccaccttttggaactcagatcaaggaaactgtaatgtacctgccaaagtacgaactcaaggtggagcaaatcactcggtactcagacaccacggccgagatcctcgtaaccgtgatactgagaaacttcgagcagcttcaaacaaagcgcacggccagcgactctcactatgtcacacttatcatcggtgatgctgacaaccaggtagtgtatctgcacaagatcaccgacagcgtgcttctgaaggcggggtcctgggcaaaaaagatcgccgtgaagcgtgctctaaagtccgaagacctctccatcaatttgattagttctgaatttgtgggacttgatattcagcagaagcttaccgtattttacctggagcccaagaggtttggaaatcaaatcacgatgcagcgaaagtcagagacccagatctcccacagcaagcactctgacatttctacaatcgctgggcccaataaggggactactgccagcaagaaaccaggcaatagggagtgcaaccatttgtgtaagtccaagcacacctgtggtcacgactgctgcaagatcggagtggcccaaaaatcagaaatcaaggagtctaccataagttcttacctctccgaccttcggaatagaaacgccgtgtcttctgtcccacctgtcaagcgcctgaaaatccagatgaataaaagtcagagtgtggatctcaaagaatttggctttactcccaaaccatctttgcccagcatctccagatctgaatacttaaatatttctgaattgccaatcatggagcaatgggaccagccggaaatctatggaaaggtacggcaggagccaagcgagtatcaggacaaggaagttctcaatgtgaacttcgagctaggtaatgaggtttgggatgacttcgacgacgaaaacttggaagttacatctttcagtacggataccgagaagacgaaaatcagcgggtttggcaataccttgagtagctccacacgcggcagcaaactgccactccaggaatcgaagtccaaattccagagggaaatgtcaaactcgtttgtatctagtcatgaaatgagtgacatctcgctcagcaacagcgctatgcccaagttttcagcctcttcaatgacgaagctgcctcagcaggccggaaacgctgtgatcgtgcacttccaggagagaaaacctcagaatttatcgccagaaattgagaaacagtgcttcacatttagcgaaaaaaacccgaattcttcgaactataagaaggtggatttcttcatcaggaactcagagtgcaagaaggaagtggacttttctatgtatcatcccgacgacgaagccgacgaaatgaaatctttgctggggatctttgacgggattttttag

SEQ ID NO: 337247 - DNA, 4308 bp, Artificial Sequence
  derived and/or modified sequence
atgctgaagtccaacgactgtctgttctccttggagaatctgttcttcgaaaaaccggacgaggtcgagaatcatccagataacgagaaatcccttgattggttcctgccccctgcaccactgatctcagaaattcctgatacccaggaattggaggaagaactggaatctcacaaactgctaggtcaggaaaaacgccctaagatgcttacctccaatctaaaaatcacaaacgaagacaccaattacatttcactgacccagaagtttcaatttgctttcccatcagacaagtatgaacaggatgacctgaacctggagggggttggtaataatgacctgtctcacatagcaggcaagttgacttatgcatctcaaaaatacaagaaccacatcgggacggaaatcgctccagaaaagtccgtccctgacgataccaagctcgtgaactttgccgaggacaagggagaatcaacttccgtcttcagaaaaaggctgtttaaaattagtgataatattcacggatcagcttactccaatgacaacgagctggacagccatatagggtcggtgaagattgtgcagaccgaaatgaataaaggtaaatcacggaactactcgaacagtaaacagaagtttcaatattccgcaaacgtctttaccgccaacaacgccttctccgcctccgagatcggggagggaatgtttaaagctcctagcttttccgttgctttccagccccatgatattcaggaggttaccgagaatggcttgggttctctcaaagccgtgaccgaaatccctgccaagtttcgcagcatctttaaggagttcccctattttaattatatccaaagtaaagcattcgacgatctattatatacagatcggaacttcgtgatatgcgctccgactgggagtggcaagacagttgtctttgaactggccattacaaggctgttgatggaggtgccactgccttggctgaacattaagatcgtgtatatggcaccgatcaaggcattgtgcagtcagaggtttgacgattggaaggagaaattcggacccattgggctcaattgtaaggagttgaccggcgatacggttatggacgacctcttcgagatacagcacgcgcacattataatgactacaccggaaaagtgggattcaatgaccagaaagtggagggacaacagcctggtgcaacttgtaaggctgtttcttatagacgaggtccacattgtgaaggatgaaaaccggggacccactctggaggtcgtcgtgtcccgaatgaaaactgtgcaaagtgtcagccagactcttaagaacacctcgacggccattcctatgcgctttgtggctgtgtccgcgaccattcccaacgccgaagacatcgcggagtggctctctgacggcgaaaggcctgccgtctgtctgaagatggatgagtcgcatcggccagtcaagctacagaaggtggtgctcggtttcccatgtagcagcaatcaaacagagtttaaattcgatctgacgttaaactataagatcgcgtctgtgatccagatgtattcggatcagaagcccacactggtgttttgcgcaacccgcaagggggtgcagcaagcagccagcgtgctggtcaaggacgccaaatttattatgactgtggaacagaaacagagattacagaagtatgcctattccgttcgggatagtaagctacgcgatatcctgaaagacggcgctgcttatcaccacgccggaatggagctttctgacagaaaggtggtagaaggcgctttcacagtcggcgacctccccgttctgtttacaacatccactcttgccatgggggtgaatctgccagcacacctggttgtgattaagtccaccatgcactacgccggaggtctctttgaggagtacagtgaaaccgacattctgcagatgattgggcgagccggtcggccacagttcgataccaccgccactgcagtgattatgacaaggctgtcaacccgcgacaagtatatccaaatgttagcctgtcgggataccgttgagagcagtctgcatcggcatctgatcgaacatctgaatgctgagatagtgctgcacacaataaccgatgtgaatattgccgtggaatggattaggtctacccttctttacattagggcgcttaagaaccctagtcactacggcttcgcttcaggcttgaataaagatggtattgaagccaaactgcaggagctttgtctgaaaaacctgaacgacctgagcagtcttgacttaatcaagatggacgagggggttaactttaaacctaccgaagcaggccgacttatggcttggtattacattactttcgaaactgtgaagaaattctacacaattagtggaaaagagactctctccgatctggtgacgctgatcgcagggtgtaaagagttccttgatatccaactccggataaatgaaaagaaaacgctgaacacacttaataaggacccgaaccgaatcactatccgctttcctatggaagggcgtattaagacgcgcgagatgaaagttaattgcctgatccaggctcagttaggatgcattccgattcaggatttcgctctgacgcaggataccgcgaagatttttaggcatggttcacggataactcgttggctctccgattttgtcgcagcccaggaaaagaagtttgccgttctattgaattccctgatcttggcaaagtgcttcaggtgcaaactctgggagaactctctgcatgtgagtaagcagttagaaaagattggcattacactgagcaacgccatagtgaacgctggactcacatcattcaaaaagatagaagaaaccgacgcaagagaactagagttgatcttgaatcgccaccctcctttcgggactcaaatcaaagagactgtgatgtacctaccgaagtatgaactcaaagttgagcagatcacacggtacagcgatacaaccgctgagatattggttacagtgatactgagaaactttgaacagttgcagactaaaaggaccgcctcggattcgcactatgttacacttataatcggcgatgccgataaccaagtggtctacctacataaaatcacggacagtgtgctgctgaaggcgggatcgtgggcaaagaagatagcagtgaagcgtgccctcaaatcggaagacctctcaatcaatctcatctcatctgaatttgtgggtttggacatacagcagaaactgactgttttttatttggaaccgaaaaggtttgggaatcagattaccatgcagcgaaaaagcgaaacacaaatttctcacagtaagcactcagacattagtacaatcgcaggccctaacaagggcacgacagcctctaagaagcccggtaacagagagtgcaaccacctttgtaagagcaagcatacctgcggtcatgactgctgtaaaatcggggtcgcccagaagtcagaaattaaggagagcactatctcatcatatctgtctgaccttcgcaatcgtaatgcggtgagcagcgtacccccagtgaagcggctgaagatccaaatgaataagtcacaaagtgtcgacctgaaggaattcgggttcaccccaaaaccaagcctaccctccatctcaaggagcgagtatctgaacatctcagagctaccaatcatggaacagtgggaccagcctgaaatttatgggaaggtacgacaggagccatctgaataccaggataaggaggttctgaatgttaatttcgagttggggaatgaggtgtgggatgacttcgatgacgagaatctggaggtgaccagcttcagcacagataccgagaagaccaagatctctggcttcgggaacactctgagctctagcacacgtgggtctaagctgccactgcaggaaagcaaatctaagtttcagcgcgagatgtctaactcattcgtcagtagtcacgagatgtccgacatttctctctctaatagcgctatgcctaaattctcagccagcagcatgacaaagctgccccaacaggcagggaatgctgtcattgtccactttcaggagcgcaaacctcagaacctctctcccgaaatcgaaaagcagtgctttacattttcagagaaaaatccgaattcgagcaattataaaaaggtggatttttttatccgcaactccgaatgtaagaaggaggtggattttagcatgtatcacccagacgacgaggctgacgaaatgaagagcctcctcggaatcttcgatggtattttttag

SEQ ID NO: 337248 - protein, 728 aa, Artificial Sequence
  derived and/or modified sequence
SQAWRSSEGLINRRSTGLGAVRREIYDKVQFSTMLKSNDCLFSLENLFFEKPDEVENHPDNEKSLDWFLPPAPLISEIPDTQELEEELESHKLLGQEKRPKMLTSNLKITNEDTNYISLTQKFQFAFPSDKYEQDDLNLEGVGNNDLSHIAGKLTYASQKYKNHIGTEIAPEKSVPDDTKLVNFAEDKGESTSVFRKRLFKISDNIHGSAYSNDNELDSHIGSVKIVQTEMNKGKSRNYSNSKQKFQYSANVFTANNAFSASEIGEGMFKAPSFSVAFQPHDIQEVTENGLGSLKAVTEIPAKFRSIFKEFPYFNYIQSKAFDDLLYTDRNFVICAPTGSGKTVVFELAITRLLMEVPLPWLNIKIVYMAPIKALCSQRFDDWKEKFGPIGLNCKELTGDTVMDDLFEIQHAHIIMTTPEKWDSMTRKWRDNSLVQLVRLFLIDEVHIVKDENRGPTLEVVVSRMKTVQSVSQTLKNTSTAIPMRFVAVSATIPNAEDIAEWLSDGERPAVCLKMDESHRPVKLQKVVLGFPCSSNQTEFKFDLTLNYKIASVIQMYSDQKPTLVFCATRKGVQQAASVLVKDAKFIMTVEQKQRLQKYAYSVRDSKLRDILKDGAAYHHAGMELSDRKVVEGAFTVGDLPVLFTTSTLAMGVNLPAHLVVIKSTMHYAGGLFEEYSETDILQMIGRAGRPQFDTTATAVIMTRLSTRDKYIQMLACRDTVESRLHAH

SEQ ID NO: 337249 - protein, 138 aa, Artificial Sequence
  derived and/or modified sequence
MLKSNDCLFSLENLFFEKPDEVENHPDNEKSLDWFLPPAPLISEIPDTQELEEELESHKLLGQEKRPKMLTSNLKITNEDTNYISLTQKFQFAFPSDKYEQDDLNLEGVGNNDLSHIAGKLTYASQKYKNHIGTEIAP

SEQ ID NO: 337250 - DNA, 4839 bp, Artificial Sequence
  derived and/or modified sequence
agccaggcttggcggtcctcagaggggctgataaatcggcgctcgactggcctaggagctgtccgcagggagatttatgacaaagtccagttttcaacaatgctgaaatcaaatgattgcctgttttctttggaaaatttgttttttgaaaaaccagatgaagttgaaaaccatccagacaatgaaaagtcattggattggtttctccctcctgctccattgatttcagaaattccagatactcaggagttagaggaagaattagaaagtcataaactgttaggtcaggaaaagaggccaaaaatgttaacatcaaatttaaagataactaatgaagatacaaattatatttcactaacacaaaaattccagtttgcctttccttctgataaatatgaacaggatgatctaaatttagaaggggtaggtaataatgacttatcacatattgctggcaagctgacatatgcttctcagaaatataaaaatcacattggcactgagatagcacctgagaagagtgttcctgatgatacaaaattagttaattttgcagaagataaaggagagagcacatcagtattccggaaaagattatttaaaatatctgacaatatacatgggagtgcttattctaatgacaatgaattggactctcacattggctcagtgaaaattgtacaaacagaaatgaacaaagggaaatcaaggaactatagcaatagtaagcaaaaatttcagtattctgcaaatgtgtttacagcaaataatgctttttctgcttctgaaatcggagaaggcatgttcaaagcaccatctttttcagttgctttccaacctcatgatattcaagaggtaacagaaaatggtttaggttccttgaaggctgtcacagaaattccggcaaaatttagaagtattttcaaagaatttccatatttcaactatatacagtccaaggcctttgatgatcttctttacacagataggaattttgtgatttgtgctccaactggttctggaaaaactgtagtgtttgaactagctataacaagattgttaatggaagtaccattgccatggttgaatattaaaattgtttacatggcaccaataaaagccttgtgcagtcagcgttttgatgactggaaagaaaaatttggaccaataggattgaattgtaaagaacttactggagatacagtaatggatgatctatttgagattcagcatgcccatattattatgacaactccagaaaaatgggatagcatgactaggaaatggagagacaactctttggttcagctggttcgactgtttctcattgatgaggtacatattgtaaaagatgaaaatcgtggtccaactcttgaagttgtagttagcagaatgaaaactgtacagtctgtttctcagactttaaaaaataccagcactgctattccaatgcgatttgtagctgtatctgcaacaattccaaatgctgaggatattgcagaatggctttcagatggtgaaagaccagctgtgtgtctgaaaatggatgagagccatagaccagtgaaacttcagaaagtggtccttggatttccctgcagtagtaaccaaactgagtttaagtttgatttaaccctcaactacaaaattgccagtgttatacaaatgtactctgatcagaaacccacacttgtgttttgtgcaacaaggaagggtgtgcaacaggctgcttctgttcttgtgaaagatgctaaatttattatgactgtggaacagaaacagaggttacagaagtatgcatattccgtaagagattcaaaactgagagatatcttaaaagatggtgctgcttatcatcatgctggtatggagctgtcagatagaaaagtagttgagggagcttttactgttggagatttaccagttctttttactaccagtactttagctatgggagtaaatttgcctgctcacctagtagttataaaatctacaatgcattatgctggaggactgtttgaagagtacagtgaaacagatattctacagatgattggtagagctggtcgacctcaatttgacactacagctactgcagttatcatgactcgattaagcacaagggacaagtacattcagatgttagcttgtagagacactgtagaaagcagtttgcacagacatcttattgaacatttaaatgcagagatagtactgcataccatcacggatgtgaatattgctgtggaatggatacgatcaactctgctttatatcagagccttgaaaaatccatctcattatggttttgcatctggattgaacaaagatggaattgaagcaaaattacaagaattatgtttgaagaatctgaatgatttatcatccctggacttaataaagatggatgaaggtgttaatttcaaaccaactgaagcaggaagattgatggcttggtattatattacatttgagacagtgaagaaattttatacaatcagtggaaaagaaaccttatcagatctggttacattgatagctggctgcaaggaatttctagatatacagttaaggataaatgaaaagaaaacactgaatactttgaacaaagatccaaatcggataactatcagatttccaatggaaggaagaattaaaacaagagaaatgaaagtaaattgtcttattcaggctcaactaggatgcattcccatacaagattttgctttgacacaagataccgcaaagattttcagacatggctcccgaattacaagatggttgtcagattttgtagctgctcaagaaaagaagtttgctgtactattgaatagtttgattttagctaaatgttttaggtgtaaactttgggaaaactctctgcatgtatccaaacaactggaaaaaattggtataacattgtcaaatgcaatcgtaaatgctggtttgacttcctttaaaaaaatagaagagacagatgcaagggaacttgaattgattttaaacagacatcccccctttggaacccagataaaagaaactgtgatgtatctaccaaaatatgaacttaaagtggaacagattacaagatatagtgatacgacggcagaaatattagtgactgttatattaagaaattttgaacagctacaaactaaaagaacagcatcggattctcactatgttaccttaatcataggtgacgcagataatcaagtagtttatctgcacaagattacggattctgttttgctaaaagctggaagttgggctaaaaagattgctgtgaaaagagctcttaaatctgaagatcttagcataaatctaataagttctgaatttgttgggcttgatattcagcagaaacttacagtcttttacttagaacccaagaggtttggaaatcaaatcactatgcaaagaaaatctgaaacacagatttcccattctaaacattcagacatatctacaatagcaggacctaataaaggaacgactgccagcaaaaaacctgggaaccgagaatgcaatcatctttgtaaaagtaaacatacatgtggacatgactgctgtaaaattggagttgcacagaagtcagaaattaaagagtcaacaatttcttcatatttatctgatttaagaaacaggaatgctgtttcatctgttcctccagttaaacgtctgaagatacagatgaataaatctcaaagtgtggaccttaaagagtttggttttactccaaaaccttcccttcctagtatatcaaggtcagaatatttaaacatatctgaattgcctataatggagcagtgggatcagcctgaaatctatggaaaagttagacaagaaccatctgaatatcaagacaaagaagttttgaatgtgaactttgaattgggaaatgaagtttgggatgattttgatgatgaaaacttagaagttactagcttttcaactgatactgagaagacaaaaatatcagttttgtttcatcacatgagatgtcggatatttctttatcaaattctgctatgcccaagttcagtgcatcctccatgacaaaattacctcaacaagccggaaatgcagttattgtccattttcaagaaagaaaaccacaaaatctgtcaccagagattgagaagcaatgctttactttctctgaaaaaaacccaaattcttcaaattataaaaaagtggatttttttattagaaacagtgaatgtaaaaaggaagttgatttcagtatgtatcatcctgatgatgaagctgatgaaatgaagtctttattgggaatatttgatggtattttctaaaacaaacaaatactttttatattgataagagaaagaataaagacacctaatcacaaagcatgctttttatttttaaaaagtagttcataattgttcggatttttttctcctgtatttgattagctttgttcactttttgcaacaaaatgtatgggccgatttattttcccattatattgtaacttcttgaaaagctcttttacagtggctttgtttcaataagcccttaagttaagggctgattgcacttagaaataagttgcacttagaaataattatttggctattaattggattttgacaagaaccaatgtaaaatttcatttttatattttcttaacaagaagaaaaatattctatgaaagcaaagtaatgctaacttaatgaatctgcttattgtatggattaatcactaatattattcccatgtattttgttttactaaagatttttaagaatccagtggctatttgaacctactgttatctaactttgagcaacaataaatgaaacattaatcagt

SEQ ID NO: 337251 - protein, 830 aa, Artificial Sequence
  derived and/or modified sequence
MIACFLWKICFLKNQMKLKMAPIKALCSQRFDDWKEKFGPIGLNCKELTGDTVMDDLFEIQHAHIIMTTPEKWDSMTRKWRDNSLVQLVRLFLIDEVHIVKDENRGPTLEVVVSRMKTVQSVSQTLKNTSTAIPMRFVAVSATIPNAEDIAEWLSDGERPAVCLKMDESHRPVKLQKVVLGFPCSSNQTEFKFDLTLNYKIASVIQMYSDQKPTLVFCATRKGVQQAASVLVKDAKFIMTVEQKQRLQKYAYSVRDSKLRDILKDGAAYHHAGMELSDRKVVEGAFTVGDLPVLFTTSTLAMGVNLPAHLVVIKSTMHYAGGLFEEYSETDILQMIGRAGRPQFDTTATAVIMTRLSTRDKYIQMLACRDTVESSLHRHLIEHLNAEIVLHTITDVNIAVEWIRSTLLYIRALKNPSHYGFASGLNKDGIEAKLQELCLKNLNDLSSLDLIKMDEGVNFKPTEAGRLMAWYYITFETVKKFYTISGKETLSDLVTLIAGCKEFLDIQLRINEKKTLNTLNKDPNRITIRFPMEGRIKTREMKVNCLIQAQLGCIPIQDFALTQDTAKIFRHGSRITRWLSDFVAAQEKKFAVLLNSLILAKCFRCKLWENSLHVSKQLEKIGITLSNAIVNAGLTSFKKIEETDARELELILNRHPPFGTQIKETVMYLPKYELKVEQITRYSDTTAEILVTVILRNFEQLQTKRTASDSHYVTLIIGDADNQVVYLHKITDSVLLKAGSWAKKIAVKRALKSEDLSINLISSEFVGLDIQQKLTVFYLEPKRFGNQITMQRKSETQISHSKHSDISTIAGPNKGTTASKTWEPRMQSSL

SEQ ID NO: 337252 - protein, 551 aa, Artificial Sequence
  derived and/or modified sequence
MDEGVNFKPTEAGRLMAWYYITFETVKKFYTISGKETLSDLVTLIAGCKEFLDIQLRINEKKTLNTLNKDPNRITIRFPMEGRIKTREMKVNCLIQAQLGCIPIQDFALTQDTAKIFRHGSRITRWLSDFVAAQEKKFAVLLNSLILAKCFRCKLWENSLHVSKQLEKIGITLSNAIVNAGLTSFKKIEETDARELELILNRHPPFGTQIKETVMYLPKYELKVEQITRYSDTTAEILVTVILRNFEQLQTKRTASDSHYVTLIIGDADNQVVYLHKITDSVLLKAGSWAKKIAVKRALKSEDLSINLISSEFVGLDIQQKLTVFYLEPKRFGNQITMQRKSETQISHSKHSDISTIAGPNKGTTASKKPGNRECNHLCKSKHTCGHDCCKIGVAQKSEIKESTISSYLSDLRNRNAVSSVPPVKRLKIQMNKSQSVDLKEFGFTPKPSLPSISRSEYLNISELPIMEQWDQPEIYGKVRQEPSEYQDKEVLNVNFELGNEVWDDFDDENLEVTSFSTDTEKTKISVLFHHMRCRIFLYQILLCPSSVHPP

SEQ ID NO: 337253 - DNA, 1656 bp, Artificial Sequence
  derived and/or modified sequence
atggacgagggcgtgaacttcaagcccaccgaggccggcagactgatggcctggtactacatcaccttcgagaccgtgaagaagttctacaccatcagcggcaaggagaccctgagcgacctggtgaccctgatcgccggctgcaaggagttcctggacatccagctgagaatcaacgagaagaagaccctgaacaccctgaacaaggaccccaacagaatcaccatcagattccccatggagggcagaatcaagaccagagagatgaaggtgaactgcctgatccaggcccagctgggctgcatccccatccaggacttcgccctgacccaggacaccgccaagatcttcagacacggcagcagaatcaccagatggctgagcgacttcgtggccgcccaggagaagaagttcgccgtgctgctgaacagcctgatcctggccaagtgcttcagatgcaagctgtgggagaacagcctgcacgtgagcaagcagctggagaagatcggcatcaccctgagcaacgccatcgtgaacgccggcctgaccagcttcaagaagatcgaggagaccgacgccagagagctggagctgatcctgaacagacacccccccttcggcacccagatcaaggagaccgtgatgtacctgcccaagtacgagctgaaggtggagcagatcaccagatacagcgacaccaccgccgagatcctggtgaccgtgatcctgagaaacttcgagcagctgcagaccaagagaaccgccagcgacagccactacgtgaccctgatcatcggcgacgccgacaaccaggtggtgtacctgcacaagatcaccgacagcgtgctgctgaaggccggcagctgggccaagaagatcgccgtgaagagagccctgaagagcgaggacctgagcatcaacctgatcagcagcgagttcgtgggcctggacatccagcagaagctgaccgtgttctacctggagcccaagagattcggcaaccagatcaccatgcagagaaagagcgagacccagatcagccacagcaagcacagcgacatcagcaccatcgccggccccaacaagggcaccaccgccagcaagaagcccggcaacagagagtgcaaccacctgtgcaagagcaagcacacctgcggccacgactgctgcaagatcggcgtggcccagaagagcgagatcaaggagagcaccatcagcagctacctgagcgacctgagaaacagaaacgccgtgagcagcgtgccccccgtgaagagactgaagatccagatgaacaagagccagagcgtggacctgaaggagttcggcttcacccccaagcccagcctgcccagcatcagcagaagcgagtacctgaacatcagcgagctgcccatcatggagcagtgggaccagcccgagatctacggcaaggtgagacaggagcccagcgagtaccaggacaaggaggtgctgaacgtgaacttcgagctgggcaacgaggtgtgggacgacttcgacgacgagaacctggaggtgaccagcttcagcaccgacaccgagaagaccaagatcagcgtgctgttccaccacatgagatgcagaatcttcctgtaccagatcctgctgtgccccagcagcgtgcaccccccctag

SEQ ID NO: 337254 - DNA, 1656 bp, Artificial Sequence
  derived and/or modified sequence
atggatgagggcgtgaactttaagcccacggaagccgggagactcatggcctggtattacattactttcgaaaccgtaaagaagttctataccatttcagggaaagaaactttgtcagatcttgttaccctgatcgcaggatgcaaggagttcctcgatatccagttgcgcatcaatgagaagaaaaccttaaatacactcaacaaggatcctaaccgcatcacaatccgctttcccatggaaggaagaatcaaaacacgggaaatgaaagtgaactgtctgatacaagctcagttgggttgtatccctatccaagatttcgccctgacccaggacaccgctaaaatcttccgtcacgggtctaggattactcgctggttaagcgatttcgtggccgcgcaagagaaaaagttcgccgtgctgctcaattccctgatcttggcaaagtgcttccgatgcaagctgtgggagaactcgctccacgtatctaaacagctcgaaaaaataggcattacattgtccaacgccattgttaatgccgggctgaccagcttcaagaagatcgaggaaacagacgctcgggagctggagctgattctgaaccgccatcctccatttgggactcaaatcaaagagactgtgatgtatctccctaaatacgagctgaaggtggagcagataacccgatactcagacacaaccgccgaaatcctggttacagtgatccttcgcaacttcgaacagctgcaaaccaaaagaaccgcctctgattcccactacgtcacgctaatcatcggggacgccgataatcaggtggtatatttgcataaaatcacagattcagtgttgttaaaggccggatcctgggccaagaaaatcgctgtgaaacgggcacttaagtctgaggatctgagcattaacctgatctcatcagaatttgtgggcctggatatccagcaaaaacttacagttttttatttggagcctaaacggtttggcaaccagattactatgcagcggaaaagcgaaacacaaatctctcattctaagcattctgacatttcgacaatcgctgggccgaataagggcaccacagcttcgaaaaaacctgggaatcgagagtgtaatcacttgtgtaaatctaagcacacttgcggccacgactgctgcaagatcggagtggctcaaaaatctgagatcaaggaatccacaatctcctcttatctgtctgacctgcgtaatcggaacgctgtctctagtgtgccacccgttaaacggctgaagatacaaatgaacaaaagccaatcagtggacctaaaggagttcggatttaccccgaaacccagcctaccgtcgatcagcaggtcggagtatctaaacatcagcgaactgcctatcatggagcagtgggatcaacctgagatttacggaaaggtgcgccaagaaccatctgagtaccaggataaagaagtcttaaatgtcaacttcgaattaggtaatgaggtatgggacgactttgatgatgagaatcttgaagtcaccagtttttcaaccgacaccgaaaagacaaagatatcagtcctcttccaccatatgcggtgtaggatttttttataccagatcctgctgtgtccctctagcgtacatccaccatag

SEQ ID NO: 337255 - DNA, 1656 bp, Artificial Sequence
  derived and/or modified sequence
atggatgagggcgtgaacttcaagcccacagaggccggccgcctgatggcctggtactacatcacctttgaaacagtgaagaagttctacaccatcagcggcaaggagaccctgagtgacctggtgaccctgattgctggctgcaaggagttcctggacatccagctgcgcatcaatgagaagaagaccctgaacaccctgaacaaggaccccaaccgcatcaccatccgcttccccatggagggccgcatcaagacccgggagatgaaggtgaactgcctgatccaggcccagctgggctgcatccccatccaggactttgccctgacccaggacacagccaagatcttcagacatggcagccgcatcacccgctggctgagtgactttgtggccgcccaggagaagaagtttgctgtgctgctgaacagcctcatcctggccaagtgcttccgctgcaagctgtgggagaacagcctgcacgtgtccaagcagctggagaagattggcatcaccctgagcaatgccatcgtgaatgccggcctgaccagcttcaagaagattgaggagacagatgcccgggagctggagctgatcctgaacagacacccccccttcggcacccagatcaaggagaccgtgatgtacctgcccaagtatgagctgaaggtggagcagatcacccgctacagcgacaccacagctgagatcctggtgaccgtcatcctgaggaactttgagcagctgcagaccaagaggacagccagtgacagccactacgtgaccctcatcattggagatgctgacaaccaggtggtgtacctgcacaagatcacagattctgtgctgctgaaggccggctcctgggccaagaagattgctgtgaagagggccctgaagtctgaggacctgagcatcaacctgatcagcagcgagtttgtgggcctggacatccagcagaagctgactgtgttctacctggagcccaagcgcttcggcaaccagatcaccatgcagaggaagtctgagacccagatcagccacagcaagcacagcgacatcagcaccatcgccggccccaacaagggcaccacagccagcaagaagccaggcaaccgggagtgcaaccacctgtgcaagagcaagcacacctgtggccatgactgctgcaagattggagtggcccagaagtctgagatcaaggagagcaccatcagcagctacctgagtgacctgaggaacagaaatgctgtgtcctctgtgccccctgtgaagaggctgaagatccagatgaacaagagccagagcgtggacctgaaggagtttggcttcacccccaagcccagcctgcccagcatcagccgctctgagtacctgaacatcagcgagctgcccatcatggagcagtgggaccagcctgagatctacggcaaggtgcggcaggagcccagcgagtaccaggacaaggaggtgctgaatgtgaactttgagctgggcaatgaggtgtgggatgactttgatgatgagaacctggaggtgaccagcttcagcacagacacagagaagaccaagatctctgtgctcttccaccacatgcgctgccgcatcttcctgtaccagatcctgctgtgccccagctctgtgcaccccccatag

SEQ ID NO: 337256 - DNA, 1656 bp, Artificial Sequence
  derived and/or modified sequence
atggacgagggcgtgaacttcaagcccaccgaggccggccggctgatggcctggtactacattactttcgagactgttaagaaattttacaccattagcggcaaagaaactctcagtgacctcgtcacattgattgccgggtgcaaagaatttcttgacatacagctccgaatcaacgaaaagaagacgcttaacacattaaacaaggatccaaatcggattaccatccgctttcccatggaaggccgaatcaagacccgtgagatgaaggttaattgcctgatccaggcccagctgggttgcatccccattcaggactttgccctgacccaagacacggctaagatctttaggcacggatcccgtatcactaggtggttatccgacttcgtagctgcccaggaaaagaaattcgcggtcttactcaactctttgattcttgctaagtgcttccggtgtaagttgtgggaaaacagcctgcatgtgtcaaagcagctggaaaaaatcggaattacactgagcaacgcaatagtgaacgccggcctgacctcgttcaagaaaatcgaggaaacggacgctcgagagcttgaactcatcctgaacagacaccccccatttgggactcagattaaagaaaccgtaatgtatcttccaaagtacgaactaaaggtggaacagattactcgttatagtgatacgaccgcagagattctggtcacggtgatccttagaaatttcgaacagcttcagacgaaacgtaccgcctccgattcacattatgtgacgctgattataggtgatgcagacaatcaagtggtgtacttgcataaaataacagattcagtgctactcaaggccggaagctgggccaagaaaattgccgtgaaacgcgccctaaaatccgaagacctttctattaatctgatctcttccgagttcgttggcctggacatacaacagaaactcacagtgttctatctggaaccaaaaagatttggcaatcagatcacaatgcagcggaagagcgagactcagatctcccattcaaagcacagtgatatcagcaccatagcgggtcccaataagggtactactgcgtccaagaagcctgggaatagagaatgtaatcacctatgcaaatccaagcatacctgtggccacgactgttgcaagatcggggtagctcagaaatctgagatcaaggagtccactatcagctcttacctgtcagaccttaggaaccgcaatgccgtgagtagcgtcccgcccgtgaagcgcttaaaaatacaaatgaacaaatctcaatccgtcgacctgaaggagtttggatttacaccaaaacccagcctccctagtatttccagaagtgagtacttgaacatttcagaattacctattatggagcagtgggaccagcccgaaatctacggaaaggtgcgtcaagagccatcagaatatcaggacaaggaggtattgaacgtgaactttgaactggggaatgaagtctgggacgatttcgatgacgaaaatctggaagtgacttccttctctaccgatactgagaaaaccaaaatttcggtgctgttccaccatatgcggtgccggattttcctgtaccagatattgctatgtccttctagcgtgcaccctccgtag

SEQ ID NO: 337257 - DNA, 1656 bp, Artificial Sequence
  derived and/or modified sequence
atggacgagggggtcaactttaaaccaacagaggcgggaaggctcatggcgtggtactatatcactttcgaaaccgttaagaagttttacacgatatccggtaaggagacgctctctgatctggtcaccctgattgccggttgtaaggaattcctcgacattcagctgcgcattaatgagaagaagacactgaataccctgaacaaagacccaaaccggataacaatccgctttccgatggagggacgcatcaagacccgcgaaatgaaagtgaattgtctgatccaggcccagctaggatgtattcctatccaagactttgcacttacccaagatactgcaaagatctttagacatggcagcaggattacacgatggctcagtgactttgtggccgctcaggaaaagaagtttgctgttttgcttaattccttgatcctggctaaatgctttcgatgtaaactatgggaaaatagtcttcacgtgtctaagcagctggaaaaaattggcattacactgtctaacgccatcgtgaatgccggactgacctccttcaagaagatcgaggagaccgatgcgagggaactggaactgatcctcaacagacatcccccttttggtactcagataaaagaaaccgtgatgtatctcccaaagtacgagctgaaggtagagcagattacccgttactcggatactaccgctgagatcctggttaccgtcatcctgcgaaacttcgaacagttacagacgaaacgcactgcctccgattctcattacgtgactctaattatcggcgatgcagacaaccaggtggtgtacttacataagattacagacagcgtccttctgaaagccggatcctgggctaaaaagatcgccgtgaagcgagctctgaaaagcgaagatctgagtatcaatctcatatccagcgaattcgtggggttggatatacagcagaagctgacggtcttctatctcgaacccaaaaggttcggaaaccagattaccatgcagaggaagtctgaaacgcagatctcacacagtaagcactctgacattagtacgatcgcaggacctaacaagggaacgacggccagcaagaagcctggaaatcgagagtgcaaccatctttgtaaatcaaagcacacctgcgggcacgactgttgcaagataggcgttgcccagaaaagtgagataaaggagtctacaatttctagctatctgtccgatctaaggaaccgcaacgctgtatcttccgtacctccggtgaaacgactgaaaatacagatgaacaaatcccagagtgtagacctgaaggaattcggcttcacccctaagcctagtttgccgtctatctcacgcagcgagtacctcaacatttccgagttacccattatggaacagtgggatcagccggagatatacgggaaagttcgccaggagccgtcggagtaccaggataaagaagtacttaatgtgaacttcgagctcggcaatgaagtctgggacgacttcgacgacgagaatctggaagttacatctttctcaacggacacagagaagactaaaatctctgtgcttttccaccacatgcggtgtaggatattcctgtatcagattctactttgtccctctagcgtccatcctccctag

SEQ ID NO: 337258 - protein, 1114 aa, Artificial Sequence
  derived and/or modified sequence
MEVPLPWLNIKIVYMAPIKALCSQRFDDWKEKFGPIGLNCKELTGDTVMDDLFEIQHAHIIMTTPEKWDSMTRKWRDNSLVQLVRLFLIDEVHIVKDENRGPTLEVVVSRMKTVQSVSQTLKNTSTAIPMRFVAVSATIPNAEDIAEWLSDGERPAVCLKMDESHRPVKLQKVVLGFPCSSNQTEFKFDLTLNYKIASVIQMYSDQKPTLVFCATRKGVQQAASVLVKDAKFIMTVEQKQRLQKYAYSVRDSKLRDILKDGAAYHHAGMELSDRKVVEGAFTVGDLPVLFTTSTLAMGVNLPAHLVVIKSTMHYAGGLFEEYSETDILQMIGRAGRPQFDTTATAVIMTRLSTRDKYIQMLACRDTVESSLHRHLIEHLNAEIVLHTITDVNIAVEWIRSTLLYIRALKNPSHYGFASGLNKDGIEAKLQELCLKNLNDLSSLDLIKMDEGVNFKPTEAGRLMAWYYITFETVKKFYTISGKETLSDLVTLIAGCKEFLDIQLRINEKKTLNTLNKDPNRITIRFPMEGRIKTREMKVNCLIQAQLGCIPIQDFALTQDTAKIFRHGSRITRWLSDFVAAQEKKFAVLLNSLILAKCFRCKLWENSLHVSKQLEKIGITLSNAIVNAGLTSFKKIEETDARELELILNRHPPFGTQIKETVMYLPKYELKVEQITRYSDTTAEILVTVILRNFEQLQTKRTASDSHYVTLIIGDADNQVVYLHKITDSVLLKAGSWAKKIAVKRALKSEDLSINLISSEFVGLDIQQKLTVFYLEPKRFGNQITMQRKSETQISHSKHSDISTIAGPNKGTTASKKPGNRECNHLCKSKHTCGHDCCKIGVAQKSEIKESTISSYLSDLRNRNAVSSVPPVKRLKIQMNKSQSVDLKEFGFTPKPSLPSISRSEYLNISELPIMEQWDQPEIYGKVRQEPSEYQDKEVLNVNFELGNEVWDDFDDENLEVTSFSTDTEKTKISGFGNTLSSSTRGSKLPLQESKSKFQREMSNSFVSSHEMSDISLSNSAMPKFSASSMTKLPQQAGNAVIVHFQERKPQNLSPEIEKQCFTFSEKNPNSSNYKKVDFFIRNSECKKEVDFSMYHPDDEADEMKSLLGIFDGIF

SEQ ID NO: 337259 - DNA, 417 bp, Artificial Sequence
  derived and/or modified sequence
atgctgaagagcaacgactgcctgttcagcctggagaacctgttcttcgagaagcccgacgaggtggagaaccaccccgacaacgagaagagcctggactggttcctgccccccgcccccctgatcagcgagatccccgacacccaggagctggaggaggagctggagagccacaagctgctgggccaggagaagagacccaagatgctgaccagcaacctgaagatcaccaacgaggacaccaactacatcagcctgacccagaagttccagttcgccttccccagcgacaagtacgagcaggacgacctgaacctggagggcgtgggcaacaacgacctgagccacatcgccggcaagctgacctacgccagccagaagtacaagaaccacatcggcaccgagatcgccccctag

SEQ ID NO: 337260 - DNA, 2187 bp, Artificial Sequence
  derived and/or modified sequence
agccaggcctggagaagcagcgagggcctgatcaacagaagaagcaccggcctgggcgccgtgagaagagagatctacgacaaggtgcagttcagcaccatgctgaagagcaacgactgcctgttcagcctggagaacctgttcttcgagaagcccgacgaggtggagaaccaccccgacaacgagaagagcctggactggttcctgccccccgcccccctgatcagcgagatccccgacacccaggagctggaggaggagctggagagccacaagctgctgggccaggagaagagacccaagatgctgaccagcaacctgaagatcaccaacgaggacaccaactacatcagcctgacccagaagttccagttcgccttccccagcgacaagtacgagcaggacgacctgaacctggagggcgtgggcaacaacgacctgagccacatcgccggcaagctgacctacgccagccagaagtacaagaaccacatcggcaccgagatcgcccccgagaagagcgtgcccgacgacaccaagctggtgaacttcgccgaggacaagggcgagagcaccagcgtgttcagaaagagactgttcaagatcagcgacaacatccacggcagcgcctacagcaacgacaacgagctggacagccacatcggcagcgtgaagatcgtgcagaccgagatgaacaagggcaagagcagaaactacagcaacagcaagcagaagttccagtacagcgccaacgtgttcaccgccaacaacgccttcagcgccagcgagatcggcgagggcatgttcaaggcccccagcttcagcgtggccttccagccccacgacatccaggaggtgaccgagaacggcctgggcagcctgaaggccgtgaccgagatccccgccaagttcagaagcatcttcaaggagttcccctacttcaactacatccagagcaaggccttcgacgacctgctgtacaccgacagaaacttcgtgatctgcgcccccaccggcagcggcaagaccgtggtgttcgagctggccatcaccagactgctgatggaggtgcccctgccctggctgaacatcaagatcgtgtacatggcccccatcaaggccctgtgcagccagagattcgacgactggaaggagaagttcggccccatcggcctgaactgcaaggagctgaccggcgacaccgtgatggacgacctgttcgagatccagcacgcccacatcatcatgaccacccccgagaagtgggacagcatgaccagaaagtggagagacaacagcctggtgcagctggtgagactgttcctgatcgacgaggtgcacatcgtgaaggacgagaacagaggccccaccctggaggtggtggtgagcagaatgaagaccgtgcagagcgtgagccagaccctgaagaacaccagcaccgccatccccatgagattcgtggccgtgagcgccaccatccccaacgccgaggacatcgccgagtggctgagcgacggcgagagacccgccgtgtgcctgaagatggacgagagccacagacccgtgaagctgcagaaggtggtgctgggcttcccctgcagcagcaaccagaccgagttcaagttcgacctgaccctgaactacaagatcgccagcgtgatccagatgtacagcgaccagaagcccaccctggtgttctgcgccaccagaaagggcgtgcagcaggccgccagcgtgctggtgaaggacgccaagttcatcatgaccgtggagcagaagcagagactgcagaagtacgcctacagcgtgagagacagcaagctgagagacatcctgaaggacggcgccgcctaccaccacgccggcatggagctgagcgacagaaaggtggtggagggcgccttcaccgtgggcgacctgcccgtgctgttcaccaccagcaccctggccatgggcgtgaacctgcccgcccacctggtggtgatcaagagcaccatgcactacgccggcggcctgttcgaggagtacagcgagaccgacatcctgcagatgatcggcagagccggcagaccccagttcgacaccaccgccaccgccgtgatcatgaccagactgagcaccagagacaagtacatccagatgctggcctgcagagacaccgtggagagcagactgcacgcccactag

SEQ ID NO: 337261 - DNA, 417 bp, Artificial Sequence
  derived and/or modified sequence
atgctgaaaagtaacgattgcctattcagtctcgaaaacttattctttgagaaacctgacgaggtggagaaccaccctgacaacgagaaaagtctcgactggtttctgccacctgcgccgcttatctcagaaatcccagacacccaggagctggaagaggagcttgaatcccataaacttctggggcaagaaaaaagacctaaaatgctgaccagtaatctgaagattaccaacgaagacacaaactatatctctctcactcaaaagtttcagtttgcattccccagcgacaagtacgagcaagatgatctcaacttggagggagtgggcaataacgacctctctcatattgcaggcaagctaacttacgccagccagaagtacaagaatcacatcggcacggagatcgcaccttag

SEQ ID NO: 337262 - DNA, 2187 bp, Artificial Sequence
  derived and/or modified sequence
agccaggcatggagatcgtccgaggggctgattaatcggagatctacaggtctgggagctgtcagacgggagatatatgataaagtccagttctccacaatgctcaaatctaatgactgtctgttcagcttggagaacttgttcttcgagaagcctgatgaggttgaaaaccatcccgataacgagaagtctctggactggtttttgcccccagccccactgatttccgagatccccgacacacaggagttggaagaggaactagagagtcataaactgctgggtcaggagaaaaggcccaagatgctgacttccaatttgaagatcaccaacgaagacacgaactatataagtctgactcaaaaattccagttcgccttccccagcgacaagtacgagcaggatgacttgaacttagagggggtgggaaacaatgatctgtcacacatcgccggcaagcttacttatgccagtcagaagtacaagaatcacatagggacagagatcgctcctgagaagagtgtgccagatgatacaaagctagtcaacttcgccgaggacaaaggggaatctacgagtgtttttaggaaacggctgtttaaaatttctgataacatacatgggagtgcgtattctaatgacaacgaactcgattcacatattgggtcagtcaagatcgtccagaccgagatgaataaaggaaagtcgcgaaactacagcaattcaaagcagaagtttcaatactccgcaaacgtgtttacggctaataatgcgttcagcgccagcgagattggagagggtatgtttaaagcaccctccttctctgttgccttccaacctcacgacattcaggaggtgacagagaacggcctgggatccttgaaggcggtcactgaaatcccagcaaaattccgatccatctttaaagagttcccatacttcaactacattcagtccaaggcgtttgatgaccttctgtacactgatcgcaattttgttatctgcgcccccactggtagcgggaagaccgtggttttcgaattagctatcacaagactgctgatggaagttcctctcccatggttaaacataaagatcgtctatatggcaccaatcaaggcactttgttctcagagatttgatgactggaaggagaagtttgggccaataggtctcaactgcaaagagctaacaggcgacactgtgatggacgacctgtttgaaattcagcatgcccacatcattatgacaaccccagaaaagtgggattctatgacccgcaagtggagggataacagcctggtccaattagtgcgcctctttctcatcgacgaggtccacattgtgaaggatgagaatcgcgggccaaccctggaggttgtcgtaagtaggatgaaaacagtccagtccgtatcacagacactcaagaacacctctaccgctattccaatgaggtttgtggcagttagtgcaaccatccccaatgcggaagatatcgctgaatggctctcagatggggaacgacctgcggtgtgtctaaaaatggatgaaagccatagaccggttaagctccagaaggttgtcctaggattcccatgtagtagtaatcagaccgaatttaaattcgatcttacactgaactataaaatagcttctgtgatccagatgtacagtgaccaaaagcctacgttggttttctgcgcaacacgcaagggggttcagcaagcggcctcggtgctggtcaaagatgcaaagttcataatgacagtagagcaaaagcaacggcttcagaaatatgcctactcagttagggattcgaaactgagggatatacttaaggacggggctgcctatcaccacgcaggcatggaattgtcggatagaaaagtcgtcgaaggggccttcaccgtcggagacctacctgtgctcttcacaacttcaacactggccatgggcgtcaacctaccagcccacctggtcgtgattaagagcaccatgcattacgccggcggcctattcgaggagtatagcgagaccgatattctgcagatgatcggaagggcaggcagacctcagtttgatacgaccgctacggcggtcataatgacccgcctttctactcgggataagtacatccagatgttagcctgtcgcgacacagtggagagcagactacatgcacactag

SEQ ID NO: 337263 - DNA, 417 bp, Artificial Sequence
  derived and/or modified sequence
atgctgaagagcaatgactgcctcttcagcctggagaacctcttctttgagaagccagatgaggtggagaaccacccagacaatgagaagagcctggactggttcctgcccccagcccccctcatcagcgagatcccagacacccaggagctggaggaggagctggagagccacaagctgctgggccaggagaagaggcccaagatgctgaccagcaacctgaagatcaccaatgaagacaccaactacatcagcctgacccagaagttccagtttgccttccccagcgacaagtatgagcaggatgacctgaacctggagggcgtgggcaacaatgacctgagccacatcgccggcaagctgacctacgccagccagaagtacaagaaccacatcggcacagagatcgccccctag

SEQ ID NO: 337264 - DNA, 2187 bp, Artificial Sequence
  derived and/or modified sequence
agccaggcctggaggagcagcgagggcctcatcaacagaagaagcacaggcctgggcgctgtgcggcgggagatctatgacaaggtgcagttcagcaccatgctgaagagcaatgactgcctcttcagcctggagaacctcttctttgagaagccagatgaggtggagaaccacccagacaatgagaagagcctggactggttcctgcccccagcccccctcatcagcgagatcccagacacccaggagctggaggaggagctggagagccacaagctgctgggccaggagaagaggcccaagatgctgaccagcaacctgaagatcaccaatgaagacaccaactacatcagcctgacccagaagttccagtttgccttccccagcgacaagtatgagcaggatgacctgaacctggagggcgtgggcaacaatgacctgagccacatcgccggcaagctgacctacgccagccagaagtacaagaaccacatcggcacagaaattgcccctgagaagtctgtgcctgatgacaccaagctggtgaactttgctgaggacaagggggagagcacctctgtgttcaggaagaggctcttcaagatcagtgacaacatccacggcagcgcctacagcaatgacaatgagctggacagccacatcggctctgtgaagatcgtgcagacagagatgaacaagggcaagagcaggaactacagcaacagcaagcagaagttccagtacagcgccaacgtgttcaccgccaacaatgccttcagcgccagcgagatcggggagggcatgttcaaggcccccagcttctctgtggccttccagccccatgacatccaggaggtgacagaaaatggcctgggcagcctgaaggctgtgacagagatcccagccaagttccgcagcatcttcaaggagttcccctacttcaactacatccagagcaaggcctttgatgacctgctgtacacagacaggaacttcgtcatctgtgcccccaccggcagcggcaagacagtggtgtttgagctggccatcacccggctgctgatggaggtgcccctgccctggctgaacatcaagatcgtgtacatggcccccatcaaggccctgtgcagccagagatttgatgactggaaggagaagtttggccccatcggcctgaactgcaaggagctgaccggggacacagtgatggatgacctgtttgagatccagcacgcccacatcatcatgaccaccccagagaagtgggacagcatgaccaggaagtggagggacaacagcctggtgcagctggtgcggctcttcctgattgatgaggtgcacatcgtgaaggatgagaacagaggccccaccctggaggtggtggtgtccaggatgaagacagtgcagagcgtgtcccagaccctgaagaacaccagcacagccatccccatgagatttgtggccgtgtctgccaccatccccaatgcagaagatattgctgagtggctgagtgatggagagaggcctgctgtgtgcctgaagatggatgagagccacaggcctgtgaagctgcagaaggtggtgctgggcttcccctgcagcagcaaccagacagagttcaagtttgacctgaccctgaactacaagatcgccagcgtcatccagatgtacagcgaccagaagcccaccctggtgttctgtgccaccaggaaaggagtgcagcaggccgcctctgtgctggtgaaggatgccaagttcatcatgacagtggagcagaagcagaggctgcagaagtatgcctacagcgtgcgggacagcaagctgcgggacatcctgaaggatggagctgcctaccaccacgccggcatggagctgagtgacaggaaggtggtggagggcgccttcaccgtgggggacctgcctgtgctcttcaccaccagcaccctggccatgggcgtgaacctgcctgcccacctggtggtgatcaagagcaccatgcactacgccggcggcctgtttgaggagtacagcgagacagacatcctgcagatgattggccgggccggccggccccagtttgacaccacagccacagctgtgatcatgacccggctgagcacccgggacaagtacatccagatgctggcctgccgggacacagtggagagccggctgcacgcccactag

SEQ ID NO: 337265 - DNA, 596 bp, Artificial Sequence
  derived and/or modified sequence
aagtggggacccagccgagccgtccgggcagcggtcgatctctagagccgtctgccgggcaggcagcggacgggcgcggcgagttgttggtcaccaggcgtctccaggccgccggcccgcgccagcgcctcagccgcatttccagtcagaaagcgatttatgacaaagtccagttttcaacaatgctgaaatcaaatgattgcctgttttctttggaaaatttgttttttgaaaaaccagatgaagttgaaaaccatccagacaatgaaaagtcattggattggtttctccctcctgctccattgatttcagaaattccagatactcaggagttagaggaagaattagaaagtcataaactgttaggtcaggaaaagaggccaaaaatgttaacatcaaatttaaagataactaatgaagatacaaattatatttcactaacacaaaaattccagtttgcctttccttctgataaatatgaacaggatgatctaaatttagaaggggtaggtaataatgacttatcacatattgctggcaagctgacatatgcttctcagaaatataaaaatcacattggcactgagatagcacct

SEQ ID NO: 337266 - DNA, 2184 bp, Artificial Sequence
  derived and/or modified sequence
agccaggcttggcggtcctcagaggggctgataaatcggcgctcgactggcctaggagctgtccgcagggagatttatgacaaagtccagttttcaacaatgctgaaatcaaatgattgcctgttttctttggaaaatttgttttttgaaaaaccagatgaagttgaaaaccatccagacaatgaaaagtcattggattggtttctccctcctgctccattgatttcagaaattccagatactcaggagttagaggaagaattagaaagtcataaactgttaggtcaggaaaagaggccaaaaatgttaacatcaaatttaaagataactaatgaagatacaaattatatttcactaacacaaaaattccagtttgcctttccttctgataaatatgaacaggatgatctaaatttagaaggggtaggtaataatgacttatcacatattgctggcaagctgacatatgcttctcagaaatataaaaatcacattggcactgagatagcacctgagaagagtgttcctgatgatacaaaattagttaattttgcagaagataaaggagagagcacatcagtattccggaaaagattatttaaaatatctgacaatatacatgggagtgcttattctaatgacaatgaattggactctcacattggctcagtgaaaattgtacaaacagaaatgaacaaagggaaatcaaggaactatagcaatagtaagcaaaaatttcagtattctgcaaatgtgtttacagcaaataatgctttttctgcttctgaaatcggagaaggcatgttcaaagcaccatctttttcagttgctttccaacctcatgatattcaagaggtaacagaaaatggtttaggttccttgaaggctgtcacagaaattccggcaaaatttagaagtattttcaaagaatttccatatttcaactatatacagtccaaggcctttgatgatcttctttacacagataggaattttgtgatttgtgctccaactggttctggaaaaactgtagtgtttgaactagctataacaagattgttaatggaagtaccattgccatggttgaatattaaaattgtttacatggcaccaataaaagccttgtgcagtcagcgttttgatgactggaaagaaaaatttggaccaataggattgaattgtaaagaacttactggagatacagtaatggatgatctatttgagattcagcatgcccatattattatgacaactccagaaaaatgggatagcatgactaggaaatggagagacaactctttggttcagctggttcgactgtttctcattgatgaggtacatattgtaaaagatgaaaatcgtggtccaactcttgaagttgtagttagcagaatgaaaactgtacagtctgtttctcagactttaaaaaataccagcactgctattccaatgcgatttgtagctgtatctgcaacaattccaaatgctgaggatattgcagaatggctttcagatggtgaaagaccagctgtgtgtctgaaaatggatgagagccatagaccagtgaaacttcagaaagtggtccttggatttccctgcagtagtaaccaaactgagtttaagtttgatttaaccctcaactacaaaattgccagtgttatacaaatgtactctgatcagaaacccacacttgtgttttgtgcaacaaggaagggtgtgcaacaggctgcttctgttcttgtgaaagatgctaaatttattatgactgtggaacagaaacagaggttacagaagtatgcatattccgtaagagattcaaaactgagagatatcttaaaagatggtgctgcttatcatcatgctggtatggagctgtcagatagaaaagtagttgagggagcttttactgttggagatttaccagttctttttactaccagtactttagctatgggagtaaatttgcctgctcacctagtagttataaaatctacaatgcattatgctggaggactgtttgaagagtacagtgaaacagatattctacagatgattggtagagctggtcgacctcaatttgacactacagctactgcagttatcatgactcgattaagcacaagggacaagtacattcagatgttagcttgtagagacactgtagaaagcaggctgcatgctcat

SEQ ID NO: 337267 - DNA, 417 bp, Artificial Sequence
  derived and/or modified sequence
atgctgaagagcaacgactgcctgttcagcctggagaacctgttcttcgaaaagcccgacgaggtggagaaccatcccgataatgagaaaagcctagactggtttcttccacctgcccctctgatctccgagatcccagacacacaggaacttgaggaggaactcgagagccacaaactgctcggacaggaaaagcgacccaagatgctgacaagtaatctgaagatcaccaacgaagataccaactatataagtttaacgcagaaatttcagtttgcattcccttccgataagtacgagcaggacgacctaaacctcgaaggagttgggaacaatgatttgtcccacatagccggcaaactgacttatgcatctcagaaatacaagaatcacattggcacagaaattgcgccttag

SEQ ID NO: 337268 - DNA, 2187 bp, Artificial Sequence
  derived and/or modified sequence
agccaggcctggcggagcagcgagggcctgatcaaccggcggagcactggcctgggcgccgtgcggagagaaatctatgataaggttcagttttcaacgatgttaaagagcaacgactgcttgtttagcttagagaacctgttcttcgaaaaacccgatgaggtggaaaatcacccagataacgagaaatccctggactggttcttaccaccggcaccactgatcagcgagattccggatactcaggaactcgaggaagagctggagtcgcacaaactcttaggtcaagaaaagcgtcccaagatgttgacttccaaccttaaaatcacaaatgaggacactaattatatcagtcttacgcagaaatttcaattcgcatttcctagtgacaagtatgaacaggatgacctcaacctggagggtgtgggcaataacgatttaagccacattgcagggaagctgacgtacgccagccagaaatacaaaaaccatatcggtactgagatcgcccctgagaagtctgtgcctgatgacaccaagttggtgaactttgcagaggataagggcgagtcgacaagcgtcttccgcaaaagactgttcaaaatctccgacaatatccacggttccgcatacagcaacgacaatgaactggatagtcatatcggctcagtgaagatcgttcagaccgagatgaacaagggaaagtcccgtaactactccaactctaaacaaaagttccagtactcagctaatgtgttcaccgcaaataacgctttcagcgcatccgagataggcgaaggaatgtttaaagctcctagcttttccgtggcttttcaacctcacgatatccaagaagtcaccgaaaatggcctgggctccctcaaggcagtgacagagattccagcgaagttcagatccatctttaaggaatttccatactttaattatattcagtctaaggcttttgatgacctgctatataccgacaggaatttcgttatctgtgcgccaaccggctcagggaaaacagtggtgttcgagttggctatcactcgtttactcatggaggtgccactgccctggctcaacatcaagattgtctatatggctcccatcaaagcactctgcagccagcgattcgatgattggaaggaaaagtttggccccattgggcttaactgcaaggagcttaccggggacaccgtaatggacgacctgtttgaaatccagcacgcccacattattatgactacacctgaaaagtgggactccatgactcgcaaatggcgggacaactcattggtgcaactggtacgattattcctcattgacgaagttcacatcgtgaaggacgagaatagagggcccactctcgaggttgtagtgtcaagaatgaagactgtccagagcgtaagtcagacgctgaagaacacctctacagccatccctatgaggttcgtggccgtttccgccaccatcccgaatgcggaggatatcgccgaatggctgtccgacggcgaacgacccgctgtgtgtctcaagatggacgaatcccacaggcctgtgaagctccagaaagtggtgttggggttcccttgctcttccaaccagacggagtttaaatttgatctcacactgaattataaaatcgcgtccgtcatccagatgtattcggaccagaaacccacgctggtattttgtgcaactcgcaaaggcgtccagcaggccgccagtgttcttgttaaggacgctaaattcatcatgactgtggaacagaaacagaggctgcagaaatatgcctactccgtgcgggatagtaaactgcgggacatactgaaggatggggcagcataccaccacgcaggcatggaattgagtgaccgaaaagttgtcgagggcgcctttacggtgggggacctacctgtgctgttcactacaagcacgctagcaatgggagtaaatctcccagctcatctggtcgtgataaagtcaactatgcactacgcagggggactttttgaggagtatagcgagaccgatatcctgcagatgattgggcgggccggaaggcctcaattcgacaccacagccactgctgtgataatgacgagactgtccacacgtgacaagtacattcagatgctggcatgtagagatactgttgagtcccgactacatgcacattag

SEQ ID NO: 337269 - DNA, 417 bp, Artificial Sequence
  derived and/or modified sequence
atgttaaaaagtaacgactgtttgttctccctggaaaacctgttcttcgagaaacccgatgaggtcgagaaccatccagataatgagaagtccctcgactggttccttcctcccgcacctctgatctcggaaattcctgacactcaggaattggaggaggagctcgagtcgcataaactgttgggacaagagaaaagaccaaaaatgctgacgtcgaacctcaaaatcactaacgaggacacaaattatatcagtctgacacagaaattccagttcgcatttccttccgataagtatgaacaggacgatctgaatctggagggcgtgggcaacaacgacctcagtcacatcgcaggaaagttgacctatgcaagtcaaaagtataagaaccacatcgggaccgaaattgccccttag

SEQ ID NO: 337270 - DNA, 2187 bp, Artificial Sequence
  derived and/or modified sequence
tcccaggcctggcggtccagcgagggcctcataaaccgccgatccaccggcttgggggcagtccggagagaaatctatgacaaggtccaattttctaccatgttaaagtcgaatgattgcctgtttagcctggagaacctgttttttgagaagcctgatgaagtcgagaatcaccccgacaacgagaagagtctggattggttcttgcctcccgcaccactgatctccgaaatccccgatactcaagagttggaggaagaactggaatctcataagcttttagggcaggagaagagacccaagatgttgactagcaatttgaaaattactaatgaagatactaattacatttctctgacccagaaatttcagttcgcattccccagcgacaaatatgaacaggacgaccttaacctggaaggggttgggaacaacgatctctcacatattgcgggaaagctgacatatgcctcccaaaagtataaaaaccatattggaaccgagattgcccctgagaagagtgttcccgacgatacgaaacttgtcaactttgccgaggacaagggcgagtccacgagtgtttttcgaaagaggctgttcaaaatttctgacaatatccacggatctgcctactctaacgacaacgaacttgatagtcatatcgggagcgttaagattgtacagaccgagatgaacaaaggtaagagcaggaactattcaaactctaagcagaagtttcagtattctgctaacgtgttcactgccaataacgccttttctgcatctgagatcggcgaaggtatgtttaaagccccaagtttcagcgtggcatttcagcctcacgacatccaggaggtcacagaaaatggtctgggatccctgaaagctgtgaccgaaattccagcaaaattccggtccatttttaaagagttcccatactttaactacatccagagcaaggcctttgacgacctgctgtatacagatagaaacttcgtgatctgcgctccaacaggatcagggaagacagtggttttcgaactggccatcacgcggcttctcatggaagttccgcttccctggctcaatatcaagatcgtttatatggcaccaatcaaagcattatgtagccaaaggttcgatgactggaaagaaaagtttggccctatcggactgaactgtaaagaattgaccggcgataccgttatggatgacttatttgagatccagcacgcccacatcattatgaccacaccagagaagtgggacagcatgaccaggaagtggcgcgataattcattggtccaactcgttagactgtttctcattgatgaagttcacatcgttaaggacgagaatagagggcctacgctggaagtagtcgtgtctcgcatgaagactgtgcaatccgtgtcccagactttgaagaacacatccaccgccatcccaatgagattcgtcgcagtgtccgccactattcctaatgccgaggatattgctgagtggttgtcagacggggaaaggccggctgtctgtctgaagatggacgagtcacacagaccagtaaagctacagaaggtcgttctggggttcccatgctcctccaaccaaacagagtttaagttcgacttgacgctaaattacaagatagcgtccgtcattcagatgtattcagatcagaagcccacacttgtgttctgtgcaactaggaagggagtgcagcaggccgcttctgtgcttgtgaaggatgctaagtttataatgacagtcgagcaaaagcagagactccagaagtatgcatattccgtcagagactctaaacttcgagacattctcaaggacggagcggcatatcatcatgccggaatggaattatctgaccggaaggtagtcgagggggcttttaccgtcggcgacctacctgtgctgttcacaacttctacgcttgccatgggagtgaacctcccagcacaccttgtagtaatcaagtctaccatgcactacgcaggcggacttttcgaagagtatagtgaaactgatatccttcagatgattgggagagccggaaggccacaattcgacacaacggcaactgccgtcatcatgacccgactgagtaccagggataaatatatccaaatgctcgcttgtcgtgataccgttgagtctcgccttcatgcacattag

SEQ ID NO: 337271 - protein, 346 aa, Artificial Sequence
  derived and/or modified sequence
MAMAQKLSHLLPSLRQVIQEPQLSLQPEPVFTVDRAEVPPLFWKPYIYAGYRPLHQTWRFYFRTLFQQHNEAVNVWTHLLAALVLLLRLALFVETVDFWGDPHALPLFIIVLASFTYLSFSALAHLLQAKSEFWHYSFFFLDYVGVAVYQFGSALAHFYYAIEPAWHAQVQAVFLPMAAFLAWLSCIGSCYNKYIQKPGLLGRTCQEVPSVLAYALDISPVVHRIFVSSDPTTDDPALLYHKCQVVFFLLAAAFFSTFMPERWFPGSCHVFGQGHQLFHIFLVLCTLAQLEAVALDYEARRPIYEPLHTHWPHNFSGLFLLTVGSSILTAFLLSQLVQRKLDQKTK

SEQ ID NO: 337272 - DNA, 1041 bp, Artificial Sequence
  derived and/or modified sequence
atggccatggcacagaaactgagccacctgctccctagcctccgacaggtgatacaagaaccccagctaagcttacagcccgagcctgtttttaccgtcgacagagctgaagtaccccccctgttctggaagccttatatctatgcgggttataggcccttgcatcagacttggcggttttatttccggacactgtttcaacagcacaacgaggctgtcaacgtgtggactcacctgctggccgcgctcgtactcctgcttaggctggctttgttcgtggagaccgtggacttttggggcgacccccacgccctcccacttttcattatagtcttggcatcctttacttatctttctttttcagctctggctcatctgctgcaggctaagagtgaattttggcactatagcttctttttcctggattacgtaggggtagccgtctaccagtttggaagtgcgctggcccatttctactatgctatcgagcccgcatggcacgcccaggtccaagcggtgtttttgcccatggccgctttcctggcatggttgagctgtattgggagctgttataataaatacatccaaaaacctggactgctgggtcgaacctgtcaagaagtgccatccgtcctggcttatgcgctcgacatcagtcccgtcgtgcatcgtatattcgtgagcagcgacccaacgaccgacgatcccgcccttttatatcacaaatgtcaggttgtgttcttcctccttgctgcggcattcttcagcacattcatgcccgaacgttggtttcccggctcctgtcacgtgttcggtcagggacatcagctcttccatatctttctcgtcctgtgtacgctggcacagttagaagctgtggctctcgactacgaagcaaggcggcccatatacgagccactgcacacacactggcctcataattttagtggtttgttcctgttgacagtcggctcaagcattcttaccgcctttcttctgtcgcaattagttcaaagaaaacttgaccagaagaccaagtag

SEQ ID NO: 337273 - DNA, 1041 bp, Artificial Sequence
  derived and/or modified sequence
atggccatggcccagaagctgagccacctgctgcccagcctgcggcaggtgatccaggagccccagctgagcctgcagcctgagcctgtgttcaccgtggacagagctgaggtgcccccactcttctggaagccctacatctatgccggctaccggcccctgcaccagacctggaggttctacttccgcaccctcttccagcagcacaatgaggccgtgaatgtgtggacccacctgctggccgccctggtgctgctgctgcggctggccctgtttgtggagaccgtggacttctggggagacccccacgccctgcccctcttcatcatcgtgctggccagcttcacctacctgtccttcagcgccctggcccacctgctgcaggccaagtctgagttctggcactacagcttcttcttcctggactatgtgggcgtggccgtgtaccagtttggaagtgccctggcccacttctactatgccatcgagcccgcctggcacgcccaggtgcaggccgtgttcctgcccatggccgccttcctggcctggctgagctgcatcggcagctgctacaacaagtacatccagaagccaggcctgctgggccgcacctgccaggaggtgcccagcgtgctggcctatgccctggacatcagccctgtggtgcaccgcatctttgtgtccagtgaccccaccacagatgatcctgccctgctgtaccacaagtgccaggtggtgttcttcctgctggccgccgccttcttcagcaccttcatgcctgagcgctggttccctggcagctgccacgtgtttggccagggccaccagctgttccacatcttcctggtgctgtgcaccctggcccagctggaggccgtggccctggactatgaggcccggcggcccatctatgagcccctgcacacccactggccccacaacttcagcggcctcttcctgctgactgtgggcagcagcatcctgacagccttcctgctgagccagctggtgcagaggaagctggaccagaagaccaagtag

SEQ ID NO: 337274 - DNA, 1041 bp, Artificial Sequence
  derived and/or modified sequence
atggccatggcccagaagctgagccacctgctgcccagcctgcggcaggtgattcaggagccacagctgagccttcaacctgaacccgtgttcacggtggatagggccgaggtgccccctttgttctggaagccctacatttacgcgggataccggccattacaccagacatggcgattttacttccggaccctctttcagcaacacaacgaagcagtcaacgtttggactcatttactggctgcgctggtgctactgctccgtctagccctgttcgtcgagaccgtcgacttctggggggatccacacgcattgccactattcataatagtgctcgcttctttcacctacctgagtttttctgcacttgcgcacctgcttcaggccaaatcagagttctggcactattctttcttcttcttagattacgtgggtgtagccgtgtatcaattcggatctgcccttgcccacttttattatgcgattgagccagcctggcatgcccaggtccaagctgtttttctcccaatggcagcattcctggcctggttatcatgtatcgggagttgctacaacaaatatattcagaaacctggactgcttgggcggacctgccaggaggtccctagcgtgctggcctacgctctggacatcagccctgttgtgcaccgcatcttcgtttcaagcgaccctaccacagacgatcccgcgctgctttaccacaagtgtcaggtggtgttttttctactggcagccgcctttttctcgaccttcatgcctgaacgctggttccccggctcctgtcacgttttcggtcaaggccatcaactctttcatatcttcctggtgttgtgtacactggcccaactggaggcagtggctttagactatgaagcccgacgaccgatttacgagcctctgcacactcactggcctcataattttagtggactgtttctcctgaccgttggctcctctattctcaccgctttcctcctcagccagctggtacagcgcaaattagatcaaaaaaccaaatag

SEQ ID NO: 337275 - DNA, 1041 bp, Artificial Sequence
  derived and/or modified sequence
atggccatggcccagaagctctctcaccttcttccctcgctgcgccaggtcatccaagagcctcaactgtcactacagccggagccggtctttaccgtggaccgagctgaggtcccaccgcttttttggaaaccttatatttatgcaggttacagaccgctgcaccagacatggcgattctacttccggactctctttcagcaacacaatgaagccgtgaatgtttggacgcatctgctcgccgcacttgtgcttctactgcgcctggccctgtttgtcgagacagtcgatttttggggagacccccacgctctgcccctgtttataatagttcttgcttcttttacctacctgtctttcagcgccctcgcccacctactgcaagcgaagagcgaattctggcattattcttttttcttcctcgactatgtcggcgtggcagtgtaccagttcggttccgccctggcacacttttactacgccattgagcctgcctggcatgcccaggtacaagcagtctttctccctatggccgctttcttggcttggctttcctgcatcggatcttgttacaacaagtatattcagaaaccaggcctgcttggtagaacatgtcaagaagtgccatctgtgttggcctacgccttggacattagtccggtggtccacaggatctttgtgtcatctgatcctaccaccgacgaccctgctctgttgtaccacaagtgtcaggtcgtgttctttcttttggctgcagccttctttagcacttttatgcctgagcggtggttccccggttcttgtcacgtgtttggccaagggcaccagctctttcacatcttcttagtgctctgcacactcgctcagcttgaagctgtggcactagactatgaagctcggagacctatatacgagcccctccatacacattggcctcataatttttcagggctgttccttctgactgttggctcatcaattctgaccgctttcttgctgagccaactggtgcagcggaagttggaccagaaaacaaagtag

SEQ ID NO: 337276 - DNA, 3297 bp, Artificial Sequence
  derived and/or modified sequence
tgaattcaaaacagttactctgaatggtctttgctaagaacaatttaatgattaagtaaggtcagtgtccttggaagtccaaactctagccagatttccctggtctacacccctagggataaggtaaatgtttaagcacacagtgaacttcctgaggcccccaaatctaatggaactagctattgagggctaaaagaggatggtttttttagaaaactcgaagcaaatctctcaggctggggatatttcaaagactactactattattattaataacaattgcaatatttgttgagtccctaaatgaagctaaaactttgttctaataaatttaatctttacagcaacctatgaggtagataatattgtcattcccatgagggagctaaggatcagagaaggtaagtcacttgtctaaggtcacatagctagcatgttatgcaatcaggagtcaaacctggtttgtctgaatctgaagtccatctgctctgtgcacttttataccgtctgctttttcctttattcctaaccttcttccattctgattcccactgagtagtggacaggaaccactgaagtttgcctgacaccatcaaccaggccctagtcacctggctttgcctttgccctgctgtgtgatcttagctccctgcccaggcccacagccatggccatggcccagaaactcagccacctcctgccgagtctgcggcaggtcatccaggagcctcagctatctctgcagccagagcctgtcttcacggtggatcgagctgaggtgccgccgctcttctggaagccgtacatctatgcgggctaccggccgctgcatcagacctggcgcttctatttccgcacgctgttccagcagcacaacgaggccgtgaatgtctggacccacctgctggcggccctggtactgctgctgcggctggccctctttgtggagaccgtggacttctggggagacccacacgccctgcccctcttcatcattgtccttgcctctttcacctacctctccttcagtgccttggctcacctcctgcaggccaagtctgagttctggcattacagcttcttcttcctggactatgtgggggtggccgtgtaccagtttggcagtgccttggcacacttctactatgctatcgagcccgcctggcatgcccaggtgcaggctgtttttctgcccatggctgcctttctcgcctggctttcctgcattggctcctgctataacaagtacatccagaaaccaggcctgctgggccgcacatgccaggaggtgccctccgtcctggcctacgcactggacattagtcctgtggtgcatcgtatcttcgtgtcctccgaccccaccacggatgatccagctcttctctaccacaagtgccaggtggtcttctttctgctggctgctgccttcttctctaccttcatgcccgagcgctggttccctggcagctgccatgtcttcgggcagggccaccaacttttccacatcttcttggtgctgtgcacgctggctcagctggaggctgtggcactggactatgaggcccgacggcccatctatgagcctctgcacacgcactggcctcacaacttttctggcctcttcctgctcacggtgggcagcagcatcctcactgcattcctcctgagccagctggtacagcgcaaacttgatcagaagaccaagtgaagggggatggcatctggtagggagggaggtatagttgggggacaggggtctgggtttggctccaggtgggaacaaggcctggtaaagttgtttgtgtctggcccacagtgactctctgtgcacgactcaactgccaagggcatcactggccaattcttggatttagggattggctaggagttgctggggtccactcctgggcctgccccagctccttgcccagggagagggaaagagttaacggtgtgggccactccagcttgcccttccactgccactcactggggtgaggctgggggtcagcttggtgaggattggggcttctagattgtctaggcaggaggtgaaacttaggccagagtcagatttgagctgagccaggggaggccttggcaacctacttctactcagatttcattgctggatgcggaaggggtaggcccaaaatatatacaggatcttactgtcccttgaagcccagccacaagtgttggagctgcagagagaccccaaaggtagtagattgtgccagatacaaatgggtcccatccagtgcttcatactccttcagtcactatcccagacagtgagccccagatctcctagctctggcttctgtgtcccacacggcctgttcccagcttctctcctggttcccttgttacggattcatttatccattcagtgtttcctgggcctctgctcagaggcaggtcaccactgggccctgtggatcaatgcaagatgacaaaggctttttttttttttttttttttttttttttttgaggagtttcgctcttgttggctaggctggagtaaaatggtgcgatctcggctcactgcacctccgcctcccaggttcaagcgattttcctgcctcagcctcccgagtagctggggttacaggcatgcaccaccatgcctggctaattttctgtatttttagtagagacggggtttctccatgttggtcaggctggtcttgaactcctgacctcaggtgatctgcccgtctcggcctcccaaagtgctgggattaccggcatgagccactgcgcctggccgacaaaggctttgatatcagaatgaactgtcaagggaggtgctggagagggattaacctgtgctgcctgggaccctcagggtcttaggttggggagtgtgaataggagtttgcagatggagaataggaagggcattccaggcagagggaaacctgtgcagagaccaagaggtgtggaaggaaaagtggggttggggctgggtggtctggattatggcctggatgcaataaagtactgtgacagtagccacctctttgttttttgtctcctgtttccgggaggggcccctgctcacattactggaggttttccggaggaagctggggcccctgggagtggacacagggtgcagggagcagttcttgttttatctttgctgggggatggggttggggccttatataccatatctatatatacaaaatttgtttggcaagggagtgggcggcagttttattactaaagttttataagtagttaaaataatgtgtttaaaatatgataatcccactttatgatctga

SEQ ID NO: 337277 - DNA, 1041 bp, Artificial Sequence
  derived and/or modified sequence
atggccatggcccagaagctgagccacctgctgcccagcctgagacaggtgatccaggagccccagctgagcctgcagcccgagcccgtgttcaccgtggacagagccgaggtgccccccctgttctggaagccctacatctacgccggctacagacccctgcaccagacctggagattctacttcagaaccctgttccagcagcacaacgaggccgtgaacgtgtggacccacctgctggccgccctggtgctgctgctgagactggccctgttcgtggagaccgtggacttctggggcgacccccacgccctgcccctgttcatcatcgtgctggccagcttcacctacctgagcttcagcgccctggcccacctgctgcaggccaagagcgagttctggcactacagcttcttcttcctggactacgtgggcgtggccgtgtaccagttcggcagcgccctggcccacttctactacgccatcgagcccgcctggcacgcccaggtgcaggccgtgttcctgcccatggccgccttcctggcctggctgagctgcatcggcagctgctacaacaagtacatccagaagcccggcctgctgggcagaacctgccaggaggtgcccagcgtgctggcctacgccctggacatcagccccgtggtgcacagaatcttcgtgagcagcgaccccaccaccgacgaccccgccctgctgtaccacaagtgccaggtggtgttcttcctgctggccgccgccttcttcagcaccttcatgcccgagagatggttccccggcagctgccacgtgttcggccagggccaccagctgttccacatcttcctggtgctgtgcaccctggcccagctggaggccgtggccctggactacgaggccagaagacccatctacgagcccctgcacacccactggccccacaacttcagcggcctgttcctgctgaccgtgggcagcagcatcctgaccgccttcctgctgagccagctggtgcagagaaagctggaccagaagaccaagtag

SEQ ID NO: 337278 - DNA, 813 bp, Artificial Sequence
  derived and/or modified sequence
atgcttcaaaaacccaaatccgtgaagctccgggccctccgctcccccaggaagtttggagtggctggccgctcgtgccaggaggtgctaaggaagggttgcttaaggttccaactgcctgagagaggaagtagactatgcctgtacgaagacgggaccgagctcaccgaggattatttcccgtccgtgcctgataatgcagagttggtcctgctcacattgggccaggcctggcagggctatgtgtccgacatcagaaggttcttgtctgctttccacgagccccaggtcggtctgattcaggccgctcaacaactgctgtgcgacgagcaggccccccagaggcagaggctgctggcggacctgctgcacaacgtgtcccagaacatagccgcagaaacaagagccgaagacccaccctggtttgaggggctggaatctcgcttccagtctaaatcgggttatctgcggtattcctgcgaatcccgtatccgaagctaccttcgcgaggtgtcgagctaccctagcactgtcggcgccgaggctcaagaagagtttcttagggtgctcggctccatgtgccagaggctgcgctcgatgcagtataacggttcttacttcgaccgcggcgccaagggaggttccaggctgtgtactcccgagggttggtttagctgccagggcccttttgatatggacagttgcttaagcagacactccattaatccgtattccaaccgcgagtctagaatcctcttttccacctggaatctggaccacatcgacggtgttctgttatgcggccccggatag

SEQ ID NO: 337279 - DNA, 813 bp, Artificial Sequence
  derived and/or modified sequence
atgctgcagaagcctaaatcagtgaaattgcgagctctgcgatctccaaggaaattcggcgtcgcaggcaggtcctgtcaagaggtgctgaggaaagggtgccttcggttccaactgcccgagcggggaagtcggctgtgcctttatgaggacggcactgagttgacagaagattacttccccagcgtcccagataatgctgaactcgtcctgcttaccctggggcaggcttggcaagggtatgtgtctgacattcggcggtttctttccgctttccatgaaccacaggtcggccttatacaggctgcacagcagctcctgtgcgacgaacaggcaccgcagcgacagagattgctagctgatttactgcacaatgtttcacagaacatcgccgccgaaacaagggccgaggaccctccatggtttgaggggctcgaatctcgttttcaatctaagagcggctatcttcgctacagctgcgagagcaggatacgttcctatctgagggaggtcagcagctacccttccaccgtgggcgctgaagcccaggaggagttcttgagggttttaggttcaatgtgtcagcgactgcggtccatgcagtacaatggttcatactttgaccggggggcgaaaggaggatcccggctctgtaccccagagggttggttctcgtgccagggaccctttgatatggacagctgccttagtaggcatagtatcaatccatattccaatcgagaaagccgcatcctgttctccacttggaacttagaccatatagacggagtgttgttgtgtggacccgggtag

SEQ ID NO: 337280 - DNA, 813 bp, Artificial Sequence
  derived and/or modified sequence
atgctgcagaagcccaagtctgtgaagctgcgggccctgcggagccccaggaagtttggagtggccggccgcagctgccaggaggtgctgaggaagggctgcctgcgcttccagctgcctgagcggggcagccggctgtgcctgtatgaagatggaacagagctgacagaggactacttccccagcgtgcctgacaatgctgagctggtgctgctgaccctgggccaggcctggcagggctacgtgtctgacatccgccgcttcctgagcgccttccacgagccccaggtgggcctcatccaggccgcccagcagctgctgtgtgatgagcaggccccccagaggcagaggctgctggccgacctgctgcacaacgtgtcccagaacattgctgctgagaccagggcagaagatcctccctggtttgagggcctggagagccgcttccagagcaagagcggctacctgcgctacagctgtgagagccgcatccgcagctacctgcgggaggtgtcctcctaccccagcacagtgggcgctgaggcccaggaggagttcctgcgggtgctgggctccatgtgccagaggctgcgctccatgcagtacaacggcagctactttgacagaggagccaagggcggcagccggctgtgcaccccagagggctggttcagctgccagggcccctttgacatggacagctgcctgagccgccacagcatcaacccctacagcaaccgggagagccgcatcctcttcagcacctggaacctggaccacattgatggagtgctgctgtgtggccctggatag

SEQ ID NO: 337281 - DNA, 813 bp, Artificial Sequence
  derived and/or modified sequence
atgctgcagaagcccaagagcgtgaagctgcgggccctgcggagcccaaggaagtttggtgtggctggacggtcctgtcaagaggtcttacgcaagggatgtttgcggtttcaactcccagagcggggatcaagactgtgcttgtatgaagacgggacagaactcacggaggactatttcccctctgtgccggacaatgcagagctagtgttattaaccttgggacaggcatggcaggggtatgtttctgacattagacgcttccttagcgcgttccatgaacctcaggtcggactaattcaagcagcccaacaacttctgtgcgacgaacaggccccgcagcggcagcggctactggccgaccttctgcataacgtgtcgcaaaatatagccgctgaaacacgggccgaggacccgccttggttcgagggccttgaatccagattccaaagcaaaagcggttatctcagatatagttgcgaatctcgcatcagaagctacctaagggaggtgagcagttacccgtcgacggtgggagccgaagcacaggaggagtttcttagagtcctcgggtcaatgtgtcagaggttgcggagtatgcagtataatggttcttacttcgatcggggggccaagggcggctctaggctgtgcacacccgagggatggtttagctgtcagggccctttcgacatggatagttgtctaagtcgccatagcatcaacccttatagtaaccgtgaaagcagaattctgttttcgacgtggaatctcgaccatatcgacggagtgttgttatgcggtcccggctag

SEQ ID NO: 337282 - DNA, 813 bp, Artificial Sequence
  derived and/or modified sequence
atgctgcagaagcccaagagcgtgaagctgcgggccctgcggagccctcgtaaattcggtgtcgcgggccgctcgtgtcaggaggttttaaggaaaggctgcctgcgttttcagctgcctgagaggggaagcagactttgcctgtacgaggacggtacagaactcactgaggattactttccttctgtgccagacaatgccgagctcgtgctgctgacactcggccaggcttggcaaggttatgtgtctgacatccgacggtttctgtcagcattccacgagccccaagtgggcctgatacaagcagctcagcagctgctgtgcgatgaacaggcgccacagagacagcgattgctagctgatctcctccataacgtgtcacaaaacatcgcagccgagacccgtgctgaggaccctccctggttcgagggactcgagtctcggtttcaatccaagtcaggttatctgcggtattcttgcgaatcgcgcattcgctcgtacctgagggaggtctcatcctatccctccaccgtgggcgctgaggctcaagaggaatttctgagggttctgggaagtatgtgtcagaggctgaggtcaatgcagtacaacggctcatactttgatcgaggcgccaaggggggcagtcggctgtgcacacccgagggttggtttagctgtcaggggccatttgacatggactcttgcctgtcccggcacagtatcaatccttacagtaaccgtgagtccaggatcctgttctctacctggaacttagatcatattgacggcgtcctcctctgcggccccggctag

SEQ ID NO: 337283 - DNA, 813 bp, Artificial Sequence
  derived and/or modified sequence
atgctgcagaaacccaagagtgttaagttacgggctttgaggagtcctcgtaagtttggtgtggccggacgctcctgtcaggaggtcttgagaaaggggtgtctgagatttcagctgcctgaacgaggatctagactctgcctatacgaggatggcaccgaactgacagaagattatttccccagcgttcctgacaacgctgaattggtgctcctgacactgggtcaggcctggcagggctatgtgtctgacatccgcaggtttctcagtgcgttccacgagcctcaagtgggcctgatccaggccgcacaacaactgctttgcgacgaacaggccccacagaggcagcggctgctggcggacctcctgcacaacgtcagccagaacattgccgcagagactagagcagaagacccaccttggttcgaaggcctcgagagcaggttccagtctaaaagtggatacttgcgttattcctgtgaatcaagaatccggtcctatctgcgcgaggtaagctcctacccaagcacagtgggggctgaggcccaggaggagtttttacgtgtcctgggtagcatgtgccagcgtctaaggtcaatgcaatataacggctcctatttcgacagaggtgccaagggcggttccaggctttgtaccccagaggggtggttttcatgtcagggaccttttgacatggacagctgtctctcaagacactctatcaacccatatagtaacagggagagcaggatccttttctccacatggaatcttgaccacattgatggggtcctactatgtggcccaggctag

SEQ ID NO: 337284 - DNA, 813 bp, Artificial Sequence
  derived and/or modified sequence
atgctccagaagcccaaatccgtcaaattaagagctttgaggtcccccagaaaatttggtgtagcaggtcggtcttgtcaggaagtcctgcggaaagggtgcctccgtttccagctgcccgagcgcggaagccgcctgtgcctgtatgaggatggtaccgagttgaccgaagattatttcccatctgtgccagacaacgctgagctggtacttcttactctcggccaggcttggcaaggatacgtgtctgacataaggcgcttcctttctgcttttcacgaaccacaggtgggcctgatacaggcagcccagcagctgctgtgtgatgaacaggctccccagaggcagcgtctccttgccgacctgctccacaatgtgagtcagaatatcgctgcagagactcgcgcagaagacccaccctggttcgagggattggaatcccgattccagtccaaatctggctacctgaggtacagctgcgaatctaggatccgcagctatctgcgcgaggtgtcgtcctaccctagtactgtgggagccgaggcacaggaagagtttctgcgcgtgttagggtctatgtgccaacgcctgcgcagcatgcagtacaatggcagctacttcgaccgaggcgcaaaaggcggtagtaggctgtgcacaccagagggatggttcagctgccaaggcccttttgatatggattcttgcctctcacggcattctatcaacccttattcgaatcgggagagcaggatactgttctcaacctggaacctggaccacatcgacggcgtcttgctctgtggtcccggatag

SEQ ID NO: 337285 - DNA, 813 bp, Artificial Sequence
  derived and/or modified sequence
atgctgcagaagcccaagagcgtgaagctgagagccctgagaagccccagaaagttcggcgtggccggcagaagctgccaggaggtgctgagaaagggctgcctgagattccagctgcccgagagaggcagcagactgtgcctgtacgaggacggcaccgagctgaccgaggactacttccccagcgtgcccgacaacgccgagctggtgctgctgaccctgggccaggcctggcagggctacgtgagcgacatcagaagattcctgagcgccttccacgagccccaggtgggcctgatccaggccgcccagcagctgctgtgcgacgagcaggccccccagagacagagactgctggccgacctgctgcacaacgtgagccagaacatcgccgccgagaccagagccgaggaccccccctggttcgagggcctggagagcagattccagagcaagagcggctacctgagatacagctgcgagagcagaatcagaagctacctgagagaggtgagcagctaccccagcaccgtgggcgccgaggcccaggaggagttcctgagagtgctgggcagcatgtgccagagactgagaagcatgcagtacaacggcagctacttcgacagaggcgccaagggcggcagcagactgtgcacccccgagggctggttcagctgccagggccccttcgacatggacagctgcctgagcagacacagcatcaacccctacagcaacagagagagcagaatcctgttcagcacctggaacctggaccacatcgacggcgtgctgctgtgcggccccggctag

SEQ ID NO: 337286 - DNA, 1136 bp, Artificial Sequence
  derived and/or modified sequence
ccgctactctggccctcagggttgtgtagtttccggggccacggcacctgggcacaccaggtggcgtcgcgcctttgctttcctgagccttctgagtaaggtaatgtggtgtccgtggggcgacgcctgcgcacaagaccgcgtcgggcctcacttttcccaggccttctgggtaatgtagtttccgggatcggcacccggcctgtgccagcttgcagagctcaccaggtgcagacccctgcggccagggcgaggacggatctgagcagctgggcagcaggtgccaccgcctgtgggacccagagggcttgaggacatctgcaatgctccagaagcccaagagcgtgaagctgcgggccctgcgcagcccgaggaagttcggcgtggctggccggagctgccaggaggtgctgcgcaagggctgtctccgcttccagctccctgagcgcggttcccggctgtgcctgtacgaggatggcacggagctgacggaagattacttccccagtgttcccgacaacgccgagctggtgctgctcaccttgggccaggcctggcagggctatgtgagcgacatcaggcgcttcctcagtgcatttcacgagccacaggtggggctcatccaggccgcccagcagctgctgtgtgatgagcaggccccacagaggcagaggctgctggctgacctcctgcacaacgtcagccagaacatcgcggccgagacccgggctgaggacccgccgtggtttgaaggcttggagtcccgatttcagagcaagtctggctatctgagatacagctgtgagagccggatccggagttacctgagggaggtgagctcctacccctccacggtgggtgcggaggctcaggaggaattcctgcgggtcctcggctccatgtgccagaggctccggtccatgcagtacaatggcagctacttcgacagaggagccaagggcggcagccgcctctgcacaccggaaggctggttctcctgccagggtccctttgacatggacagctgcttatcaagacactccatcaacccctacagtaacagggagagcaggatcctcttcagcacctggaacctggatcacatagatggagtcttgctctgtggcccaggctaa

SEQ ID NO: 337287 - DNA, 3152 bp, Artificial Sequence
  derived and/or modified sequence
ccgctactctggccctcagggttgtgtagtttccggggccacggcacctgggcacaccaggtggcgtcgcgcctttgctttcctgagccttctgagtaaggtaatgtggtgtccgtggggcgacgcctgcgcacaagaccgcgtcgggcctcacttttcccaggccttctgggtaatgtagtttccgggatcggcacccggcctgtgccagcttgcagagctcaccaggtgcagacccctgcggccagggcgaggacggatctgagcagctgggcagcaggtgccaccgcctgtgggacccagagggcttgaggacatctgcaatgctccagaagcccaagagcgtgaagctgcgggccctgcgcagcccgaggaagttcggcgtggctggccggagctgccaggaggtgctgcgcaagggctgtctccgcttccagctccctgagcgcggttcccggctgtgcctgtacgaggatggcacggagctgacggaagattacttccccagtgttcccgacaacgccgagctggtgctgctcaccttgggccaggcctggcagggctatgtgagcgacatcaggcgcttcctcagtgcatttcacgagccacaggtggggctcatccaggccgcccagcagctgctgtgtgatgagcaggccccacagaggcagaggctgctggctgacctcctgcacaacgtcagccagaacatcgcggccgagacccgggctgaggacccgccgtggtttgaaggcttggagtcccgatttcagagcaagtctggctatctgagatacagctgtgagagccggatccggagttacctgagggaggtgagctcctacccctccacggtgggtgcggaggctcaggaggaattcctgcgggtcctcggctccatgtgccagaggctccggtccatgcagtacaatggcagctacttcgacagaggagccaagggcggcagccgcctctgcacaccggaaggctggttctcctgccagggtccctttgacatggacagctgcttatcaagacactccatcaacccctacagtaacagggagagcaggatcctcttcagcacctggaacctggatcacatagatggagtcttgctctgtggcccaggctaaagtgcagtggcaggatcatggctcactgaagccctgaactcctggcctcaagcaatcctcctgcctcagcctcctgagtcgctgggactacagaatagaaaagaaacgcaccatcattcctacactggtggaagcaattaaggaacaagatggaagagaagtggactgggagtatttttatggcctgctttttacctcagagaacctaaaactagtgcacattgtctgccataagaaaaccacccacaagctcaactgtgacccaagcagaatctacaaaccccagacaaggttgaagcggaagcagcctgtgcggaaacgccagtgacacgtacacaccacgtcctggtctttgtttgaggcctgacgtgggcatcattttaacaggtgccttttttgtttttttgtttttcgtttttttggtcactccagtagctcctggaaaaaaccttaaaaaatgtttcctccaaatctgatttcattacatttctgaattgttggggttttttttgttgttttgttttgttttgtagatggagtttcacttttgttgcccaggctggagtgtagtggcgcgatctcggctcagcctcccgagtagctgggattacaggcatgtgccaccacgcccggctaatgtttgtatttttagtagagacggggtttcaccatgttggtcaggctggtctcaaactcctgacctcaggtgatccgcccacctcagcctcccaaagtgctgggatgacaggtgtgagccactgcgcccagcctgaatcatttcttataccttctgacagcccaacttccagaggacagctctggggtactcgttggatgtctgtgagtacctggtcatacgggtcagtagggataagaattgtctctgggctgaggaattcttctgttctctggtttcaccagcgttgggtttgctcatgtaatgtggtcaccatactcaaatggtgtcatggctgaagttggccaccttgcttgagggacaagttgtttatgtatcagctctctgctgggtctccctttccatggcaaatgggcagctccatcctcttgactcttctaaatgcccaaaagaggtgtcatgctttgggggtacgatgtttatactccgtaaagaacatacaaggacattcactgctgatttttttttttgtttgtttgagacagggtctcactctgtcgctcaggctggagtgcagtgatgcaatcttggctcactgcaacctccgcctctcaggttcaagtggttctccttcctcagcctcccaagtagctgggattacaggcacctaccaccagggccagctaatttttgtatgtttagtagaaacggggtttcaccatgttggccaggctgttctcgaactcctgacctcaggtgatctgcccgcctcggtctcccaaagtgctgggattacaggcatgagccactgcacctgacctgctgaattgtttataatggcaagaaataggaaaccccccaatgtctgttgaacagctatcacgttgaaccacgtgaaactgctgttttctaggccaaaaatggtgagcgatcatttatttcatgattcaacctgatacatttacatagtgcaaaactgtgtcacagtttcaggcttttatgaggaaagcgtttctgtgtagaaactggaagctgttcagggcatcggcagctgaaccctgctccgttggtcagcgttactatcatctcggatcatatggagctcatgtcagccgtgtgggtggcgggtgcacagagacggtctggaaggaaacacgcggatctgaacagcagtaatcctgggggatacgggggttgggctagattacagagggctcattttctacgtcatgtattttatgatacttgaattttttgaaatgggcatttattttataacatgttaaaatgtactttttaaattaagtcattttgtaatatttgaatttttacatttgttgtacaatcaggaaaagcaataaagatttttcaaaaataga

SEQ ID NO: 337288 - protein, 274 aa, Artificial Sequence
  derived and/or modified sequence
MCLLLDRHLLFVPLVADVSDIRRFLSAFHEPQVGLIQAAQQLLCDEQAPQRQRLLADLLHNVSQNIAAETRAEDPPWFEGLESRFQSKSGYLRYSCESRIRSYLREVSSYPSTVGAEAQEEFLRVLGSMCQRLRSMQYNGSYFDRGAKGGSRLCTPEGWFSCQGPFDMDSCLSRHSINPYSNRESRILFSTWNLDHIIEKKRTIIPTLVEAIKEQDGREVDWEYFYGLLFTSENLKLVHIVCHKKTTHKLNCDPSRIYKPQTRLKRKQPVRKRQ

SEQ ID NO: 337289 - DNA, 825 bp, Artificial Sequence
  derived and/or modified sequence
atgtgcctgttactggatagacacctcctcttcgtaccactggttgccgacgtgtcggatataagacgctttctttcagctttccacgaaccccaggtggggctaatccaggctgcacagcagctcttgtgcgatgaacaagcaccacagaggcagcgcctgctggcggatctgctccacaatgtttcgcagaatatcgccgctgagacgagagcagaagatccaccttggtttgagggactagagtcccggtttcaatcaaagtcgggatatctgcgatattcgtgcgagagtagaattagaagctaccttagagaagtgagttcctatccttcaaccgtcggtgcagaggcacaggaagaatttttgagggttcttggtagcatgtgtcaaagactgagaagcatgcaatacaatggaagttactttgacagaggggccaaaggaggctccaggttgtgcacgcctgaaggttggttctcatgccaagggccctttgatatggacagctgcctgagcagacattccattaatccttactccaatagagagtctaggattctgttctctacttggaatctggatcatattatagaaaaaaaaagaaccatcatccccactctggtcgaggctattaaggagcaggatggcagggaagtggactgggaatacttctacggcctactctttacatctgagaacttgaagctagttcacattgtctgccacaagaagaccacccacaagttgaactgcgacccttcacgtatatataagccgcagaccaggttaaagcggaagcaacccgtgagaaaacgtcagtag

SEQ ID NO: 337290 - DNA, 825 bp, Artificial Sequence
  derived and/or modified sequence
atgtgtctgttactcgaccgtcacctgttattcgtgcccctggtggccgatgtgtccgatatccggagatttctgtccgcctttcacgaacctcaggtaggactaatccaggccgcacagcaattactctgtgacgaacaggcacctcagcgacagagactgcttgccgacttactgcacaatgtaagtcaaaacattgccgctgagacccgggcagaggaccctccatggtttgagggccttgaaagcagattccagtcaaaaagcggatacctccgttactcttgcgagtcacgcatacggagctacctgcgtgaagtgtcctcctatcccagcacagtaggtgccgaggcacaggaggaatttctgcgcgtgctgggatccatgtgtcaaagactgagaagcatgcagtataatgggagttactttgacaggggcgccaaaggcggctccagactgtgcacaccagaaggttggttcagttgtcagggaccttttgacatggactcctgcctatctagacacagtatcaacccgtattccaacagggagagcagaattcttttttctacctggaacttggaccacataatcgaaaagaaacggacgatcatccccaccctggtagaagccatcaaagagcaggatggacgcgaggtcgattgggagtacttctatggccttctttttaccagcgagaacctcaaactagttcacatcgtctgccacaaaaaaaccacccataaactgaattgcgacccgtcaagaatatacaaaccccagacccgcttgaaacggaaacagccggttcgcaagagacaatag

SEQ ID NO: 337291 - DNA, 825 bp, Artificial Sequence
  derived and/or modified sequence
atgtgcctgctgctggacagacacctgctgtttgtgcccctggtggctgatgtgtctgacatccgccgcttcctgagcgccttccacgagccccaggtgggcctcatccaggccgcccagcagctgctgtgtgatgagcaggccccccagaggcagaggctgctggccgacctgctgcacaacgtgtcccagaacattgctgctgagaccagggcagaagatcctccctggtttgagggcctggagagccgcttccagagcaagagcggctacctgcgctacagctgtgagagccgcatccgcagctacctgcgggaggtgtcctcctaccccagcacagtgggcgctgaggcccaggaggagttcctgcgggtgctgggctccatgtgccagaggctgcgctccatgcagtacaacggcagctactttgacagaggagccaagggcggcagccggctgtgcaccccagagggctggttcagctgccagggcccctttgacatggacagctgcctgagccgccacagcatcaacccctacagcaaccgggagagccgcatcctcttcagcacctggaacctggaccacatcatcgagaagaagaggaccatcatccccaccctggtggaggccatcaaggagcaggacggccgggaggtggactgggagtacttctacggcctgctcttcaccagcgagaacctgaagctggtgcacatcgtgtgccacaagaagaccacccacaagctgaactgtgaccccagccgcatctacaagccccagacccggctgaagaggaagcagcctgtgaggaagaggcagtag

SEQ ID NO: 337292 - DNA, 825 bp, Artificial Sequence
  derived and/or modified sequence
atgtgcctgctgctggaccggcacctgctgttcgtgcccctggtggcagacgtcagtgacatcagacgatttctgtctgccttccacgagccccaagtcgggctgatccaagctgcccagcagttactgtgtgacgaacaggctccccagaggcaacgcctcttggctgatctgctgcataatgtgtcccagaacatcgccgctgagacccgggcagaagaccctccttggtttgaaggcctcgagtcacgatttcagagcaagagcgggtacctacgctacagctgcgaatcccgcatcaggtcgtatcttcgagaggtgagctcctatccatccaccgtgggagccgaagcgcaggaggagttcctgcgagtactgggttcaatgtgtcaacgactgagatctatgcagtataatggtagctattttgaccggggcgccaaagggggctcacgcctttgcacacccgaagggtggttttcctgtcagggaccatttgatatggactcttgcctcagccgccacagcattaacccttactcaaatagggagtctaggatactgttcagcacatggaacttggatcacatcatcgagaagaagaggaccatcatcccaaccctcgtggaagccattaaggagcaggacggccgcgaagttgactgggaatatttctacggactgctctttacatctgaaaacttaaaactcgtacatatcgtttgtcacaagaaaaccacacacaagctaaactgtgatccatcccgcatttataagccacagaccaggttaaagcgcaaacaaccagtacggaaacggcagtag

SEQ ID NO: 337293 - DNA, 825 bp, Artificial Sequence
  derived and/or modified sequence
atgtgcctgctgctggaccggcacctgctgttcgtgcccctggtggctgacgtgtcggatattaggagattcctttcagctttccatgagccacaagtcggactgatacaagcagctcaacagctgctttgcgatgaacaagccccacaacgacagaggctgcttgctgacttgctccataacgtgtctcagaatatcgcggctgaaactcgggcagaagacccaccctggttcgagggactcgagagtaggttccagtctaaatctgggtaccttcggtacagttgtgaatctcgcattcgcagctatctgcgtgaagtgagcagttatccaagcactgttggagcagaggcgcaggaagaattcctccgagtacttggatccatgtgccagagactgaggtccatgcagtataacggaagttactttgatcgaggcgccaagggcggaagccggttgtgcacccctgaaggatggttctcttgccagggaccattcgatatggatagttgtctctcccggcattccataaacccctatagcaatcgtgagtctcggattctcttctcgacatggaacctagatcatatcatcgagaagaagagaactatcattccaactctggtcgaggcaattaaggagcaggatggccgtgaggtagattgggagtatttttacggcctgctgttcacctccgagaacctgaaactagtgcatatagtctgtcataagaagactacccataagctcaattgcgatccgagcagaatctataagccccaaaccagactgaagagaaagcaaccagttaggaagcgccagtag

SEQ ID NO: 337294 - DNA, 825 bp, Artificial Sequence
  derived and/or modified sequence
atgtgccttctgcttgacagacatcttctctttgttcctctggtggccgatgtaagcgacattcggcgattcttgtccgccttccatgaaccccaagttggcctgattcaagccgcacagcagctgctgtgtgatgaacaagccccacagagacagcggctgctggcggacctcctgcataacgtgtctcagaacattgcggctgaaactcgggcagaagatccgccatggttcgaagggctcgaatcaagattccagtcaaagagcggatacctgagatattcctgcgagagtaggatcagatcctacctacgcgaggtgagtagctatccttccaccgtgggcgctgaggcccaggaagagtttttgagagtactcggaagcatgtgccagcgcttgcggtccatgcagtataatggaagctatttcgaccgaggcgcaaagggcggatcgcgtttgtgtacgccagagggctggtttagctgccagggccctttcgacatggattcttgcctgtctcggcactccataaatccttattcgaatagagagagtagaattcttttttccacatggaacttggaccacattattgagaagaaacggactatcatcccgactctggtggaagccatcaaggagcaggacggacgcgaggtggattgggaatacttttacggtctgctgtttactagtgagaaccttaaacttgtgcacatagtctgccacaagaaaaccactcacaaattaaattgtgatcccagcagaatttataagccacaaacacgcctaaagagaaagcagcccgttagaaagaggcaatag

SEQ ID NO: 337295 - DNA, 825 bp, Artificial Sequence
  derived and/or modified sequence
atgtgtctgctgttggaccgacacctgctcttcgtgccactggtggccgacgtttctgacatacggcgtttcctctcagccttccacgaaccacaggtgggtttaatacaagcagcccagcagctcctctgtgacgagcaagcaccccagcgccagcgccttttggcggacctcctgcacaatgtatcgcaaaacatcgcagccgagactcgtgcagaagaccctccatggtttgagggcctcgaatctagatttcagtctaaaagcggttatctgcgatatagttgcgaaagtcggatcaggtcttatctgcgcgaggtcagcagctaccccagcaccgtgggagccgaggcccaggaggaattcctgcgcgtgctggggagtatgtgtcagaggctcaggagtatgcagtacaacggatcctactttgaccgtggtgctaaaggtggcagtaggctgtgtacaccagagggatggttttcttgccaaggtccatttgatatggatagctgtcttagcagacactctattaatccttactctaacagagagagtaggatactgttctcgacatggaacttagatcatattatagaaaaaaagcgcactataattcctaccctcgtcgaggccataaaggaacaggacggacgcgaggtcgattgggagtatttttatggattactgttcactagcgagaaccttaagctggtgcacattgtatgtcataaaaagaccacccataaactgaattgcgatccgtctcgaatatataaaccgcagacccggctcaagagaaaacagcccgtgaggaagcggcagtag

SEQ ID NO: 337296 - DNA, 825 bp, Artificial Sequence
  derived and/or modified sequence
atgtgcctgctgctggacagacacctgctgttcgtgcccctggtggccgacgtgagcgacatcagaagattcctgagcgccttccacgagccccaggtgggcctgatccaggccgcccagcagctgctgtgcgacgagcaggccccccagagacagagactgctggccgacctgctgcacaacgtgagccagaacatcgccgccgagaccagagccgaggaccccccctggttcgagggcctggagagcagattccagagcaagagcggctacctgagatacagctgcgagagcagaatcagaagctacctgagagaggtgagcagctaccccagcaccgtgggcgccgaggcccaggaggagttcctgagagtgctgggcagcatgtgccagagactgagaagcatgcagtacaacggcagctacttcgacagaggcgccaagggcggcagcagactgtgcacccccgagggctggttcagctgccagggccccttcgacatggacagctgcctgagcagacacagcatcaacccctacagcaacagagagagcagaatcctgttcagcacctggaacctggaccacatcatcgagaagaagagaaccatcatccccaccctggtggaggccatcaaggagcaggacggcagagaggtggactgggagtacttctacggcctgctgttcaccagcgagaacctgaagctggtgcacatcgtgtgccacaagaagaccacccacaagctgaactgcgaccccagcagaatctacaagccccagaccagactgaagagaaagcagcccgtgagaaagagacagtag

SEQ ID NO: 337297 - DNA, 944 bp, Artificial Sequence
  derived and/or modified sequence
atgctccagaagcccaagagcgtgaagctgcgggccctgcgcagcccgaggaagttcggcgtggctggccggagctgccaggaggtgctgcgcaagggctgtctccgcttccagctccctgagcgcggttcccggctgtgcctgtacgaggatggcacggagctgacggaagattacttccccagtgttcccgacaacgccgagctggtgctgctcaccttgggccaggcctggcagggctgctggagtgcagtggcgtgatcttggctcaccgcaacctctgcctccctgcaccctctgcctcccaggttaaagcgattctcctgcctcagcctcccgagtagctgggattacagggcttggagtcccgatttcagagcaagtctggctatctgagatacagctgtgagagccggatccggagttacctgagggaggtgagctcctacccctccacggtgggtgcggaggctcaggaggaattcctgcgggtcctcggctccatgtgccagaggctccggtccatgcagtacaatggcagctacttcgacagaggagccaagggcggcagccgcctctgcacaccggaaggctggttctcctgccagggtccctttgacatggacagctgcttatcaagacactccatcaacccctacagtaacagggagagcaggatcctcttcagcacctggaacctggatcacataatagaaaagaaacgcaccatcattcctacactggtggaagcaattaaggaacaagatggaagagaagtggactgggagtatttttatggcctgctttttacctcagagaacctaaaactagtgcacattgtctgccataagaaaaccacccacaagctcaactgtgacccaagcagaatctacaaaccccagacaaggttgaagcggaagcagcctgtgcggaaacgccagtga

SEQ ID NO: 337298 - DNA, 572 bp, Artificial Sequence
  derived and/or modified sequence
atgctccagaagcccaagagcgtgaagctgcgggccctgcgcagcccgaggaagttcggcgtggctggccggagctgccaggaggtgctgcgcaagggctgtctccgcttccagctccctgagcgcggttcccggctgtgcctgtacgaggatggcacggagctgacggaagattacttccccagtgttcccgacaacgccgagctggtgctgctcaccttgggccaggcctggcagggctgtgagtgatggacagctgcttatcaagacactccatcaacccctacagtaacagggagagcaggatcctcttcagcacctggaacctggatcacataatagaaaagaaacgcaccatcattcctacactggtggaagcaattaaggaacaagatggaagagaagtggactgggagtatttttatggcctgctttttacctcagagaacctaaaactagtgcacattgtctgccataagaaaaccacccacaagctcaactgtgacccaagcagaatctacaaaccccagacaaggttgaagcggaagcagcctgtgcggaaacgccagtga

SEQ ID NO: 337299 - DNA, 312 bp, Artificial Sequence
  derived and/or modified sequence
atgctgcagaagccgaaaagtgtcaagctgcgggccctgcgcagccctagaaaattcggggtcgccggtaggagctgccaagaggtgttacgtaagggttgcctgagattccagctgccagaacgcggcagcaggctgtgcctctacgaagacggtacagagctcaccgaagactacttccccagcgtgcccgataatgctgagttggtgttattaaccctgggtcaggcctggcaggggtggttccggcacgtgagccaggactccttaacactactaggatccagttgcccaccagcactggtttcctag

SEQ ID NO: 337300 - DNA, 351 bp, Artificial Sequence
  derived and/or modified sequence
atgctccagaagccgaagagcgtgaaacttagggcactcagatcgccccgtaagtttggggtggccggccgcagttgccaagaagtcttacgcaaggggtgtctgcgattccagctgccagagagggggagtcgattatgtctctacgaagacgggaccgaattaaccgaggattactttccatccgtgcctgacaacgccgaactcgtgctgttgaccttaggacaggcctggcagggatcagtgggtgtgagggcccggacaaagacacgggacacatcttcactctctccaggcgactgccaagccctcggtaacggaggaagatgcggacagagactattcctttag

SEQ ID NO: 337301 - DNA, 261 bp, Artificial Sequence
  derived and/or modified sequence
atgctccagaaacctaagagcgtgaaactgagggccctgaggtcccctcgcaagttcggagtagccggacgctcctgccaagaggtactgaggaagggatgtttgaggtttcagctacccgagagaggatcacggctgtgtctatacgaagacggaaccgagctaactgaagactactttccgagtgtccccgataatgccgagctggtcttattaaccctgggtcaggcctggcagggatgctggtctgccgtcgcgtag

SEQ ID NO: 337302 - DNA, 249 bp, Artificial Sequence
  derived and/or modified sequence
atgctccagaaaccgaagagtgtcaagctccgagccctccgtagcccacgcaaattcggggtggcgggccgcagttgtcaagaggtcctgaggaagggttgcctaagatttcagctgcccgagcgcggaagccgcctctgcctctacgaagatgggaccgaactgactgaggactacttcccctctgtcccagataacgccgagctggtgttattgaccctgggacaggcctggcagggctgcgagtag

SEQ ID NO: 337303 - DNA, 312 bp, Artificial Sequence
  derived and/or modified sequence
atgctgcagaagcccaagtctgtgaagctgcgggccctgcggagccccaggaagtttggagtggccggccgcagctgccaggaggtgctgaggaagggctgcctgcgcttccagctgcctgagcggggcagccggctgtgcctgtatgaagatggaacagagctgacagaggactacttccccagcgtgcctgacaatgctgagctggtgctgctgaccctgggccaggcctggcagggctggttccgccacgtgtcccaggacagcctgaccctgctgggcagcagctgccccccagccctggtgtcctag

SEQ ID NO: 337304 - DNA, 351 bp, Artificial Sequence
  derived and/or modified sequence
atgctgcagaagcccaagtctgtgaagctgcgggccctgcggagccccaggaagtttggagtggccggccgcagctgccaggaggtgctgaggaagggctgcctgcgcttccagctgcctgagcggggcagccggctgtgcctgtatgaagatggaacagagctgacagaggactacttccccagcgtgcctgacaatgctgagctggtgctgctgaccctgggccaggcctggcagggctctgtgggcgtgcgggcccggaccaagacccgggacaccagcagcctgagccctggggactgccaggccctgggcaatggaggccgctgtggccagaggctcttcctgtag

SEQ ID NO: 337305 - DNA, 261 bp, Artificial Sequence
  derived and/or modified sequence
atgctgcagaagcccaagtctgtgaagctgcgggccctgcggagccccaggaagtttggagtggccggccgcagctgccaggaggtgctgaggaagggctgcctgcgcttccagctgcctgagcggggcagccggctgtgcctgtatgaagatggaacagagctgacagaggactacttccccagcgtgcctgacaatgctgagctggtgctgctgaccctgggccaggcctggcagggctgctggagcgctgtggcctag

SEQ ID NO: 337306 - DNA, 249 bp, Artificial Sequence
  derived and/or modified sequence
atgctgcagaagcccaagtctgtgaagctgcgggccctgcggagccccaggaagtttggagtggccggccgcagctgccaggaggtgctgaggaagggctgcctgcgcttccagctgcctgagcggggcagccggctgtgcctgtatgaagatggaacagagctgacagaggactacttccccagcgtgcctgacaatgctgagctggtgctgctgaccctgggccaggcctggcagggctgtgagtag

SEQ ID NO: 337307 - DNA, 312 bp, Artificial Sequence
  derived and/or modified sequence
atgctgcagaagcccaagagcgtgaagctgcgggccctgcggagcccacgcaaatttggcgtcgccgggcgatcttgtcaggaagtgttacgcaaaggctgcttgcggttccaactccctgagaggggatctcgactttgtctgtacgaagacggaaccgagctcacggaggattattttccaagtgttcccgataatgccgagttggtgctcctgacccttgggcaagcctggcagggctggttccgccacgtctctcaggatagtttaacgctcctgggctcatcttgccctcctgccctggtgagttag

SEQ ID NO: 337308 - DNA, 351 bp, Artificial Sequence
  derived and/or modified sequence
atgctgcagaagcccaagagcgtgaagctgcgggccctgcggagcccccgcaagtttggtgtcgccggccgcagttgccaagaagtcttgcgcaaaggatgcctcaggtttcagctgcctgagagggggagccgactgtgcctatacgaggacgggactgagctgaccgaggactactttccctcagtcccagataatgccgagctcgtcctgctgaccctgggccaagcgtggcagggctctgtcggagtcagggctcggactaagactagagatacaagctccctgtcaccaggagattgtcaggctctaggtaatggtggacggtgcggtcagcgactgtttttgtag

SEQ ID NO: 337309 - DNA, 261 bp, Artificial Sequence
  derived and/or modified sequence
atgctgcagaagcccaagagcgtgaagctgcgggccctgcggagccccagaaagttcggagtcgccggccgatcatgccaggaggtgctacggaagggctgtttgcgcttccaacttccggaacgtggttctcggctctgcttgtacgaggacgggaccgagctgaccgaggactacttcccatccgtaccggataacgcagaattagtgttacttactcttggacaggcctggcagggatgttggtccgcagtggcgtag

SEQ ID NO: 337310 - DNA, 249 bp, Artificial Sequence
  derived and/or modified sequence
atgctgcagaagcccaagagcgtgaagctgcgggccctgcggagccccaggaagttcggcgtggctggacggagctgtcaggaggttttacggaaagggtgtctgcggtttcagcttcctgaacgaggctctagactatgtctgtatgaagatggtaccgaactcaccgaggactacttcccctcagtccccgacaacgccgaactggtgctgttgactttagggcaagcgtggcagggatgtgaatag

SEQ ID NO: 337311 - DNA, 312 bp, Artificial Sequence
  derived and/or modified sequence
atgctgcagaagcctaaatctgtcaagctgcgggctctgagatcgcccagaaagttcggcgtggcgggacgatcctgtcaggaggtgctgcgaaagggctgcttacgcttccagctccctgaacgcggaagccgcctttgcctgtacgaggacggcacagagcttaccgaagactactttcccagcgtcccagacaacgcagagctagtcctcctgactctcgggcaggcctggcaggggtggtttcgccatgtcagccaggatagcctgacacttctgggcagctcctgtcccccagcgttggtctcatag

SEQ ID NO: 337312 - DNA, 351 bp, Artificial Sequence
  derived and/or modified sequence
atgctgcagaaacccaagagcgtgaagctcagagcgctgcgtagccctagaaaattcggtgtagcgggtagaagctgtcaggaagtgcttcgcaaaggttgtctgcgattccagctacctgagagaggttcccggttatgtctttatgaggatggcaccgaactgacagaggattacttcccgtccgttcctgacaatgcggagctcgtgctcctcactttggggcaggcttggcaaggcagcgtgggtgtgcgcgctcgaacaaagacgcgagacacttcatctctcagcccaggcgattgccaggccctgggcaacgggggacgatgtgggcagcggctgtttctgtag

SEQ ID NO: 337313 - DNA, 261 bp, Artificial Sequence
  derived and/or modified sequence
atgcttcaaaagccaaaatcagtgaagctgcgcgctttaaggtcacctcgcaagttcggggtcgctgggagatcttgccaggaggtgctgcgcaaaggctgcctcaggtttcagttaccggaacgcggatcgcggctctgcctctatgaagatgggaccgagctgacggaagattacttcccaagtgtcccagataacgcagaacttgtgctgttgaccctggggcaggcctggcagggatgttggagtgccgtcgcatag

SEQ ID NO: 337314 - DNA, 249 bp, Artificial Sequence
  derived and/or modified sequence
atgttacagaaacctaaatccgtcaagctgcgggcacttagaagccccaggaagttcggtgtcgccggtagaagctgtcaggaggtccttcgcaaagggtgtctgcggttccagcttcccgagcgaggcagccgcctttgcttgtatgaggatggtactgaattgacggaagactacttcccctcagttcccgacaatgcagagcttgtgctgttaactctggggcaggcgtggcaggggtgcgagtag

SEQ ID NO: 337315 - DNA, 312 bp, Artificial Sequence
  derived and/or modified sequence
atgctgcagaagcccaagagcgtgaagctgagagccctgagaagccccagaaagttcggcgtggccggcagaagctgccaggaggtgctgagaaagggctgcctgagattccagctgcccgagagaggcagcagactgtgcctgtacgaggacggcaccgagctgaccgaggactacttccccagcgtgcccgacaacgccgagctggtgctgctgaccctgggccaggcctggcagggctggttcagacacgtgagccaggacagcctgaccctgctgggcagcagctgcccccccgccctggtgagctag

SEQ ID NO: 337316 - DNA, 351 bp, Artificial Sequence
  derived and/or modified sequence
atgctgcagaagcccaagagcgtgaagctgagagccctgagaagccccagaaagttcggcgtggccggcagaagctgccaggaggtgctgagaaagggctgcctgagattccagctgcccgagagaggcagcagactgtgcctgtacgaggacggcaccgagctgaccgaggactacttccccagcgtgcccgacaacgccgagctggtgctgctgaccctgggccaggcctggcagggcagcgtgggcgtgagagccagaaccaagaccagagacaccagcagcctgagccccggcgactgccaggccctgggcaacggcggcagatgcggccagagactgttcctgtag

SEQ ID NO: 337317 - DNA, 261 bp, Artificial Sequence
  derived and/or modified sequence
atgctgcagaagcccaagagcgtgaagctgagagccctgagaagccccagaaagttcggcgtggccggcagaagctgccaggaggtgctgagaaagggctgcctgagattccagctgcccgagagaggcagcagactgtgcctgtacgaggacggcaccgagctgaccgaggactacttccccagcgtgcccgacaacgccgagctggtgctgctgaccctgggccaggcctggcagggctgctggagcgccgtggcctag

SEQ ID NO: 337318 - DNA, 249 bp, Artificial Sequence
  derived and/or modified sequence
atgctgcagaagcccaagagcgtgaagctgagagccctgagaagccccagaaagttcggcgtggccggcagaagctgccaggaggtgctgagaaagggctgcctgagattccagctgcccgagagaggcagcagactgtgcctgtacgaggacggcaccgagctgaccgaggactacttccccagcgtgcccgacaacgccgagctggtgctgctgaccctgggccaggcctggcagggctgcgagtag

SEQ ID NO: 337319 - DNA, 635 bp, Artificial Sequence
  derived and/or modified sequence
ccgctactctggccctcagggttgtgtagtttccggggccacggcacctgggcacaccaggtggcgtcgcgcctttgctttcctgagccttctgagtaaggtaatgtggtgtccgtggggcgacgcctgcgcacaagaccgcgtcgggcctcacttttcccaggccttctgggtaatgtagtttccgggatcggcacccggcctgtgccagcttgcagagctcaccaggtgcagacccctgcggccagggcgaggacggatctgagcagctgggcagcaggtgccaccgcctgtgggacccagagggcttgaggacatctgcaatgctccagaagcccaagagcgtgaagctgcgggccctgcgcagcccgaggaagttcggcgtggctggccggagctgccaggaggtgctgcgcaagggctgtctccgcttccagctccctgagcgcggttcccggctgtgcctgtacgaggatggcacggagctgacggaagattacttccccagtgttcccgacaacgccgagctggtgctgctcaccttgggccaggcctggcagggctggtttcgccatgtttcccaggatagtctcacactcctgggctcaagctgtcctcctgccttggtctcctaa

SEQ ID NO: 337320 - DNA, 674 bp, Artificial Sequence
  derived and/or modified sequence
ccgctactctggccctcagggttgtgtagtttccggggccacggcacctgggcacaccaggtggcgtcgcgcctttgctttcctgagccttctgagtaaggtaatgtggtgtccgtggggcgacgcctgcgcacaagaccgcgtcgggcctcacttttcccaggccttctgggtaatgtagtttccgggatcggcacccggcctgtgccagcttgcagagctcaccaggtgcagacccctgcggccagggcgaggacggatctgagcagctgggcagcaggtgccaccgcctgtgggacccagagggcttgaggacatctgcaatgctccagaagcccaagagcgtgaagctgcgggccctgcgcagcccgaggaagttcggcgtggctggccggagctgccaggaggtgctgcgcaagggctgtctccgcttccagctccctgagcgcggttcccggctgtgcctgtacgaggatggcacggagctgacggaagattacttccccagtgttcccgacaacgccgagctggtgctgctcaccttgggccaggcctggcagggctctgttggtgtcagggcaaggacaaagacccgggacacctcaagtctgagtcctggtgattgccaggccctggggaatgggggaagatgtggtcagaggctcttcttgtga

SEQ ID NO: 337321 - DNA, 954 bp, Artificial Sequence
  derived and/or modified sequence
atgacgagtggaaatggaaattccgccagttccattgcggggaccgcaccgcagaatggcgagaacaaacccccacaggcaatagtcaagcctcagatactgacccacgtcatcgagggatttgtgattcaggaaggcgcagagccatttcctgtggggcgatcgagcctgctggtggggaatctgaagaagaaatacgcccaagggtttctgcccgagaagctcccacagcaggaccatactaccacaacagatagcgaaatggaagaaccttatctgcaggagtccaaagaggagggcgcccccctcaaactcaagtgtgaactgtgcgggagagttgattttgcctataaattcaagcggagcaagcggttctgcagtatggcttgtgctaagaggtataacgtcggttgcacgaaacgggtgggcctttttcactcagatcgaagtaaactgcaaaaagcaggcgcagcgacccacaaccgacgcagagctagcaaagcgagtctcccccctctgacaaaggatactaaaaaacaaccgaccggtacggtcccgctgtccgttactgccgcccttcagctgacccactctcaggaggacagtagtagatgctccgacaatagttcatatgaagagcctctgagcccaatctccgcttcctcttcaacaagccggcggcgtcaggggcagcgggatctggaactgccagatatgcacatgagggatcttgttggaatgggccatcacttcctgcccagcgagccaaccaaatggaatgtagaagacgtgtatgaattcattcggagcctgcctggactcccatccagcttcccaaagggccatgaaacatcgatatactcattgagtaagcacctgagacattctcgcttccctcagtcgccttctggttcttgcctgtggcctgtgctccgcccccgcccccacctgtag

SEQ ID NO: 337322 - DNA, 954 bp, Artificial Sequence
  derived and/or modified sequence
atgaccagcggaaatggaaacagcgccagcagcattgctggaacagccccccagaatggagagaacaagccaccccaggccatcgtgaagccccagatcctgacccacgtgattgagggctttgtgatccaggagggcgctgagcccttccctgtgggccgcagcagcctgctggtgggcaacctgaagaagaagtatgcccagggcttcctgcctgagaagctgccccagcaggaccacaccaccaccacagacagcgagatggaggagccctacctgcaggagagcaaggaggagggcgcccccctgaagctgaagtgtgagctgtgtggccgggtggactttgcctacaagttcaagaggagcaagcgcttctgcagcatggcctgtgccaagcgctacaacgtgggctgcaccaagagggtgggcctcttccacagcgacaggagcaagctgcagaaggccggggccgccacccacaacagaagaagagccagcaaggccagcctgccccccctgaccaaggacaccaagaagcagcccaccggcaccgtgcccctgtctgtgacagctgccctgcagctgacccacagccaggaggacagcagccgctgcagcgacaacagcagctatgaggagcccctgagccccatcagcgccagcagcagcaccagcagaagacggcagggccagagggacctggagctgcctgacatgcacatgagggacctggtgggcatgggccaccacttcctgcccagcgagcccaccaagtggaatgtggaggatgtgtatgagttcatccgcagcctgcccggcctgcccagcagcttccccaagggccacgagaccagcatctacagcctgagcaagcacctgcggcacagccgcttcccccagagccccagcggcagctgcctgtggcctgtgctgcggccccggccccacctgtag

SEQ ID NO: 337323 - DNA, 954 bp, Artificial Sequence
  derived and/or modified sequence
atgaccagcggcaacggcaacagcgccagcagcatcgccggcaccgcgcctcagaacggcgagaacaagcctccacaggctatcgtgaagccccagatactgacacatgttatcgagggcttcgttattcaagagggtgcagagccattccccgtaggcagaagttccctgctcgttgggaacctgaagaagaaatacgctcaggggtttcttcccgagaaactgccacaacaggatcacacaaccaccacagattccgaaatggaagaaccctacttacaggagtctaaagaggagggggccccactgaagctcaagtgtgaactctgtggacgcgttgatttcgcttacaagttcaagagatcaaaacggttttgctcgatggcctgtgccaagagatacaacgtcgggtgtactaaaagagtgggattgtttcactccgacagaagcaagctgcaaaaggctggcgctgctacccacaatcgccggcgcgcatctaaggcctccctgcctcccctgaccaaggataccaaaaagcagcccactggaaccgttcctctgtctgttactgccgccctccagctaacacactcacaggaggattcctctagatgcagtgacaattccagttatgaagagccgctgtcacctatatccgcctcctcaagcacttctagacggcgacagggacaaagagatcttgagctgcctgacatgcacatgagggacttggtcggtatgggacatcactttctgcctagtgagcctacgaagtggaacgtggaggatgtttacgaatttatccgctcactgcccgggctgccaagttctttcccaaaggggcacgaaacgtcaatctattccttatcaaaacatctgaggcacagtcgttttccacagagtcctagcggctcgtgcttatggccggtgctgcggcccagacctcacttgtag

SEQ ID NO: 337324 - DNA, 954 bp, Artificial Sequence
  derived and/or modified sequence
atgacaagcggcaatggcaactccgccagctctattgcgggaactgcccctcagaatggagagaataaaccacctcaggccatcgtcaaaccccagattctaacacacgttatcgagggctttgtcatacaggagggcgcagaaccttttccggtcgggagaagctcgctgcttgtaggcaacctgaaaaagaagtatgcgcagggttttctcccggagaagctaccccagcaggaccataccaccaccactgactccgagatggaggaaccatacctgcaggagtccaaggaggaaggcgcaccattgaagttaaaatgtgaactttgcggcagggtagatttcgcctataagtttaagcgaagcaagagattctgctccatggcttgcgcaaagagatataatgtgggatgtaccaaaagagtcggcctttttcactccgatcgcagcaaactgcagaaagctggcgctgcgacccataaccgcaggagggcctccaaagctagtctaccacccttgacaaaagatacaaaaaaacaacctaccgggacagtgccactcagtgttacggccgctctgcagctcacacatagccaggaagatagttcgcgctgctctgataattcatcgtatgaggaacctctgtctcctatcagcgcctcctcttcaacaagccgcagaagacagggacaaagggatctggagttacccgacatgcacatgcgcgatctcgtcggcatgggacaccacttcttaccatcagaaccgacaaaatggaacgtggaagacgtgtatgaatttatcaggtccctaccgggactgccaagctccttccccaaaggccacgaaactagtatctacagcctcagcaagcatttgcgacactcaaggtttcctcagagcccaagcgggtcctgtctgtggcccgtcctcagaccgcgacctcatctctag

SEQ ID NO: 337325 - DNA, 954 bp, Artificial Sequence
  derived and/or modified sequence
atgaccagcggcaacggcaacagcgccagcagcatcgccggcaccgccccccagaacggcgagaacaagcccccccaggccatcgtgaagccccagatcctgacccacgtgatcgagggcttcgtgatccaggagggcgccgagcccttccccgtgggcagaagcagcctgctggtgggcaacctgaagaagaagtacgcccagggcttcctgcccgagaagctgccccagcaggaccacaccaccaccaccgacagcgagatggaggagccctacctgcaggagagcaaggaggagggcgcccccctgaagctgaagtgcgagctgtgcggcagagtggacttcgcctacaagttcaagagaagcaagagattctgcagcatggcctgcgccaagagatacaacgtgggctgcaccaagagagtgggcctgttccacagcgacagaagcaagctgcagaaggccggcgccgccacccacaacagaagaagagccagcaaggccagcctgccccccctgaccaaggacaccaagaagcagcccaccggcaccgtgcccctgagcgtgaccgccgccctgcagctgacccacagccaggaggacagcagcagatgcagcgacaacagcagctacgaggagcccctgagccccatcagcgccagcagcagcaccagcagaagaagacagggccagagagacctggagctgcccgacatgcacatgagagacctggtgggcatgggccaccacttcctgcccagcgagcccaccaagtggaacgtggaggacgtgtacgagttcatcagaagcctgcccggcctgcccagcagcttccccaagggccacgagaccagcatctacagcctgagcaagcacctgagacacagcagattcccccagagccccagcggcagctgcctgtggcccgtgctgagacccagaccccacctgtag

SEQ ID NO: 337326 - protein, 385 aa, Artificial Sequence
  derived and/or modified sequence
MEWNGLKMIISTMEPQVSNGPTSNTSNGPSSNNRNCPSPMQTGATTDDSKTNLIVNYLPQNMTQEEFRSLFGSIGEIESCKLVRDKITGQSLGYGFVNYIDPKDAEKAINTLNGLRLQTKTIKVSYARPSSASIRDANLYVSGLPKTMTQKELEQLFSQYGRIITSRILVDQVTGVSRGVGFIRFDKRIEAEEAIKGLNGQKPSGATEPITVKFANNPSQKSSQALLSQLYQSPNRRYPGPLHHQAQRFRLDNLLNMAYGVKRLMSGPVPPSACPPRFSPITIDGMTSLVGMNIPGHTGTGWCIFVYNLSPDSDESVLWQLFGPFGAVNNVKVIRDFNTNKCKGFGFVTMTNYDEAAMAIASLNGYRLGDRVLQVSFKTNKAHKS

SEQ ID NO: 337327 - DNA, 1158 bp, Artificial Sequence
  derived and/or modified sequence
atggaatggaacggactcaaaatgatcatatccaccatggagccacaagtctcaaatggccctacatccaatacctcgaacgggccttccagtaacaataggaactgcccatctcctatgcaaactggtgccacaaccgacgactctaaaactaacctcattgtgaattacctgccacagaacatgacacaagaagagtttcgctcactgtttggctctataggcgaaattgagtcttgcaagctcgtcagagataaaattactggacagtctttgggttacggtttcgtaaactacatagatccaaaggatgcggaaaaggcgattaataccttaaacggtttgaggctgcaaaccaaaactattaaggtctcttatgctcgcccatcctctgccagcattcgagacgctaatctctacgtgtccggacttcctaaaactatgacccagaaggagctagaacagttattcagccagtatggacgcatcataactagtcggattctggtcgatcaggtgacaggcgtgtctagaggcgtgggctttatccggtttgacaaaagaatagaggccgaggaggcaatcaagggactgaatggacagaagccttctggcgccaccgagccgatcactgtcaagttcgcgaacaatccatcacaaaagtcctcccaagcgctcttgtcccagctgtatcagagtcctaatcgacgataccccggccccttgcaccatcaagcccaacgattccggctggataatctgctgaacatggcatacggggttaagagattaatgtccggtcctgtccccccctccgcctgtccccccaggtttagtcccattacaatcgacggtatgacttcactggtgggcatgaacatccccggacatactgggaccggatggtgcatatttgtgtacaacctctcacccgactctgacgaaagtgtcttgtggcagctttttgggccctttggcgcagtaaacaacgtgaaagttatccgggactttaacaccaacaaatgtaaggggtttggattcgtaaccatgactaattacgatgaggctgccatggctattgccagcctcaacggttaccgcttgggtgatcgcgtgcttcaggtaagtttcaagactaataaagctcacaagagttag

SEQ ID NO: 337328 - DNA, 1158 bp, Artificial Sequence
  derived and/or modified sequence
atggagtggaatggcctgaagatgatcatcagcaccatggagccccaggtgtccaatggccccaccagcaacaccagcaatggccccagcagcaacaacagaaactgccccagccccatgcagacaggagccaccacagatgacagcaagaccaacctgattgtgaactacctgccccagaacatgacccaggaggagttccgcagcctgtttggcagcatcggggagattgagagctgcaagctggtgcgggacaagatcaccggccagagcctgggctacggctttgtgaactacatcgaccccaaggatgctgagaaggccatcaacaccctgaatggcctgcggctgcagaccaagaccatcaaggtgtcctatgcccggcccagcagcgccagcatcagagatgccaacctgtatgtgtctggcctgcccaagaccatgacccagaaggagctggagcagctgttcagccagtatggccgcatcatcaccagccgcatcctggtggaccaggtgactggagtgtccagaggagtgggcttcatccgctttgacaagagaattgaagctgaggaggccatcaagggcctgaatggccagaagcccagcggggccacagagcccatcaccgtgaagtttgccaacaaccccagccagaagagcagccaggccctgctgagccagctgtaccagagccccaacagacgctacccaggccccctgcaccaccaggcccagcgcttccggctggacaacctgctgaacatggcctatggagtgaagaggctgatgagcggccctgtgccccccagcgcctgccccccacgcttcagccccatcaccattgatggcatgaccagcctggtgggcatgaacatccctggccacacaggcaccggctggtgcatctttgtgtacaacctgagcccagacagtgatgagagcgtgctgtggcagctgtttggcccctttggagctgtgaacaacgtgaaggtgatccgggacttcaacaccaacaagtgcaagggctttggatttgtgaccatgaccaactatgatgaggccgccatggccatcgccagcctgaatggctaccgcctgggggacagagtgctgcaggtgtccttcaagaccaacaaggcccacaagagctag

SEQ ID NO: 337329 - DNA, 1158 bp, Artificial Sequence
  derived and/or modified sequence
atggagtggaacggcctgaagatgatcatcagcaccatggagccccaggtgtccaacggaccaacaagtaacactagcaacggccccagcagcaataaccgtaactgccctagccccatgcagaccggggccaccacggacgatagtaagactaatctgattgtcaactacctgcctcaaaatatgacgcaggaagagtttagatcattatttgggagcattggagaaatcgagagctgtaagttagtgagagataaaataaccggtcagtctctgggatacggattcgttaattatatcgaccctaaagacgccgagaaggctataaatacactgaatggcctcaggctccaaactaaaaccataaaggtttcctatgcacggccaagttcagctagcatacgggacgctaatctatatgtgagcggtctgcctaagaccatgactcagaaagagttagagcagctgttctcacagtacgggcgcatcatcacctcccgcatcctcgtcgatcaagtgacaggtgtgagccgaggagtgggatttatccgtttcgacaagagaattgaggccgaggaggccattaagggccttaatggccaaaagcctagtggggcaacggagcctattactgtgaagtttgcaaataacccctctcagaagtcctcacaagcacttttgagccagctttaccagagcccaaaccgccggtatcctggtcctcttcaccaccaggcgcagagatttcggttggacaacttgctgaacatggcatacggcgttaaaagactaatgtcagggcctgtacccccaagtgcatgtcctcctagattttctcccatcaccattgacggcatgaccagcctggtgggtatgaatatccctgggcataccggcaccggctggtgcatcttcgtgtataatctctcgccagacagcgacgagtctgtgctctggcaacttttcgggcccttcggcgcagtcaataacgtcaaggtgattcgtgacttcaacaccaataagtgcaaaggcttcgggttcgtgaccatgacaaactatgacgaagcagcgatggctattgcctccttaaacgggtataggctgggcgacagagttctacaggtcagcttcaagacaaataaggctcacaaatcatag

SEQ ID NO: 337330 - DNA, 1158 bp, Artificial Sequence
  derived and/or modified sequence
atggagtggaacggattaaaaatgattatctctactatggagccccaggtgtcgaatggcccaactagcaacacttctaacgggccatcatcaaacaatcggaattgtccctcgcccatgcagacgggcgctaccacagatgattctaagacgaacttgattgtgaattaccttcctcagaatatgacccaggaggagttccgctcactcttcgggtccatcggagagatcgagtcttgtaagctggtccgtgacaagatcacaggccaatcccttggatacgggtttgtaaactatatcgaccccaaagacgccgagaaggctataaacacattaaacgggttgcggcttcaaaccaaaaccatcaaagtgtcatacgctcggccaagcagcgccagcattcgggacgccaacctttatgtctctggcttgcctaagacgatgacccagaaggagttagaacaactgttctcccagtatggccgaattatcaccagcaggatcctcgtggaccaagttacgggagttagtagaggggttgggtttattcggtttgataagcgtatagaagccgaggaggccatcaaagggctgaacggccagaaaccctccggcgcaaccgagcccattacagtgaaattcgctaacaaccctagtcagaaatcaagccaggcattactgagccagttgtaccaaagtcccaaccggagataccccggtcccctgcaccatcaggctcagagattccggcttgacaacctgttgaacatggcctacggggtgaaacgcttgatgtcaggccctgtgcctccctccgcgtgcccacctaggttctcccccataactattgatgggatgacgtcactcgtgggaatgaatattccaggacacaccggcactggatggtgtatctttgtgtataacctgagtccagactcagatgaatccgtgctatggcaactgttcgggcctttcggcgcagttaataatgtgaaggtgatccgggatttcaacacaaataaatgtaagggctttggattcgtgacaatgaccaactacgacgaggccgctatggccattgcctccctgaacgggtatcgattaggtgaccgcgttctgcaagtctcatttaagacaaataaggcccataagtcctag

SEQ ID NO: 337331 - DNA, 1158 bp, Artificial Sequence
  derived and/or modified sequence
atggagtggaacggcctgaagatgatcatcagcaccatggagccccaggtgagcaacggccccaccagcaacaccagcaacggccccagcagcaacaacagaaactgccccagccccatgcagaccggcgccaccaccgacgacagcaagaccaacctgatcgtgaactacctgccccagaacatgacccaggaggagttcagaagcctgttcggcagcatcggcgagatcgagagctgcaagctggtgagagacaagatcaccggccagagcctgggctacggcttcgtgaactacatcgaccccaaggacgccgagaaggccatcaacaccctgaacggcctgagactgcagaccaagaccatcaaggtgagctacgccagacccagcagcgccagcatcagagacgccaacctgtacgtgagcggcctgcccaagaccatgacccagaaggagctggagcagctgttcagccagtacggcagaatcatcaccagcagaatcctggtggaccaggtgaccggcgtgagcagaggcgtgggcttcatcagattcgacaagagaatcgaggccgaggaggccatcaagggcctgaacggccagaagcccagcggcgccaccgagcccatcaccgtgaagttcgccaacaaccccagccagaagagcagccaggccctgctgagccagctgtaccagagccccaacagaagataccccggccccctgcaccaccaggcccagagattcagactggacaacctgctgaacatggcctacggcgtgaagagactgatgagcggccccgtgccccccagcgcctgcccccccagattcagccccatcaccatcgacggcatgaccagcctggtgggcatgaacatccccggccacaccggcaccggctggtgcatcttcgtgtacaacctgagccccgacagcgacgagagcgtgctgtggcagctgttcggccccttcggcgccgtgaacaacgtgaaggtgatcagagacttcaacaccaacaagtgcaagggcttcggcttcgtgaccatgaccaactacgacgaggccgccatggccatcgccagcctgaacggctacagactgggcgacagagtgctgcaggtgagcttcaagaccaacaaggcccacaagagctag

SEQ ID NO: 337332 - DNA, 3349 bp, Artificial Sequence
  derived and/or modified sequence
taaacctcgagaggcagctcctggatactgaacactgagatgggcagttgtgtttcgggggactgcgcagtcaaaacggcaaagagagtgatttatttgggcttcagtaaatgctgcatcttgtatttcaaagagtttcctgtcatgacctcataaaaaagaggaggcggcttgtatgtgtagcagtgcctggcgtgttgagttgttgcttccttctctgggcagcagctctgtaagaaggaatgtcagcttttacataacgttcctttccgcttttgacacactgtgtgagggtccatcttcttctgatcacagatggagtggaatggcttgaagatgataattagcaccatggagcctcaggtgtcaaatggtccgacatccaatacaagcaatggaccctccagcaacaacagaaactgtccttctcccatgcaaacaggggcaaccacagatgacagcaaaaccaacctcatcgtcaactatttaccccagaatatgacccaagaagaattcaggagtctcttcgggagcattggtgaaatagaatcctgcaaacttgtgagagacaaaattacaggacagagtttagggtatggatttgttaactatattgatccaaaggatgcagagaaagccatcaacactttaaatggactcagactccagaccaaaaccataaaggtctcatatgcccgtccgagctctgcctcaatcagggatgctaacctctatgttagcggccttcccaaaaccatgacccagaaggaactggagcaacttttctcgcaatacggccgtatcatcacctcacgaatcctggttgatcaagtcacaggagtgtccagaggggtgggattcatccgctttgataagaggattgaggcagaagaagccatcaaagggctgaatggccagaagcccagcggtgctacggaaccgattactgtgaagtttgccaacaaccccagccagaagtccagccaggccctgctctcccagctctaccagtcccccaaccggcgctacccaggtccacttcaccaccaggctcagaggttcaggctggacaatttgcttaatatggcctatggcgtaaagagactgatgtctggaccagtccccccttctgcttgtccccccaggttctccccaattaccattgatggaatgacaagccttgtgggaatgaacatccctggtcacacaggaactgggtggtgcatctttgtctacaacctgtcccccgattccgatgagagtgtcctctggcagctctttggcccctttggagcagtgaacaacgtaaaggtgattcgtgacttcaacaccaacaagtgcaagggattcggctttgtcaccatgaccaactatgatgaggcggccatggccatcgccagcctcaacgggtaccgcctgggagacagagtgttgcaagtttcctttaaaaccaacaaagcccacaagtcctgaatttcccattcttacttactaaaatatatatagaaatatatacgaacaaaacacacgcgcgcacacacacacatacacgaaagagagagaaacaaacttttcaaggcttatattcaaccatggactttataagccagtgttgcctaagtattaaaacattggattatcctgaggtgtaccaggaaaggattttataatgcttagaaaaaaagaaaaaaaaaaaacaaaaaatacctttgatgcattgaatgttctttcatagctgtcgttgttgaatataatatacatagatagcgatgtgcagggatttttacccagccagctaactttactaccttccttgaaggtggatctttttaagatgaccattcgctcatttgaagaagaaaaacaaaaaacaaaaaaaataataaaaataaaacaatttttacaaagtaatgggattcaaagaaaggaaaaaaagatttttcttttttgtcaaaatatcgatccaatcagattggtaaaaacccccacacaaattaaagaggaataataaaaattgcaaaaataaaaaaaaacttttgcaaatttttttatttttccttctttcttttatatcatgtgaactaaaacagtcttctgttaggggatgggggcaagggggatacctgatgacattaacaatttaataacattaacattgttgccaaagaggtggtctctttgctgaaaatgggtttcaagaaaaatctatttttataaaatataaagaatttttacaagagaatctggatttgagaaaaaaatattttgactggctaatttaggggaaattgacaactttgtcgcgttcatactgcactggtaactttttagagatcaagatgtgtgttttaaactggattcgtagactgttttttgaaggatgggctataaacagatgatcttcatatcttttcatagcatgtaataataattaaaaaacaattattaattactaggggaaaggagtgttcgttctacccagggtaccacagttccccacagtcaaaacccaaaagcaaggagatgagttgaaagacagtttttctttaagtcatcagtatgggatgtcagcagaacaaaaattaaaaagattaattttccttttgatctaaaacttccttagtttgagcagtaggtgctacaaaattatttacatatcttagtatcatagttaaatgtaatgtgtttaggagaggaaaacaaaagatacatttgctttaaattcattaagaaattttcaaattcactttgtagcccatgctgatagaattgggctgtgttggtacatttgaaacactgtttatgttgcttgaaacacttatttatttaatcgccgatgtgatgatgcctatggccgagatcaaatatagctagattggctagactacttatttgtttacttaaactatgggaagaagcatattattgtgtcattctgttgtgtgtgtatgtgtatatacaatataaatatatatatataaagttattttttctttgggttaatttattataagttgtaacacttggctagttttgtttgtatatgtcttaaaatgttttcttatgatatttaagtgacagttaaagaggtatcaaggtaacttgtgtagaactattctttgatatattgtcatgtttgttgtgaatattttttcttactgcacagtagaaaaataaaaacaactgagtctttattttaatgtaactcagattggggaaaacaaaacagagctaagggaacaaaatgactgagggagcactctcccacgtccagtgcactgatcattttagtatgtttgtgctttgtacggttatatatttaaaacgaaaacaaaacaaaaaaatacaa

SEQ ID NO: 337333 - protein, 195 aa, Artificial Sequence
  derived and/or modified sequence
  misc_feature (1)..(1): Xaa can be any naturally occurring amino acid
XEAARRPRLGLSRRRPRPAGGPSGGRPWFLLGGDERERLWAELLRTVSPELILDHEVPSLPAFPGQEPRCGPEPTEVFTVGPKTFSWTPFPPDLWGPGRSYRLLHGAGGHLESPARSLPQRPAPDPCRAPRVEQQPSVEGAAALRSCPMCQKEFAPRSKNSSGMRRHRSPKLAANNNNNKRKGRARWLTPVIPAL

SEQ ID NO: 337334 - DNA, 372 bp, Artificial Sequence
  derived and/or modified sequence
atgatgcccggccccagacccagaaagggcccccaggccagaggccagggcgtggccgccgccaagcagatgggcctgttcatggagttcggccccgaggacatgctgctgggcatggacgaggccgaggacgacgaggacctggaggccgagctgctggccctgaccggcgaggcccagaccaccggcaagaagcccgcccccaagggccaggcccccctgcccatggcccacatcgagaagctggccgccgactgcatgagagacgtggaggaggaggaggaggaggagggcctggaggaggacgccggcagagactgcgccggcgacgacttccccagcttcgccggcttcagaagcctgtgcacctag

SEQ ID NO: 337335 - DNA, 487 bp, Artificial Sequence
  derived and/or modified sequence
gctggcgcttcctgtcgctaccgctgcggcccagggcccgcgggagcccagggcggtgccgggtgagacaaggccggggtttggctcggattcaccgcgaggtatctaggctgccatgatgccagggccaagacctcggaagggccctcaggccagaggccaaggggtggccgctgccaagcagatggggctctttatggagtttggccctgaggacatgctgctgggcatggatgaggctgaagatgatgaggacctggaggctgagctgctggctctcacaggggaagcacaaaccacaggcaagaagccagcacccaaggggcaggcccccctgcccatggcccacatcgagaagttggcggcagactgtatgcgggatgtggaggaggaggaggaggaggaagggctggaggaagatgcaggccgcgactgtgcaggagatgactttcccagctttgctggcttcagaagcctttgtacataa

SEQ ID NO: 337336 - DNA, 372 bp, Artificial Sequence
  derived and/or modified sequence
atgatgccaggccccaggccgcggaaagggcctcaggcacgggggcagggggtagctgctgccaaacagatgggactcttcatggagttcggccctgaagacatgctgctcgggatggacgaagcggaagatgacgaagatcttgaagcagaactgctggccctaactggagaggcacagactactggcaagaaacccgcacccaaaggccaagcaccgctccctatggcccacatcgagaaactagcagccgactgcatgcgcgatgtggaagaagaggaggaggaggagggcctggaggaagatgccgggagagattgcgccggagacgactttcctagcttcgccggctttaggtccttgtgcacctag

SEQ ID NO: 337337 - DNA, 372 bp, Artificial Sequence
  derived and/or modified sequence
atgatgcctggcccccggcccaggaagggcccccaggcccggggccagggcgtggccgccgccaagcagatgggcctcttcatggagtttggacctgaggacatgctgctgggcatggatgaagcagaagatgatgaggacctggaggccgagctgctggccctgaccggggaggcccagaccaccgggaagaagccagcccccaagggccaggcccccctgcccatggcccacatcgagaagctggccgctgactgcatgagagatgtggaggaggaggaggaggaggagggcctggaggaggatgctggccgggactgtgctggagatgacttccccagctttgctggcttccgcagcctgtgcacctag

SEQ ID NO: 337338 - DNA, 372 bp, Artificial Sequence
  derived and/or modified sequence
atgatgcccggcccccggccccggaagggcccccaggcccggggccagggggtggcggctgcaaaacaaatgggacttttcatggagtttggaccggaagacatgctgcttggcatggatgaagctgaagatgatgaggacctggaggccgagctgctagccctaactggggaggcccaaactactggaaaaaagcccgctcccaaaggccaagcccccctgcccatggcgcatatagagaagctggcagctgactgtatgagggatgtagaagaagaagaggaagaagagggtctcgaggaagacgcaggtagagactgcgccggcgatgacttccccagctttgcgggctttcggtccctgtgcacctag

SEQ ID NO: 337339 - DNA, 372 bp, Artificial Sequence
  derived and/or modified sequence
atgatgccagggccacgccctaggaaaggaccccaggctaggggccagggtgtggccgctgctaaacaaatgggcctattcatggagtttggtcctgaagacatgttgctcggcatggatgaggctgaagatgacgaggacctcgaagcggagcttctggctctgacaggtgaggcccagaccactggcaagaagcccgcacctaagggccaagcccctctcccgatggcgcatatcgaaaagttagctgctgattgcatgcgagacgttgaggaagaggaggaggaagagggtctagaagaagatgcaggacgcgattgtgctggcgacgactttccatccttcgcaggcttcaggagcctgtgtacgtag

SEQ ID NO: 337340 - protein, 106 aa, Artificial Sequence
  derived and/or modified sequence
MASQLQVFSPPSVSSSAFCSAKKLKIEPSGWDVSGQSSNDKYYTHSKTLPATQGQANSSHQVANFNIPAYDQGLLLPAPAVEHIVVTAADSSGSAATSTFQSSQTL

SEQ ID NO: 337341 - protein, 119 aa, Artificial Sequence
  derived and/or modified sequence
MASQLQVFSPPSVSSSAFCSAKKLKIEPSGWDVSGQSSNDKYYTHSKTLPATQGQANSSHQVANFNIPAYDQGLLLPAPAVEHIVVTAADSSGSAATSTFQSSQTLTHRSNVSLLEPYQ

SEQ ID NO: 337342 - DNA, 321 bp, Artificial Sequence
  derived and/or modified sequence
atggccagccagctgcaggtgttcagcccccccagcgtgagcagcagcgccttctgcagcgccaagaagctgaagatcgagcccagcggctgggacgtgagcggccagagcagcaacgacaagtactacacccacagcaagaccctgcccgccacccagggccaggccaacagcagccaccaggtggccaacttcaacatccccgcctacgaccagggcctgctgctgcccgcccccgccgtggagcacatcgtggtgaccgccgccgacagcagcggcagcgccgccaccagcaccttccagagcagccagaccctgtag

SEQ ID NO: 337343 - DNA, 360 bp, Artificial Sequence
  derived and/or modified sequence
atggccagccagctgcaggtgttcagcccccccagcgtgagcagcagcgccttctgcagcgccaagaagctgaagatcgagcccagcggctgggacgtgagcggccagagcagcaacgacaagtactacacccacagcaagaccctgcccgccacccagggccaggccaacagcagccaccaggtggccaacttcaacatccccgcctacgaccagggcctgctgctgcccgcccccgccgtggagcacatcgtggtgaccgccgccgacagcagcggcagcgccgccaccagcaccttccagagcagccagaccctgacccacagaagcaacgtgagcctgctggagccctaccagtag

SEQ ID NO: 337344 - DNA, 321 bp, Artificial Sequence
  derived and/or modified sequence
atggcaagtcagctccaggtcttcagtccgccgagcgtttcaagctcagccttctgttccgccaaaaaactcaagattgagccctctggatgggacgtatcgggacagtctagcaacgacaagtactacacacatagcaagacactgccggccacgcaagggcaggccaacagttcccaccaggtcgcaaacttcaacattcctgcctatgaccaaggtctactattacctgctcctgccgtggagcacatcgtggttaccgccgctgattcctccggcagtgcggccaccagcaccttccagtcttcccaaaccctgtag

SEQ ID NO: 337345 - DNA, 360 bp, Artificial Sequence
  derived and/or modified sequence
atggcctctcagctccaggtgttcagtccaccctccgtctcaagtagtgcattttgctccgcaaagaagttgaaaatcgaacctagtggttgggacgtcagcggccagtcttccaatgacaagtattacacccactctaagaccttgcccgccactcagggccaagccaacagtagccaccaggtcgccaatttcaatatccctgcctacgatcaggggcttctgctgcccgctccagccgtggagcatattgtcgtcactgccgcggattccagtggctcggccgccacaagtacctttcaaagttctcagaccttgactcacagatcaaatgtctctctgttggaaccttaccagtag

SEQ ID NO: 337346 - DNA, 321 bp, Artificial Sequence
  derived and/or modified sequence
atggccagccagctgcaggtgttcagcccccccagcgtgagcagcagcgccttctgcagcgccaagaagctgaagattgagcccagcggctgggatgtgtctggccagagcagcaatgacaagtactacacccacagcaagaccctgcctgccacccagggccaggccaacagcagccaccaggtggccaacttcaacatcccagcctatgaccagggcctgctgctgcctgccccagctgtggagcacatcgtggtgacagctgctgacagcagcggcagcgctgccaccagcaccttccagagcagccagaccctgtag

SEQ ID NO: 337347 - DNA, 360 bp, Artificial Sequence
  derived and/or modified sequence
atggccagccagctgcaggtgttcagcccccccagcgtgagcagcagcgccttctgcagcgccaagaagctgaagattgagcccagcggctgggatgtgtctggccagagcagcaatgacaagtactacacccacagcaagaccctgcctgccacccagggccaggccaacagcagccaccaggtggccaacttcaacatcccagcctatgaccagggcctgctgctgcctgccccagctgtggagcacatcgtggtgacagctgctgacagcagcggcagcgctgccaccagcaccttccagagcagccagaccctgacccacaggagcaatgtgtccctgctggagccctaccagtag

SEQ ID NO: 337348 - DNA, 321 bp, Artificial Sequence
  derived and/or modified sequence
atggccagccagctgcaggtgttcagcccccccagcgtgagcagctccgctttctgcagtgcaaagaagttgaagattgagcctagcgggtgggacgtgagcggccaaagttctaatgataagtattacacccatagcaagacacttccagctacacagggacaggcaaatagctcccatcaggtggctaattttaacataccagcctatgaccagggcctcctgttaccagcccccgccgtggaacatatagtcgtcactgccgcggacagtagtggctctgcagcaacatcaacttttcagagttctcagacactgtag

SEQ ID NO: 337349 - DNA, 360 bp, Artificial Sequence
  derived and/or modified sequence
atggccagccagctgcaggtgttcagcccccccagcgtgagcagctccgcattttgttccgctaagaagcttaaaatcgagccatccggatgggacgtctcgggacaatcatcaaatgataaatattatacacactctaaaacccttcctgcaactcagggacaggctaatagctcccaccaggtggccaattttaacatcccagcttacgatcaagggcttttgctgccggcacccgctgttgagcatattgtggttacggccgctgattcctcaggatcagcggctacctccaccttccaaagcagccaaacgctcacacataggagcaatgtcagcctcctagagccctatcagtag

SEQ ID NO: 337350 - DNA, 321 bp, Artificial Sequence
  derived and/or modified sequence
atggcctcccagctccaggtgttcagccccccaagcgtctcctcatcagctttctgctccgcaaagaagctcaagatcgaaccatctggctgggatgtctctgggcagtcaagtaatgacaaatattacactcattctaagactcttccagctacgcagggacaagctaacagttctcaccaggtggccaatttcaacattcccgcatacgaccagggcttgctgctgcctgcgcctgctgttgagcacatcgtggtaacagctgcggatagtagcgggtcagccgcaacttctacgttccaatcaagccaaaccctttag

SEQ ID NO: 337351 - DNA, 360 bp, Artificial Sequence
  derived and/or modified sequence
atggcttcgcagctgcaagttttttcaccaccatcagtgagttcaagcgctttttgttccgctaagaaactgaagatagagcctagtggttgggacgtgtctggccagtcgagcaatgacaaatactacacacatagtaaaacgctgccggctacacagggacaagctaattcatctcaccaggtcgccaacttcaacatccccgcttacgaccaaggcctcttactgccagcaccagcagtagaacatatcgtggttaccgccgcagattcttcaggctccgcggctacctctacgtttcagtcatcccaaaccctgactcacaggagtaatgtttcactgcttgagccgtatcaatag

SEQ ID NO: 337352 - DNA, 570 bp, Artificial Sequence
  derived and/or modified sequence
gtttgttgtggtgacgagctgtgagcaatggcctgtgtttatgctgggcgagctttctttcctacttggggaggggggttcaggatgggaggatgcgggtagggaagagggggggaaaacccccaagctccacaacattttaagttttttgaagtcattccaaataaatctaagtgaactattgattttgatacaaagcaacagcctctgccacactgaagaagtgagctttaagcagagactagaagggtatggcatcacagctgcaagtgttttcgcccccatcagtgtcgtcgagtgccttctgcagtgcgaagaaactgaaaatagagccctctggctgggatgtttcaggacagagtagcaacgacaaatattatacccacagcaaaaccctcccagccacacaagggcaagccaactcctctcaccaggtagcaaatttcaacatccctgcttacgaccagggcctcctcctcccagctcctgcagtggagcatattgttgtaacagccgctgatagctcgggcagtgctgctacatcaaccttccaaagcagccagaccctga

SEQ ID NO: 337353 - DNA, 574 bp, Artificial Sequence
  derived and/or modified sequence
atctgtacaagggagatctagaggtctggcccaaagggaaacttttgctgccaccactttcaaagctttcgttaaaaaaacaaaagggagggggaaggtggagaaacaaccaaaattctgtcattccaaataaatctaagtgaactattgattttgatacaaagcaacagcctctgccacactgaagaagtgagctttaagcagagactagaagggtatggcatcacagctgcaagtgttttcgcccccatcagtgtcgtcgagtgccttctgcagtgcgaagaaactgaaaatagagccctctggctgggatgtttcaggacagagtagcaacgacaaatattatacccacagcaaaaccctcccagccacacaagggcaagccaactcctctcaccaggtagcaaatttcaacatccctgcttacgaccagggcctcctcctcccagctcctgcagtggagcatattgttgtaacagccgctgatagctcgggcagtgctgctacatcaaccttccaaagcagccagaccctgactcacagaagcaacgtttctttgcttgagccatatcaa

SEQ ID NO: 337354 - protein, 589 aa, Artificial Sequence
  derived and/or modified sequence
MQLLYTKDKSYWEDYRQFCKTTAKPVKSLTQLLLDDDCPTAIFPSKPFLQRCFPDFSTKNGTLTIGSKMMFQDGNGGTRSVVELGIAANGINKLLDAKSLGLKVFEDYARTWYWILIGLTIAMVLSWIFLILLRFIAGCLFWVFMIGVIGIIGYGIWHCYQQYTNLQERPSSVLTIYDIGIQTNISMYFELQQTWFTFMIILCIIEVIVILMLIFLRNRIRVAIILLKEGSKAIGYVPSTLVYPALTFILLSICICYWVVTAVFLATSGVPVYKVIAPGGHCIHENQTCDPEIFNTTEIAKACPGALCNFAFYGGKSLYHQYIPTFHVYNLFVFLWLINFVIALGQCALAGAFATYYWAMKKPDDIPRYPLFTAFGRAIRYHTGSLAFGSLIIALIQMFKIVLEYLDHRLKRTQNTLSKFLQCCLRCCFWCLENAIKFLNRNAYIMIAIYGRNFCRSAKDAFNLLMRNVLKVAVTDEVTYFVLFLGKLLVAGSIGVLAFLFFTQRLPVIAQGPASLNYYWVPLLTVIFGSYLIAHGFFSVYAMCVETIFICFCEDLERNDGSTEKPYFVTPNLHGILIKKQLVPQKQKE

SEQ ID NO: 337355 - protein, 712 aa, Artificial Sequence
  derived and/or modified sequence
TKAKKRPSNAGDPRTYDPDFKGPVANRSCTDVLCCMIFLLCIIGYIVLGLVAWVHGDPRRAAYPTDSQGHFCGQKGTPNENKTILFYFNLLRCTSPSVLLNLQCPTTQICVSKCPEKFLTYVEMQLLYTKDKSYWEDYRQFCKTTAKPVKSLTQLLLDDDCPTAIFPSKPFLQRCFPDFSTKNGTLTIGSKMMFQDGNGGTRSVVELGIAANGINKLLDAKSLGLKVFEDYARTWYWILIGLTIAMVLSWIFLILLRFIAGCLFWVFMIGVIGIIGYGIWHCYQQYTNLQERPSSVLTIYDIGIQTNISMYFELQQTWFTFMIILCIIEVIVILMLIFLRNRIRVAIILLKEGSKAIGYVPSTLVYPALTFILLSICICYWVVTAVFLATSGVPVYKVIAPGGHCIHENQTCDPEIFNTTEIAKACPGALCNFAFYGGKSLYHQYIPTFHVYNLFVFLWLINFVIALGQCALAGAFATYYWAMKKPDDIPRYPLFTAFGRAIRYHTGSLAFGSLIIALIQMFKIVLEYLDHRLKRTQNTLSKFLQCCLRCCFWCLENAIKFLNRNAYIMIAIYGRNFCRSAKDAFNLLMRNVLKVAVTDEVTYFVLFLGKLLVAGSIGVLAFLFFTQRLPVIAQGPASLNYYWVPLLTVIFGSYLIAHGFFSVYAMCVETIFICFCEDLERNDGSTEKPYFVTPNLHGILIKKQLVPQKQKE

SEQ ID NO: 337356 - DNA, 2139 bp, Artificial Sequence
  derived and/or modified sequence
accaaggccaagaagagacccagcaacgccggcgaccccagaacctacgaccccgacttcaagggccccgtggccaacagaagctgcaccgacgtgctgtgctgcatgatcttcctgctgtgcatcatcggctacatcgtgctgggcctggtggcctgggtgcacggcgaccccagaagagccgcctaccccaccgacagccagggccacttctgcggccagaagggcacccccaacgagaacaagaccatcctgttctacttcaacctgctgagatgcaccagccccagcgtgctgctgaacctgcagtgccccaccacccagatctgcgtgagcaagtgccccgagaagttcctgacctacgtggagatgcagctgctgtacaccaaggacaagagctactgggaggactacagacagttctgcaagaccaccgccaagcccgtgaagagcctgacccagctgctgctggacgacgactgccccaccgccatcttccccagcaagcccttcctgcagagatgcttccccgacttcagcaccaagaacggcaccctgaccatcggcagcaagatgatgttccaggacggcaacggcggcaccagaagcgtggtggagctgggcatcgccgccaacggcatcaacaagctgctggacgccaagagcctgggcctgaaggtgttcgaggactacgccagaacctggtactggatcctgatcggcctgaccatcgccatggtgctgagctggatcttcctgatcctgctgagattcatcgccggctgcctgttctgggtgttcatgatcggcgtgatcggcatcatcggctacggcatctggcactgctaccagcagtacaccaacctgcaggagagacccagcagcgtgctgaccatctacgacatcggcatccagaccaacatcagcatgtacttcgagctgcagcagacctggttcaccttcatgatcatcctgtgcatcatcgaggtgatcgtgatcctgatgctgatcttcctgagaaacagaatcagagtggccatcatcctgctgaaggagggcagcaaggccatcggctacgtgcccagcaccctggtgtaccccgccctgaccttcatcctgctgagcatctgcatctgctactgggtggtgaccgccgtgttcctggccaccagcggcgtgcccgtgtacaaggtgatcgcccccggcggccactgcatccacgagaaccagacctgcgaccccgagatcttcaacaccaccgagatcgccaaggcctgccccggcgccctgtgcaacttcgccttctacggcggcaagagcctgtaccaccagtacatccccaccttccacgtgtacaacctgttcgtgttcctgtggctgatcaacttcgtgatcgccctgggccagtgcgccctggccggcgccttcgccacctactactgggccatgaagaagcccgacgacatccccagataccccctgttcaccgccttcggcagagccatcagataccacaccggcagcctggccttcggcagcctgatcatcgccctgatccagatgttcaagatcgtgctggagtacctggaccacagactgaagagaacccagaacaccctgagcaagttcctgcagtgctgcctgagatgctgcttctggtgcctggagaacgccatcaagttcctgaacagaaacgcctacatcatgatcgccatctacggcagaaacttctgcagaagcgccaaggacgccttcaacctgctgatgagaaacgtgctgaaggtggccgtgaccgacgaggtgacctacttcgtgctgttcctgggcaagctgctggtggccggcagcatcggcgtgctggccttcctgttcttcacccagagactgcccgtgatcgcccagggccccgccagcctgaactactactgggtgcccctgctgaccgtgatcttcggcagctacctgatcgcccacggcttcttcagcgtgtacgccatgtgcgtggagaccatcttcatctgcttctgcgaggacctggagagaaacgacggcagcaccgagaagccctacttcgtgacccccaacctgcacggcatcctgatcaagaagcagctggtgccccagaagcagaaggagtag

SEQ ID NO: 337357 - DNA, 2139 bp, Artificial Sequence
  derived and/or modified sequence
accaaggcaaaaaagcggccgtccaacgctggtgacccccgcacctacgacccagatttcaagggtcctgttgcgaacaggagctgcaccgatgtgctttgttgtatgatttttttattgtgcatcattgggtatattgtgttgggactcgtggcctgggtgcacggggatcctcgcagggcggcctatccgactgatagccaggggcacttttgtgggcagaaggggacaccaaatgaaaacaaaaccatcttgttttatttcaacctgcttcgttgcacttcaccgagcgtgctcctcaacctgcagtgcccgacgacccaaatatgcgtgtctaaatgccctgagaaattccttacatatgtcgaaatgcaactgttatacactaaggataagagttactgggaggactatagacagttctgcaagacaaccgccaagccggtgaagagtctgacccagttgttgcttgatgatgactgcccaactgccatatttccatccaaaccttttctccagaggtgtttccctgattttagcaccaaaaatggtaccctgacaatcggttcaaagatgatgttccaggatggtaacggcggaacgagatcagtggtagagttaggaattgctgccaatggcataaacaaacttctggatgccaagagcctgggccttaaggttttcgaggattatgcgagaacctggtactggatcctcattgggctaactatcgccatggtcctgtcttggatttttcttatacttttgagatttattgcaggatgccttttctgggtgtttatgatcggggtgatagggattatcggctatgggatctggcattgttaccagcagtataccaacctgcaagagagaccaagcagcgtactgaccatttacgatattggcatccagacgaacatctctatgtacttcgaattgcaacagacgtggtttacattcatgatcatcctgtgtattattgaggtgatcgtgattctgatgttgatctttcttaggaaccgcattcgcgtggccattattctgctgaaggaaggctccaaggctattggctacgtaccgagtaccctggtttatccagccctgacgtttatcttactgtctatatgcatctgttattgggttgttactgcggtgttcttggccacatccggagtaccagtatacaaagttattgcccctggtggccattgcatccacgagaaccagacctgcgacccggagatttttaatactactgagatcgccaaggcttgccccggggcactttgcaacttcgcgttttatggagggaaaagcctgtaccaccaatatatccctacttttcatgtgtacaacttgttcgtttttctatggcttattaacttcgtgattgccttagggcaatgcgcccttgcaggcgcttttgccacatattattgggccatgaagaaaccagacgatataccccggtatccactttttacagctttcggccgcgccatcaggtaccacactggatctctggccttcgggagcttgattatagctctgattcaaatgttcaagattgttcttgaatacctcgaccatcggcttaaacgcacccagaacactctgtccaaattccttcagtgctgtttgagatgctgcttctggtgcttggagaatgccattaaattcctgaacagaaatgcttatataatgatcgccatttatggacggaatttctgtcggagcgctaaagatgcatttaatctgttaatgaggaatgttctcaaagtggcagtgacagacgaggtgacttatttcgtgttgttcctgggtaagctgctagtcgctggctcgatcggtgtcttggccttcctgtttttcacgcagcggcttcccgtgattgcccaaggccccgctagtctgaattattattgggtgcccctgctgactgtgatattcggaagttacctgattgctcatgggttcttttcagtgtatgccatgtgcgtagaaaccatttttatctgtttttgcgaggatttagagaggaatgatgggagtactgagaaaccatatttcgtgactccgaatctgcacggtattctgatcaagaagcagcttgtgcctcagaagcagaaggaatag

SEQ ID NO: 337358 - DNA, 2139 bp, Artificial Sequence
  derived and/or modified sequence
accaaggccaagaagaggcccagcaatgctggggaccccaggacctatgaccctgacttcaagggccctgtggccaacagaagctgcacagatgtgctgtgctgcatgatcttcctgctgtgcatcatcggctacatcgtgctgggcctggtggcctgggtgcatggagaccccaggagagctgcctaccccacagacagccagggccacttctgtggccagaagggcaccccaaatgaaaacaagaccatcctcttctacttcaacctgctgcgctgcaccagccccagcgtgctgctgaacctgcagtgccccaccacccagatctgtgtgtccaaatgtcctgagaagttcctgacctacgtggagatgcagctgctgtacaccaaggacaagagctactgggaggactaccggcagttctgcaagaccacagccaagcctgtgaagagcctgacccagctgctgctggatgatgactgccccacagccatcttccccagcaagcccttcctgcagcgctgcttcccagacttcagcaccaagaatggcaccctgaccatcggcagcaagatgatgttccaggatggaaatggaggcaccaggtctgtggtggagctgggcattgctgccaacggcatcaacaagctgctggatgccaagagcctgggcctgaaggtgtttgaagattatgcccggacctggtactggatcctgattggcctgaccatcgccatggtgctgtcctggatcttcctgatcctgctgcgcttcatcgccggctgcctcttctgggtgttcatgattggagtcatcggcatcatcggctacggcatctggcactgctaccagcagtacaccaacctgcaggagcggcccagctctgtgctgaccatctatgacatcggcatccagaccaacatctccatgtactttgagctgcagcagacctggttcaccttcatgatcatcctgtgcatcatcgaggtgattgtcatcctgatgctgatcttcctgaggaaccgcatccgggtggccatcatcctgctgaaggagggcagcaaggccatcggctacgtgcccagcaccctggtgtacccagccctgaccttcatcctgctgagcatctgcatctgctactgggtggtgacagctgtgttcctggccaccagcggcgtgcctgtgtacaaggtgattgcccctgggggccactgcatccacgagaaccagacctgtgaccctgagatcttcaacaccacagagatcgccaaggcctgccctggggccctgtgcaactttgccttctacggcggcaagagcctgtaccaccagtacatccccaccttccacgtgtacaacctgtttgtgttcctgtggctgatcaactttgtgattgccctgggccagtgtgccctggccggggcctttgccacctactactgggccatgaagaagccagatgacatcccccgctaccccctcttcaccgccttcggccgggccatccgctaccacacaggcagcctggccttcggcagcctcatcatcgccctgatccagatgttcaagatcgtgctggagtacctggaccaccggctgaagaggacccagaacaccctgagcaagttcctgcagtgctgcctgcgctgctgcttctggtgcctggagaatgccatcaagttcctgaacagaaatgcctacatcatgattgccatctatggaagaaacttctgccgcagcgccaaggatgccttcaacctgctgatgagaaatgtgctgaaggtggccgtgacagatgaggtgacctactttgtgctcttcctgggcaagctgctggtggccggcagcattggagtgctggccttcctgttcttcacccagaggctgcccgtcatcgcccagggccctgccagcctgaactactactgggtgcccctgctgaccgtcatcttcggcagctacctgattgcccacggcttcttctctgtgtatgccatgtgtgtggagaccatcttcatctgcttctgtgaggacctggagagaaatgatggcagcacagagaagccctactttgtgacccccaacctgcacggcatcctgatcaagaagcagctggtgccccagaagcagaaggagtag

SEQ ID NO: 337359 - DNA, 2139 bp, Artificial Sequence
  derived and/or modified sequence
accaaggccaagaagcggcccagcaacgccggcgacccccggacctatgaccccgattttaagggccctgtcgcaaataggagttgcaccgatgtgctgtgctgcatgatctttttgctgtgtattatagggtacattgtgctgggactggtggcctgggtgcacggtgaccctcgacgggccgcttaccccaccgacagccaaggacatttttgcgggcaaaaaggtaccccgaacgagaataagacaattcttttctattttaacctgctgcgctgcacaagtcccagcgtgcttctaaacctccagtgtccaacaacccaaatttgcgtgtccaagtgtcctgaaaaattccttacctacgtggagatgcagctcctgtacaccaaggataaaagttattgggaggactaccgccaattttgtaagaccacggccaaacccgtcaagtccctgactcagctcctgctggatgatgattgccctactgctatctttccctccaaaccgtttctccagaggtgtttccccgatttttctactaagaacggcacactgaccatcggctccaaaatgatgtttcaggacgggaatggcggcacacggagtgtggtcgagctgggcatcgctgccaacggcataaataagctcctggatgctaaatcgctggggctgaaggtgttcgaggactacgcacgcacatggtattggatccttattggtcttacaattgctatggtcctgagctggatctttctgatcttgctgcggtttattgcaggatgcctgttctgggtgttcatgattggcgttattgggatcattggctacgggatatggcattgctaccagcagtataccaacttgcaagagcgtcccagctcagtattaaccatatatgacatcggaattcagacaaacattagcatgtatttcgagttgcaacagacttggttcacattcatgatcattttgtgcatcatcgaggtgatcgtgatcctcatgctgatcttcctaagaaacaggatcagagtagcgattatcctcctgaaggagggaagcaaggccatcggatacgtgccctcaacgcttgtgtatcctgcacttacatttatccttctttccatctgtatttgctattgggttgttaccgcagtgttccttgctacatctggagttcctgtctacaaggttatagctccaggaggtcactgtatccatgagaaccagacctgcgacccggaaattttcaacacaaccgagatcgccaaggcatgccccggagcactgtgcaacttcgctttctacggaggaaaaagcttatatcaccaatacatccccacgttccacgtgtacaatcttttcgtcttcctgtggctgattaatttcgttatcgccttgggacaatgcgcgctcgcaggagcatttgccacatattattgggccatgaagaaaccggacgacattccaagataccctttgtttaccgcgttcggaagagcaattagataccacactgggtcactagcattcggatctttaatcattgctctcattcagatgtttaaaatcgtgctggaatatctggaccaccgtctgaaacgaacccagaataccctcagcaagttcttgcaatgttgtttgagatgttgcttctggtgtcttgagaacgccattaagttcctcaaccggaacgcgtacattatgattgctatctacggcaggaacttctgtaggtcggcgaaggatgcttttaacttgctgatgaggaatgtcctgaaagtagctgtgaccgacgaagtcacttacttcgtcctgtttctcggtaagctcctggtcgctggatctatcggcgtcctcgcctttctgttctttacacagcggctgcccgtgatcgcccaaggccctgcctctctgaattattactgggtgcccttgttgacagtgatttttggtagttatttgattgcccacggcttcttctccgtctatgcaatgtgtgtagagacgatctttatttgcttctgcgaagatctggagcgcaacgacgggtcaacagagaaaccctatttcgtgacccccaatctccatggtattcttatcaaaaagcagctggtgcctcagaagcagaaggaatag

SEQ ID NO: 337360 - DNA, 2139 bp, Artificial Sequence
  derived and/or modified sequence
actaaggcaaaaaaaagaccttccaatgcaggtgacccacggacttacgatcctgatttcaaaggccctgtggccaacagaagctgcacagacgtcctgtgttgcatgatcttcttgctgtgcatcattggttatattgtcttaggcttagtcgcttgggtacacggagatcctagacgggctgcttatccaactgactcacaggggcacttttgcggacagaaaggaactcctaacgaaaacaaaactatcctgttttactttaacctgttgcgatgtactagtccgtctgtgctgcttaacctgcagtgtccaacaacacagatatgcgtttctaagtgcccagagaaatttctgacgtacgtcgagatgcaactcctttatactaaggataaatcgtattgggaggactacaggcaattttgcaaaaccactgcgaagcccgtgaagtccctaactcaattgctcttagacgacgactgccccacagctatattcccttccaagccgtttctgcagcggtgttttcctgatttctctactaagaatgggactcttactattggaagcaagatgatgtttcaggatggaaatgggggtacccgtagcgtggtcgagctggggattgccgcaaacgggatcaacaaattgttggacgccaagagtttagggttgaaagtatttgaagactacgcgcgaacgtggtactggatactgataggtctcacaatcgctatggtactaagctggatattcctgatcctccttcggtttatagccggatgtctcttctgggtgtttatgatcggcgtcatcggtatcattgggtatggaatctggcattgttaccagcaatacaccaacctccaggagcgtcccagctctgtccttactatatacgacatcgggatccaaacaaatatcagtatgtatttcgagcttcagcagacttggtttacctttatgatcattctctgcattatcgaagtgattgttattctgatgctgatttttctgagaaatagaattcgcgtcgcgatcatcctgctgaaagagggttccaaggcaatcggttatgtgccatctaccctggtttatccagctcttaccttcatcctactgagcatctgcatttgttactgggtggttaccgcagtattcctggcaacctcgggagtaccagtgtacaaggtaatcgccccaggcggacattgtatccatgagaaccagacttgcgaccccgagattttcaacactacagaaatcgctaaggcttgccctggcgctctgtgtaattttgctttctatggcggaaaaagtctctaccaccaatatattcctactttccatgtgtacaatctgtttgtgttcctctggctcataaacttcgtgatcgcgctggggcagtgtgctctagcaggcgcatttgctacctattactgggccatgaagaagcctgacgatatcccgcgatatcccctgtttacagccttcgggagagccattaggtatcataccgggagccttgccttcgggtcacttatcatagctttgatccagatgtttaagattgttctcgaatatttggaccaccggttgaagagaactcaaaacaccctctcgaaattcctgcaatgctgtctcagatgctgtttctggtgcttggagaacgcaatcaaatttcttaatcgaaatgcctacattatgatcgccatttacggaagaaacttctgtcgttcagcgaaagacgcctttaacttgctgatgcggaacgtcctgaaagttgcggtgaccgacgaagttacgtactttgttctgttcctgggaaaacttttggtggccggatccattggcgtcctggcattcctcttctttacccagaggcttcccgtgatagctcagggaccggcatccctgaactactactgggtgccacttctgactgtcatttttggatcctatcttattgcacacggattcttctccgtctacgctatgtgcgtggagacaatctttatatgtttttgcgaagacttggaacgcaatgacggatccacagagaaaccatattttgtaacccccaacttacacggcatactgattaagaagcagctggtcccccagaagcagaaggaatag

SEQ ID NO: 337361 - DNA, 2356 bp, Artificial Sequence
  derived and/or modified sequence
actaaggccaagaaaaggccttcaaatgcaggtgatccaaggacatatgacccagatttcaaggggcctgttgccaacaggagttgtacagatgttctgtgctgtatgatcttcctactgtgtattattggctacattgttttaggacttgtggcctgggtacatggggaccccagaagagcagcctatcctacagacagccagggccacttttgtggccagaagggcactcccaatgagaacaagaccattttgttttactttaacctgttacgctgtaccagtccctccgtgttgctaaacctacagtgccctaccacacagatctgtgtctccaagtgcccagaaaaatttttaacctatgtggaaatgcaacttttgtacacaaaagacaaaagctactgggaagactaccgtcagttctgtaagaccactgctaagcctgtgaagtctctcacacagcttttactggatgatgattgtccaacagcgatttttcccagcaaaccttttctccagagatgtttccctgacttctctaccaaaaatggcactttaacaataggaagtaagatgatgtttcaagatggaaatggagggacaagaagtgttgtagaactcgggattgctgcaaatggtatcaataaacttcttgatgcaaagtcacttggattgaaagtgtttgaagactatgcaagaacttggtattggattctcattggcctgacgattgccatggtccttagttggatatttttgatacttctgaggttcatagctggatgcctcttctgggtcttcatgattggtgtgattggaattataggttatggaatatggcactgttaccagcagtacaccaatcttcaggaacgcccaagttctgtattaactatctatgacatcgggattcagactaacataagcatgtactttgaactgcaacaaacatggttcacatttatgataatactctgcatcattgaagtgattgtcatcctcatgctgatcttcctcaggaatcgaatccgagtcgccattatcctgctgaaggaaggaagcaaagccattggatatgttcctagtacattagtctatccagctttaactttcattttgctctcaatctgcatttgctactgggtcgtgacagcagttttcttggcgacatcgggggtacctgtatacaaagtcatagctccaggggggcattgtatacatgaaaatcaaacctgtgacccagagatttttaatacaactgaaattgccaaagcttgccctggggctctgtgtaactttgctttctatggtggaaagagcttgtaccatcagtacatccctaccttccatgtatacaacttatttgtctttctctggcttataaacttcgtcattgcattaggtcagtgcgcccttgctggtgcattcgctacttattactgggccatgaaaaaacctgatgacatcccacgatatccactttttactgcatttggacgagccatacgatatcacacaggatccctagcatttggatctttaattattgcattaattcaaatgtttaaaattgtactagaatacttggaccaccgtcttaaacgtacccagaacacattgtctaaattcctacaatgctgcctgagatgctgcttctggtgtttggaaaatgcaataaagtttttaaacagaaatgcctatattatgattgcaatatatggcagaaacttctgcaggtcagcaaaagatgctttcaatctgctgatgagaaatgttttgaaagttgcagttacagatgaagttacatactttgtattattcctggggaaacttctagttgctggaagtataggtgttctggccttcctattcttcacacaaagactgccagtgattgcacaaggaccagcatctttaaattactactgggtacctttgctgacagtcatttttgggtcttacctgattgcacatgggttcttcagcgtctatgcaatgtgtgttgaaacaattttcatctgcttctgtgaagatctggaaagaaatgatggatctacagaaaaaccctacttcgtaacccctaacctgcatggaattctgatcaagaagcaactagttccccagaagcagaaagagtagaaaagctccaaacagtgtcactcatttttaagtagaagttgtgtaaattaggttgattgtaatttggaaatgttgcttttgagtaatgtgaaatttctgtgcttaattctaagaagtcagcacctggtactacctgaggtgtcaggtatttgatgacattagctgctgtctactttatagacagtggtcccagctaaagatcaaaatgttaatgtca

SEQ ID NO: 337362 - DNA, 730 bp, Artificial Sequence
  derived and/or modified sequence
actttgcgggcggcactttttccaggttgttaatccagctaatggagaaggatagatgcacgctacttggtttagaaaaaaaaacaaaaatgagcaaacgagacgccccttccgttttatgataactaagctgcagggaaataaatcggctggccctactgcaatctactgcactcgagaaacatcacagaaaattctttgatttatcttaatagtgacaagtgagcctgcttctgtcaattactgaagctataaggagattttttaaaaattaaacttcaacacaatgagaacctggaacagtggtggcacaaagtaagtgctcaggaactatctgttgaatgagtgttgccacatctgcaaacttcctgggagagtaatggggattcgagtgcttcgattatctttggtggtcatcctcgtattattactggtagctggtgctttgactgccttacttcccagtgttaaagaagacaagatgctcatgttgcgtagggaaataaaatcccagggcaagtccaccatggactcctttactctcataatgcagacgtacaacagaacagatctcttattgaaacttttaaatcattatcaggctgtaccaaatctgcacaaagtgattgtggtatggaacaatattggagagaaggcaccagatgaattatggaattctctagggccccaccctatccctgtgatcttcaaacaacagacagcaaacagg

SEQ ID NO: 337363 - protein, 117 aa, Artificial Sequence
  derived and/or modified sequence
MGIRVLRLSLVVILVLLLVAGALTALLPSVKEDKMLMLRREIKSQGKSTMDSFTLIMQTYNRTDLLLKLLNHYQAVPNLHKVIVVWNNIGEKAPDELWNSLGPHPIPVIFKQQTANR

SEQ ID NO: 337364 - protein, 317 aa, Artificial Sequence [sequence omitted]

SEQ ID NO: 337365 - DNA, 954 bp, Artificial Sequence
  derived and/or modified sequence
atgggaatacgtgtcctgcggttgtcactcgtagtgattctcgttttgctccttgtagccggcgctctgacagcactgctaccttctgtcaaggaagataagatgctcatgctgcgccgcgagattaaatcacaaggcaaaagcaccatggacagctttacgctgataatgcagacatataaccgtaccgatctgttgttaaagcttcttaatcattaccaggctgtgcccaacctgcataaggtgattgttgtgtggaataatatcggtgagaaggcgccagacgaactctggaactccctcggacctcatcccattcctgtcatctttaaacagcagacagccaaccggatgaggaaccgtcttcaagtttttcctgaactggaaacaaacgctgtgttgatggtcgacgacgacacactgatctctactccagacctagttttcgctttcagcgtttggcaacagtttcctgaccagatagtgggctttgtgccacgtaagcacgtgtccacatcttccggcatctattcgtatggtagcttcgagatgcaggcgcctggctctggaaacggagatcaatactccatggtgttaatcggagcttcatttttcaattccaaatacttggaactgttccagaggcagcccgctgccgtgcatgcccttatcgatgatacccagaactgtgatgatatcgcgatgaacttcataattgctaaacacatcggcaaaacctcaggcatcttcgtgaaaccagttaatatggataatcttgagaaggagactaatagtggctattcaggtatgtggcatagagctgagcacgctttacagcgaagttactgcatcaacaaattggtgaatatttacgattctatgcctcttcggtactcaaacattatgatctctcagttcggctttccatatgcaaactataaaaggaagatttag

SEQ ID NO: 337366 - DNA, 954 bp, Artificial Sequence
  derived and/or modified sequence
atgggcatccgggtgctgcggctgagcctggtggtgatcctggtgctgctgctggtggccggggccctgacagccctgctgcccagcgtgaaggaggacaagatgctgatgctgcggcgggagatcaagagccagggcaagagcaccatggacagcttcaccctcatcatgcagacctacaacagaacagacctgctgctgaagctgctgaaccactaccaggccgtgcccaacctgcacaaggtgattgtggtgtggaacaacattggagagaaggccccagatgagctgtggaacagcctgggcccccaccccatccctgtgatcttcaagcagcagacagccaacaggatgaggaaccggctgcaggtgtttcctgagctggagaccaatgctgtgctgatggtggatgatgacaccctcatcagcaccccagacctggtgtttgccttctctgtgtggcagcagttcccagaccagatcgtgggctttgtgcccaggaagcacgtgtccaccagcagcggcatctacagctatggcagctttgagatgcaggcccctggcagcggaaatggagaccagtacagcatggtgctgattggagccagcttcttcaacagcaagtacctggagctgttccagaggcagcctgctgctgtgcacgccctgattgatgacacccagaactgtgatgacatcgccatgaacttcatcatcgccaagcacatcggcaagaccagcggcatctttgtgaagcctgtgaacatggacaacctggagaaggagaccaacagcggctacagcggcatgtggcacagagctgagcacgccctgcagaggagctactgcatcaacaagctggtgaacatctatgacagcatgcccctgcgctacagcaacatcatgatcagccagtttggcttcccctatgccaactacaagaggaagatctag

SEQ ID NO: 337367 - DNA, 954 bp, Artificial Sequence
  derived and/or modified sequence
atgggcatccgggtgctgcggctgagcctggtggtgatcctggtgttgctgctcgtggctggggccttaactgcgttacttccatcggtgaaagaagacaagatgctcatgctgcggcgggagattaagtctcaaggaaaaagcacaatggactcattcacacttataatgcagacttataatcggacagacctactcctcaagctgctcaaccattatcaggcagtcccaaacctgcataaagttatagtggtgtggaataacatcggcgaaaaagcccctgacgaactctggaattctctgggtccacaccctattcctgtaatctttaagcaacaaactgccaatagaatgagaaatcgtctgcaggtgttccccgaactcgagacaaatgcagtgcttatggtggatgacgacaccttaatatccacacctgatctcgttttcgccttttccgtgtggcagcagtttccagatcagattgttggcttcgtgcctcggaagcatgtgagtacgtcatccggaatttatagttacgggtcctttgaaatgcaggcccctggaagcggcaacggggaccagtactctatggtgctgattggcgcgtctttcttcaactccaaatacctggaactgtttcagagacaacctgccgcagttcatgcgctgattgatgacacgcagaactgcgacgatattgccatgaattttataatcgccaagcacattgggaaaacaagcggtatcttcgtaaagcccgttaacatggataacctagaaaaggaaaccaacagcgggtattctgggatgtggcaccgggctgagcatgctctgcagcgctcttactgtatcaacaagcttgtcaatatctacgattcgatgcctctacgttacagcaacatcatgatctctcagttcggttttccttacgcaaattataaacgcaagatttag

SEQ ID NO: 337368 - DNA, 954 bp, Artificial Sequence
  derived and/or modified sequence
atgggaatcagagtactgcgcctgagcctcgtggtgatacttgtgttgttactggtcgcaggggctcttacagctctcttgcccagcgttaaggaggacaaaatgctgatgctgagaagggagatcaagagccaggggaaaagtaccatggattcattcaccctcatcatgcagacctataatcggacagatctgcttctgaagttacttaaccattatcaggcagtccctaatctacacaaggtgatcgtagtatggaacaatattggtgagaaggccccagatgaactgtggaatagtttaggaccccaccctattcctgttatttttaagcaacagaccgctaatagaatgcggaatcgcctgcaggttttccccgagcttgaaaccaatgccgttttgatggttgatgacgatacactgatctccaccccagatctcgtctttgcattcagtgtgtggcagcagtttcccgatcagattgtaggtttcgtcccacggaaacatgtgtccacctcctctggcatctactcatacgggagcttcgagatgcaggccccaggctccggtaatggagaccagtactccatggtgttgataggggcttctttcttcaattccaagtacttggagctgttccagaggcaacccgctgcagttcacgccctgatcgatgatacccagaactgtgatgacatagcgatgaatttcatcatcgccaagcatatcggtaagacatccgggattttcgtcaaaccggttaacatggataatctggaaaaggagaccaacagtggatacagtgggatgtggcatagggctgaacatgcgcttcagagatcctattgtatcaataagttggttaatatctatgactctatgcctttgaggtatagtaacattatgatctctcagtttggtttcccatatgcaaactataaacgaaagatttag

SEQ ID NO: 337369 - DNA, 954 bp, Artificial Sequence
  derived and/or modified sequence
atgggcatcagagtgctgagactgagcctggtggtgatcctggtgctgctgctggtggccggcgccctgaccgccctgctgcccagcgtgaaggaggacaagatgctgatgctgagaagagagatcaagagccagggcaagagcaccatggacagcttcaccctgatcatgcagacctacaacagaaccgacctgctgctgaagctgctgaaccactaccaggccgtgcccaacctgcacaaggtgatcgtggtgtggaacaacatcggcgagaaggcccccgacgagctgtggaacagcctgggcccccaccccatccccgtgatcttcaagcagcagaccgccaacagaatgagaaacagactgcaggtgttccccgagctggagaccaacgccgtgctgatggtggacgacgacaccctgatcagcacccccgacctggtgttcgccttcagcgtgtggcagcagttccccgaccagatcgtgggcttcgtgcccagaaagcacgtgagcaccagcagcggcatctacagctacggcagcttcgagatgcaggcccccggcagcggcaacggcgaccagtacagcatggtgctgatcggcgccagcttcttcaacagcaagtacctggagctgttccagagacagcccgccgccgtgcacgccctgatcgacgacacccagaactgcgacgacatcgccatgaacttcatcatcgccaagcacatcggcaagaccagcggcatcttcgtgaagcccgtgaacatggacaacctggagaaggagaccaacagcggctacagcggcatgtggcacagagccgagcacgccctgcagagaagctactgcatcaacaagctggtgaacatctacgacagcatgcccctgagatacagcaacatcatgatcagccagttcggcttcccctacgccaactacaagagaaagatctag

SEQ ID NO: 337370 - DNA, 3859 bp, Artificial Sequence
  derived and/or modified sequence
cttcatgattaactccccaaggtcctgcatattttctcaatgggccaccgcgcccggccagaagatttttatggtaaaattttgtgatgggaaaactcatcccggaaaatgttgagacctgatgctgagtcctcagcagctcagagaatacgtacttctgtcccaggtcacccaaacattgacctgtgtcggttccccactaggaacaaaatgtaactgaggacgttgtcagatgcttgtcctcgtcaccctgagcttgttggctgctatctaattcttattctttcattttcttgcccgcacgttcttgatagcagatcactgacaacagccattggaagcttaggaaaagggtatgtgccgggcgcggtggctcacacctgtaatcccagcactttgggaggctgaggtgggcggatcacgaggtcaggagatcgagaccatcctggctaacacggtgaaaccgtctctactaaaactacaaaaattagccgggtgtggtggcggtcgcctgtagtcccagctactcgggaggctgaggcaggagagtgacgtgaacccgagaggtagagcttgcagtaagcagagatcatgccactgcactccagcctgggccagaatgagactccgtctcaaaaaaaaaaaaaaaaaaagcatgtgtaacgtgaaaaaatggacactttagccatcgcctgactttctgttgaattgggaaagagcctcctcccgtccacatgggatggccttcctgatgtggctctccaagaccatccctggagggcataaaacctcacaaatgcatcaggccgtgtgctggggatggggcatcgtcacgccaggtctgactaggaaggaggatggggaggcagggctgggggctttgaggtcgaggcgtggccgtggattccagaaagccccttggctggtgtgcgtgcctgcccagcggcatccgtgtatcctaacacctgccctccgtgtccctgcatctgcaggccatgtcaaaggacgccctgaatctggcgcagatgcaggagcagacgctgcagttggagcaacagtccaagctcaaacaacttgtcaatgaggatttacggaagcaggaggagtccgtgcagaagcaccatcagaccttcttggagtccatcagggcggctggcaccttgtttggggaaggattccgtgcctttgtgacagaccgggacaaagtgacagccacggtggctgggctgacgctgctggctgtcggggtctactcagccaagaatgcgacagccgtcactggccgctacatcgaggctcggctggggaagccgtccctagtgagggagacgtcccgcatcacggtgcttgaggcgctgcggcaccccatccagcaggtcagccggcggctcctcagtcgaccccaggacgtgctggagggtgttgtgcttagtcccagcctggaagcacgggtgcgcgacatcgccataatgacaaggaacatcaagaagaaccggggcctgtacaggcacatcctgctgtacgggccaccaggcaccgggaagacgctgtttgccaagaaactcgccctgcactcaggcatggactacgccatcatgacaggcggggacgtggcccccatggggcgggaaggcgtgaccgccatgcacaagctctttgactgggccaataccagccggcgcggcctcctgctctttgtggatgaagcggacgccttccttcggaagcgagccactgagaagataagcgaggacctcagggccacactgaacgccttcctgtaccgcacgggccagcacagcaacaaattcatgctgatcctggccagctgccaccccgagcagttcgactgggccatcaatgcctgcatcgacgtgatggtccacttcgacctgccagggcaggaggagcgggcgcgcctggtgagaatgtatcttaacgagtatgttcttaagccggccacagaaggaaagcggcgtctgaagctggcccagtttgactacgggaggaagtgcttagagatcgctcggctgacagagggcatgtcatgccggaagatcgcacagctggccgtgtcctggcaggccacggcgtatgcctccaaggacggggtcctgaccgaggccatgatggacgcctgcgtgcaagactttgtccagcagcaccagcagatgatgcgctggctgaagggggagaggcctgggcccgaggacgagcaaccctcatcctgagtccatggggagaccacacctcacggagcctggccgcggacccctcccacccctgcctttgcggccccgcacatttaggaaatactccccgtaataaagtcccacgggggccgcaccgctgtgtctattggctgacacggggcggggtttggggccccctaacgtccccctggggtcaaaggtgacagaaaaggcagaagctggggctttctggaggatttaaccacagaggggtgggcttcacaggaggtggctgccacggcggggccgggtgcccgtgccccatcctgaggccgtgcatacgcgggtgccccttcgcctccctcccctccgccagagctgcctgtggccagacacacggtggagggaagtgcacgcgaaacagacacagcggcttcaaatagatgccgcccctgcccgcgctttgcagctagtccctgcaaaccttgatgatggggctgggcgcggtggctcacgcctggaatctcagcgaggccaaggagagtggatcacctgaggtcgggagttccagaccagcctggccaacatggtgaaactccatctctcctaaaaaaaaaaaaaaaaaaaaaaaaaaaaaaaaaaaaattagccggccgtggtggcaagtgcctgaaatcccaggtactcaggaggctgaggcaggagaatcacttgagcccgggaagtggaggttgcactgagctgagaccatggaattgcactgcagcatgggcaacaagagtcaaactccctctaaaaaaaaaaaaaaaaaaagggccaggtggcacatgccggtggtcccagcttcttggcttggaggctgaggtaggaggatcgcctgagcatgggaggcagaggttgcagtgagccaagatcgcaccattgcactccagcctggatgatagagtgagactgtacctctaaataaccaaaaccttgattacagccatggggtgggggtgggggtcaggggcgtctgactatggctggggaactcatttggtttttctcctctcttatttttttgggtagagacagggtccctttgttgcccaggctggtctccaactcctgggctcaagcaatcctcctgcctcggcttcctaaagtgttgggattacaggcttgagccaccgtgcctggtctgttttttttttttttttggcaatagagtcttgctcgcccagggtggagtgcagtggtgtgatctcggctcactgcaacctccaccttcagggtgtcaggcctctgggcccaagctaagccatcatatctcctgtgacctgcacttatacatccagatggcctgaagcaactgaagatccacaaaataagtgaaaagagccttaactgatgacattccaccattgtgatttgtttctgccccaccctagctgatcaatgtactttgcaatctcccccacccttaagaaggttctttgtcattctccccacccttgagaatgtactttgtgagatccatcccctgcccgcaaaacattgtccctaactccaccgcctatcccaaaacctgtaagaactagtgataatcccaccaccctttgctgactctctttttgaactcagcccgcctgcacccaggtgaaataaacagccttgttgctcac

SEQ ID NO: 337371 - protein, 411 aa, Artificial Sequence
  derived and/or modified sequence
MSKDALNLAQMQEQTLQLEQQSKLKQLVNEDLRKQEESVQKHHQTFLESIRAAGTLFGEGFRAFVTDRDKVTATVAGLTLLAVGVYSAKNATAVTGRYIEARLGKPSLVRETSRITVLEALRHPIQQVSRRLLSRPQDVLEGVVLSPSLEARVRDIAIMTRNIKKNRGLYRHILLYGPPGTGKTLFAKKLALHSGMDYAIMTGGDVAPMGREGVTAMHKLFDWANTSRRGLLLFVDEADAFLRKRATEKISEDLRATLNAFLYRTGQHSNKFMLILASCHPEQFDWAINACIDVMVHFDLPGQEERARLVRMYLNEYVLKPATEGKRRLKLAQFDYGRKCLEIARLTEGMSCRKIAQLAVSWQATAYASKDGVLTEAMMDACVQDFVQQHQQMMRWLKGERPGPEDEQPSS

SEQ ID NO: 337372 - DNA, 1236 bp, Artificial Sequence
  derived and/or modified sequence
atgagcaaggacgccctgaacctggcccagatgcaggagcagaccctgcagctggagcagcagagcaagctgaagcagctggtgaacgaggacctgagaaagcaggaggagagcgtgcagaagcaccaccagaccttcctggagagcatcagagccgccggcaccctgttcggcgagggcttcagagccttcgtgaccgacagagacaaggtgaccgccaccgtggccggcctgaccctgctggccgtgggcgtgtacagcgccaagaacgccaccgccgtgaccggcagatacatcgaggccagactgggcaagcccagcctggtgagagagaccagcagaatcaccgtgctggaggccctgagacaccccatccagcaggtgagcagaagactgctgagcagaccccaggacgtgctggagggcgtggtgctgagccccagcctggaggccagagtgagagacatcgccatcatgaccagaaacatcaagaagaacagaggcctgtacagacacatcctgctgtacggcccccccggcaccggcaagaccctgttcgccaagaagctggccctgcacagcggcatggactacgccatcatgaccggcggcgacgtggcccccatgggcagagagggcgtgaccgccatgcacaagctgttcgactgggccaacaccagcagaagaggcctgctgctgttcgtggacgaggccgacgccttcctgagaaagagagccaccgagaagatcagcgaggacctgagagccaccctgaacgccttcctgtacagaaccggccagcacagcaacaagttcatgctgatcctggccagctgccaccccgagcagttcgactgggccatcaacgcctgcatcgacgtgatggtgcacttcgacctgcccggccaggaggagagagccagactggtgagaatgtacctgaacgagtacgtgctgaagcccgccaccgagggcaagagaagactgaagctggcccagttcgactacggcagaaagtgcctggagatcgccagactgaccgagggcatgagctgcagaaagatcgcccagctggccgtgagctggcaggccaccgcctacgccagcaaggacggcgtgctgaccgaggccatgatggacgcctgcgtgcaggacttcgtgcagcagcaccagcagatgatgagatggctgaagggcgagagacccggccccgaggacgagcagcccagcagctag

SEQ ID NO: 337373 - DNA, 1236 bp, Artificial Sequence
  derived and/or modified sequence
atgtccaaggacgcattgaacctagcccagatgcaagaacagaccctgcagctcgagcaacaatctaagctgaagcagctagtcaacgaagatcttcgtaaacaggaggagtctgttcagaagcaccaccagacttttctggagagtatcagggccgctgggaccctattcggcgagggatttagagccttcgtcaccgacagggacaaggttacagcgaccgtggccgggctgacccttctggccgtgggggtgtattcagcgaagaatgcgacagccgtcaccggccggtacattgaggcccggctaggaaaacctagtctcgtgcgggagacatcccggattacggttctcgaagctcttcggcacccaatacagcaggtcagccgtaggctgctctccagacctcaggacgtactggagggagtggtcttgtccccatctctggaggcaagagtccgggacattgcgatcatgacgcggaatattaagaaaaatcgaggcctttatcgacacattctactgtacgggccccccggcaccggcaaaacactgttcgcaaagaaattggcccttcattccggcatggactatgctatcatgactggcggcgatgtcgcacccatgggccgagaaggggtgacagctatgcataaactgttcgattgggccaacacatcaaggagggggttgcttctattcgtcgacgaggccgacgctttcttgcgcaaaagagccactgaaaagatcagtgaggatctccgagcaacgcttaacgcattcttatatcgaacaggccagcattcaaacaagtttatgctcatcctcgcgagctgccatccagagcaatttgactgggccatcaatgcctgcatcgatgttatggtgcacttcgacctgcctggtcaggaggagcgtgctaggttggtgcgcatgtacctaaatgagtatgttctaaagcctgcgactgaaggaaagaggcgactgaagctggcccaattcgactacggccgcaagtgtctggaaattgccagactcacagagggcatgtcatgtaggaaaatcgcacagctggccgtatcctggcaggccaccgcatacgcctctaaggacggcgtcctaaccgaggcaatgatggacgcatgcgtccaggatttcgtgcaacagcatcagcagatgatgcgttggctgaaaggtgaaaggcctgggcctgaagatgaacagccttctagctag

SEQ ID NO: 337374 - DNA, 1236 bp, Artificial Sequence
  derived and/or modified sequence
atgagcaaggatgccctgaacctggcccagatgcaggagcagaccctgcagctggagcagcagagcaagctgaagcagctggtgaatgaagacctgaggaagcaggaggagagcgtgcagaagcaccaccagaccttcctggagagcatccgggctgctggcaccctgtttggagagggcttccgggcctttgtgacagaccgggacaaggtgacagccaccgtggccggcctgaccctgctggccgtgggcgtgtacagcgccaagaatgccacagctgtgacaggccgctacatcgaggcccggctgggcaagcccagcctggtgcgggagaccagccgcatcaccgtgctggaggccctgcggcaccccatccagcaggtgtcccggcggctgctgagccggccccaggatgtgctggagggcgtggtgctgagccccagcctggaggcccgggtgcgggacatcgccatcatgaccaggaacatcaagaagaacagaggcctgtaccgccacatcctgctgtatggccccccaggcaccgggaagaccctgtttgccaagaagctggccctgcacagcggcatggactatgccatcatgactggaggagatgtggcccccatgggccgggagggcgtgacagccatgcacaagctgtttgactgggccaacaccagccggcggggcctgctgctgtttgtggatgaagcagatgccttcctgaggaagagggccacagagaagatcagcgaggacctgcgggccaccctgaatgccttcctgtacagaacaggccagcacagcaacaagttcatgctgatcctggccagctgccaccctgagcagtttgactgggccatcaatgcctgcattgatgtgatggtgcactttgacctgcccggccaggaggagcgggcccggctggtgaggatgtacctgaatgaatatgtgctgaagccagccacagagggcaagaggcggctgaagctggcccagtttgattatggcaggaagtgcctggagatcgcccggctgacagagggcatgagctgcaggaagatcgcccagctggccgtgtcctggcaggccacagcctatgccagcaaggatggagtgctgacagaggccatgatggatgcctgtgtgcaggactttgtgcagcagcaccagcagatgatgcgctggctgaagggggagcggcccggcccagaagatgagcagcccagcagctag

SEQ ID NO: 337375 - DNA, 1236 bp, Artificial Sequence
  derived and/or modified sequence
atgagcaaggacgccctgaacctggcccagatgcaggagcagaccctacagctagaacagcagtccaaacttaagcagctggtaaatgaggacttaaggaagcaggaggaatcagtccagaaacaccaccagacttttctggagtctattcgcgcagccggcactctgtttggggaaggattcagggcctttgtgacggaccgtgataaagttaccgccacagtggccgggctcaccctgttggctgtgggggtttactctgctaagaacgctacagcagtaactgggcgatacatcgaggcaaggctgggtaagccttcgctggtccgagaaacaagccggataaccgtgctcgaagccctgcgtcaccccatccaacaggtgtcaaggaggctgctttctagaccccaagatgttttagagggtgttgtgttgtcaccctccctcgaggccagggttagggacatcgctatcatgactaggaacataaagaagaatcggggactgtacaggcacatcctgctctacgggccacccgggacaggtaaaactctgttcgcaaagaagttggcgctgcatagcggaatggactacgcgatcatgaccggtggagatgtggcgccaatggggcgtgaaggcgtcaccgcaatgcacaaactctttgactgggctaacacaagtcggagaggattgcttctttttgtggacgaagccgatgcttttctgcgtaagcgagctactgagaagatttcagaagacctacgcgcaactctcaatgcatttctctaccggaccggtcagcattccaacaaatttatgttaatcctcgcaagttgtcatcctgagcagttcgactgggccattaacgcttgcatcgacgtgatggtccactttgacttacctggccaggaggagcgagcacggctggttaggatgtatctcaacgaatacgttctgaaaccagcaaccgaaggaaagcggagacttaagttggcacagttcgattatggacggaagtgcctggaaattgcacgcctgacagagggcatgtcatgccgcaaaatcgcccagttggcggtgtcctggcaggctaccgcgtacgcttccaaagacggcgtgttgacggaagcaatgatggacgcctgcgtgcaggacttcgtccaacagcaccagcaaatgatgagatggctgaagggggagcgacctggccccgaagacgaacaaccctccagttag

SEQ ID NO: 337376 - DNA, 1236 bp, Artificial Sequence
  derived and/or modified sequence
atgagcaaggatgctctaaatttagcccagatgcaggagcagaccctccagctggaacagcaatctaagctgaaacagctggtaaacgaagatctgcggaaacaggaggaatcggtgcaaaagcaccatcaaaccttcttggagtcaattcgggctgcaggtactctgttcggggaaggtttccgggctttcgtgactgaccgcgacaaagtgacagccacagttgctggtctgaccttgctagccgtaggcgtctattccgccaagaacgccaccgcagtgacaggccgttatattgaggccaggctggggaagccttctctggtccgcgaaacctcaagaattactgtgctcgaagctctgcgacaccctatccagcaggtgagccgcagacttctgtctagacctcaggacgtccttgaaggagtggtgttgagcccatccctggaagcacgcgttagagatatcgccatcatgacaaggaacattaagaaaaaccggggtctgtatagacatatattgctttacggcccaccaggtaccgggaagacactgttcgcaaagaaactcgctttgcacagcgggatggattacgccatcatgaccggtggtgatgtcgcccctatgggcagagagggagttaccgctatgcataagctcttcgattgggcaaatacatcgcgacgcggtctgctgctctttgttgatgaggcagatgcattcctccggaaacgcgctaccgagaaaatctcggaagacctgagagcaactctgaatgcatttctctacaggacgggccagcattcaaataaatttatgctcattttggcctcctgtcatccagaacagttcgactgggctattaatgcatgcatcgacgttatggtacacttcgatctgccagggcaggaagagagggccagactggtcagaatgtacctgaacgagtacgtcctgaagcctgccaccgaagggaagcggcgtctgaagctggcccagttcgattacggaaggaaatgtctggaaattgcaaggctaactgaaggaatgagctgcaggaagatcgcccagctggccgtgagttggcaggccacagcctacgcaagtaaagatggcgtgctaacggaagcaatgatggacgcatgcgttcaagacttcgtgcaacaacaccagcagatgatgcggtggctcaagggggaacgtccagggccagaggacgagcagccttcttcttag

SEQ ID NO: 337377 - DNA, 900 bp, Artificial Sequence
  derived and/or modified sequence
atgagctggctctttggggtgaataagggcccaaaaggagaaggagcaggacccccacctccacttcctccagctcagccgggggctgagggaggcggcgacagaggcctgggcgacaggcctgcaccaaaggataagtggtcaaatttcgacccgacagggttagagcgagctgcaaaagccgcacgggaactggagcattcccgttacgctaaagaggctctcaaccttgctcagatgcaagaacagaccttgcagctggagcagcagtcaaagttgaaacaacttctcaacgaagagaacctgcggaagcaggaggagtcagtgcagaagcaccgtcagactgtcctggagagtatccgaacggccggtaccctatttggggagggcttccgcgctttcgttacagacagagataaagtcactgctaccgtggctggcctgaccctcctggccgttggagtctactccgctaagaatgccacagcggtgaccggaaggtttattgaggctcggctgggaaagcctagcctggtgcgagagacttcccggatcacagtattggaagccctacggcatcctatacagcaggtcagcaggagacttttgtctcgcccacaggatgtgctagagggtgttgttttatctccttctctcgaggcaagagttcgtgacatagccatcgcgacacgcaataccaagaaaaaccggggcctgtacagacacattttactttatgggccccccggaacaggcaagaccttgtttgcgaaaaaacttgctctgcattcgggtatggactacgccataatgacaggaggcgatgtggctcccatgggaagagaaggggtcacggcgatgcataaactatttgactgggcaaacacttcccgccgctag

SEQ ID NO: 337378 - DNA, 900 bp, Artificial Sequence
  derived and/or modified sequence
atgtcctggctgtttggagtgaacaagggccccaagggggagggcgccggccccccaccacccctgcccccagcccagcctggagctgagggcggcggggaccggggcctgggggacaggcctgcccccaaggacaagtggagcaactttgaccccaccggcctggagcgggccgccaaggccgcccgggagctggagcacagccgctatgccaaggaggccctgaacctggcccagatgcaggagcagaccctgcagctggagcagcagagcaagctgaagcagctgctgaatgaggagaacctgaggaagcaggaggagagcgtgcagaagcaccggcagacagtgctggagagcatcagaacagctggcaccctgtttggagagggcttccgggcctttgtgacagaccgggacaaggtgacagccaccgtggccggcctgaccctgctggccgtgggcgtgtacagcgccaagaatgccacagctgtgacaggccgcttcatcgaggcccggctgggcaagcccagcctggtgcgggagaccagccgcatcaccgtgctggaggccctgcggcaccccatccagcaggtgtcccggcggctgctgagccggccccaggatgtgctggagggcgtggtgctgagccccagcctggaggcccgggtgcgggacatcgccatcgccaccaggaacaccaagaagaacagaggcctgtaccgccacatcctgctgtatggccccccaggcaccgggaagaccctgtttgccaagaagctggccctgcacagcggcatggactatgccatcatgactggaggagatgtggcccccatgggccgggagggcgtgacagccatgcacaagctgtttgactgggccaacaccagcagaagatag

SEQ ID NO: 337379 - DNA, 900 bp, Artificial Sequence
  derived and/or modified sequence
atgagctggctgttcggcgtgaacaagggccccaagggcgagggcgcaggtccaccgccaccattgccccccgcccaacccggcgccgaaggcggcggtgatcgcggtctcggtgaccgtcctgctcccaaagacaaatggtcaaattttgatcctacaggcctcgagcgtgccgctaaagcggccagagaactggagcactctaggtatgcgaaagaagctctcaatttggcacagatgcaggagcagacactgcagttggaacaacagagcaaactaaagcagttgctcaacgaggagaatctgcgcaaacaggaggagagcgtgcagaaacaccggcaaaccgtccttgaatcaattcgaactgctgggaccttatttggggagggtttccgagctttcgtgactgatagagataaggtgacagcaacggttgccggattgaccttgcttgctgtaggggtgtactccgccaagaacgccacagctgtgaccggaaggttcatcgaagccagactggggaagcccagtcttgtacgagagacttctaggatcaccgtcttagaggcactgagacacccaatacagcaggtatcaaggcgcctgctttcacgaccccaggatgttctggaaggggtggtcttgtccccttccctcgaggcgcgggttcgggatatagcgatcgctacgcgcaatactaagaaaaacaggggactttatcgccatatactcttatatggtcccccgggaaccggcaagactctgttcgccaagaaacttgctctgcatagtgggatggattatgcgataatgactggcggagacgttgcacccatgggacgcgaaggcgtgacggccatgcacaagctgtttgactgggctaacacttccagacggtag

SEQ ID NO: 337380 - DNA, 900 bp, Artificial Sequence
  derived and/or modified sequence
atgtcctggctcttcggggtgaataaggggccaaagggcgagggagcaggacctcccccacccctgcccccagctcagccaggtgcggaaggtggcggagataggggactgggggatagaccagcaccaaaggataagtggagtaatttcgaccctaccggtctcgaacgggctgcaaaggccgctagagagttggagcattcgcgctacgccaaggaagcactgaacctcgcacagatgcaggagcagacactgcagctggagcagcaatcaaagctgaagcagctgttgaacgaagaaaacctgcgtaagcaggaagagagtgtgcagaaacacaggcagaccgttctggagtccattaggacagccggtacgttattcggagagggtttcagggcattcgttacagaccgggacaaggttaccgcgacagttgcagggctaacattgttagctgttggcgtgtattctgcaaaaaacgcgaccgctgtgactggaagattcattgaggcgagactgggaaaacctagtctggtgagagaaacgtctcgcatcacggtgctggaggcactacgacatccgatccagcaggtttcccggagactattatcacggccacaggacgtgctcgaaggagtcgtattgtccccctcactggaagcacgggtccgcgacattgcgatcgctacacggaacaccaagaaaaatcggggtctatataggcacatcctgctgtatggaccaccaggcaccggcaaaaccttgtttgccaaaaaactggccctccatagcggaatggactatgcaatcatgacaggaggcgacgtggcacccatggggcgtgaaggagtgacggctatgcacaaactctttgattgggcgaacacatctagaaggtag

SEQ ID NO: 337381 - DNA, 900 bp, Artificial Sequence
  derived and/or modified sequence
atgagctggctgttcggcgtgaacaagggccccaagggcgagggcgccggcccccccccccccctgccccccgcccagcccggcgccgagggcggcggcgacagaggcctgggcgacagacccgcccccaaggacaagtggagcaacttcgaccccaccggcctggagagagccgccaaggccgccagagagctggagcacagcagatacgccaaggaggccctgaacctggcccagatgcaggagcagaccctgcagctggagcagcagagcaagctgaagcagctgctgaacgaggagaacctgagaaagcaggaggagagcgtgcagaagcacagacagaccgtgctggagagcatcagaaccgccggcaccctgttcggcgagggcttcagagccttcgtgaccgacagagacaaggtgaccgccaccgtggccggcctgaccctgctggccgtgggcgtgtacagcgccaagaacgccaccgccgtgaccggcagattcatcgaggccagactgggcaagcccagcctggtgagagagaccagcagaatcaccgtgctggaggccctgagacaccccatccagcaggtgagcagaagactgctgagcagaccccaggacgtgctggagggcgtggtgctgagccccagcctggaggccagagtgagagacatcgccatcgccaccagaaacaccaagaagaacagaggcctgtacagacacatcctgctgtacggcccccccggcaccggcaagaccctgttcgccaagaagctggccctgcacagcggcatggactacgccatcatgaccggcggcgacgtggcccccatgggcagagagggcgtgaccgccatgcacaagctgttcgactgggccaacaccagcagaagatag

SEQ ID NO: 337382 - DNA, 1392 bp, Artificial Sequence
  derived and/or modified sequence
atgggctgcgtgttctgcaagaagctggagcccgtggccaccgccaaggaggacgccggcctggagggcgacttcagaagctacggcgccgccgaccactacggccccgaccccaccaaggccagacccgccagcagcttcgcccacatccccaactacagcaacttcagcagccaggccatcaaccccggcttcctggacagcggcaccatcagaggcgtgagcggcatcggcgtgaccctgttcatcgccctgtacgactacgaggccagaaccgaggacgacctgaccttcaccaagggcgagaagttccacatcctgaacaacaccgagggcgcctacagcctgagcatcagagactgggaccagaccagaggcgaccacgtgaagcactacaagatcagaaagctggacatgggcggctactacatcaccaccagagtgcagttcaacagcgtgcaggagctggtgcagcactacatggaggtgaacgacggcctgtgcaacctgctgatcgccccctgcaccatcatgaagccccagaccctgggcctggccaaggacgcctgggagatcagcagaagcagcatcaccctggagagaagactgggcaccggctgcttcggcgacgtgtggctgggcacctggaacggcagcaccaaggtggccgtgaagaccctgaagcccggcaccatgagccccaaggccttcctggaggaggcccaggtgatgaagctgctgagacacgacaagctggtgcagctgtacgccgtggtgagcgaggagcccatctacatcgtgaccgagttcatgtgccacggcagcctgctggacttcctgaagaaccccgagggccaggacctgagactgccccagctggtggacatggccgcccaggtggccgagggcatggcctacatggagagaatgaactacatccacagagacctgagagccgccaacatcctggtgggcgagagactggcctgcaagatcgccgacttcggcctggccagactgatcaaggacgacgagtacaacccctgccagggcagcaagttccccatcaagtggaccgcccccgaggccgccctgttcggcagattcaccatcaagagcgacgtgtggagcttcggcatcctgctgaccgagctgatcaccaagggcagaatcccctaccccggcatgaacaagagagaggtgctggagcaggtggagcagggctaccacatgccctgcccccccggctgccccgccagcctgtacgaggccatggagcagacctggagactggaccccgaggagagacccaccttcgagtacctgcagagcttcctggaggactacttcaccagcgccgagccccagtaccagcccggcgaccagacctag

SEQ ID NO: 337383 - DNA, 1392 bp, Artificial Sequence
  derived and/or modified sequence
atgggctgtgtgttctgtaagaagctagagcctgtggctacggctaaagaagatgcaggcctggagggcgatttcaggagttatggggctgccgaccattacggacccgacccaacgaaagctcgacccgcctcctcctttgcccatattcctaactactctaatttctcttctcaagccattaatccaggcttcttggacagtggaacaattcgcggtgttagcggaattggtgttaccctctttatagccctttacgactatgaagccagaacagaagatgacctcacattcacaaagggcgagaaattccacatcttgaacaataccgaaggcgcctacagcctgtccatccgtgattgggaccagacaaggggcgaccacgtaaaacactataagatccggaaactggatatgggcggttactatataacaaccagggtgcagttcaattcagtgcaagaactggttcagcactacatggaagtgaacgatggcctgtgcaacctactgatcgccccttgcaccattatgaagccccagacacttggactggctaaggacgcctgggaaatctcacggagctctatcactctggagagaagattggggacaggctgctttggcgacgtgtggttaggcacgtggaatggttctacaaaagtggccgtcaaaaccctgaagcccgggaccatgtcaccgaaggcttttctcgaggaagctcaggtcatgaagttactgagacacgacaagctggtgcaattgtacgccgtggtgtcagaagaaccaatttatatcgtgacagagtttatgtgccatggttcactgctagatttcttaaaaaacccagaggggcaggatcttcggctcccccagctggtcgatatggccgcccaagtagcggaaggcatggcttatatggaacggatgaactacatccacagagatcttagggctgcgaatatactggtgggagaacgtctcgcatgtaaaatcgctgatttcgggctcgcccgattaataaaggatgacgaatataatccttgccaaggctcaaagttccccatcaagtggacggcgcccgaggcagccttgttcggcagattcaccattaagtcagatgtgtggtcgtttgggattttgctgaccgagcttattactaaaggccggatcccgtaccccggaatgaacaagcgcgaagtgttggaacaagtggagcagggttaccacatgccctgtcctcccgggtgcccagcaagtctgtacgaagctatggaacaaacatggcggcttgaccctgaagaacggcctacatttgagtacttgcaaagctttcttgaggactatttcacctctgcagagccccaataccaaccaggggaccagacatag

SEQ ID NO: 337384 - DNA, 2242 bp, Artificial Sequence
  derived and/or modified sequence
aataagagaagtccgaggcggcttcctcctccctgcccagcaggggcggcggtcagaggcgggcagcaccccagttctccccgcacgccggcactcgcggctgctggagccccggctggctcaccccggggccgggcagaattgggctccaggtctctgacccctcccaaggatcatgccgcagccccactgacccaggagtaggggcctaagggcagggaacctggaatgggctgtgtgttctgcaagaaattggagccggtggccacggccaaggaggatgctggcctggaaggggacttcagaagctacggggcagcagaccactatgggcctgaccccactaaggcccggcctgcatcctcatttgcccacatccccaactacagcaacttctcctctcaggccatcaaccctggcttccttgatagtggcaccatcaggggtgtgtcagggattggggtgaccctgttcattgccctgtatgactatgaggctcgaactgaggatgacctcaccttcaccaagggcgagaagttccacatcctgaacaatactgaaggtgcctactccctgtccatccgggactgggatcagaccagaggcgatcatgtgaagcattacaagatccgcaaactggacatgggcggctactacatcaccacacgggttcagttcaactcggtgcaggagctggtgcagcactacatggaggtgaatgacgggctgtgcaacctgctcatcgcgccctgcaccatcatgaagccgcagacgctgggcctggccaaggacgcctgggagatcagccgcagctccatcacgctggagcgccggctgggcaccggctgcttcggggatgtgtggctgggcacgtggaacggcagcactaaggtggcggtgaagacgctgaagccgggcaccatgtccccgaaggccttcctggaggaggcgcaggtcatgaagctgctgcggcacgacaagctggtgcagctgtacgccgtggtgtcggaggagcccatctacatcgtgaccgagttcatgtgtcacggcagcttgctggattttctcaagaacccagagggccaggatttgaggctgccccaattggtggacatggcagcccaggtagctgagggcatggcctacatggaacgcatgaactacattcaccgcgacctgagggcagccaacatcctggttggggagcggctggcgtgcaagatcgcagactttggcttggcgcgtctcatcaaggacgatgagtacaacccctgccaaggttccaagttccccatcaagtggacagccccagaagctgccctctttggcagattcaccatcaagtcagacgtgtggtcctttgggatcctgctcactgagctcatcaccaagggccgaatcccctacccaggcatgaataaacgggaagtgttggaacaggtggagcagggctaccacatgccgtgccctccaggctgcccagcatccctgtacgaggccatggaacagacctggcgtctggacccggaggagaggcctaccttcgagtacctgcagtccttcctggaggactacttcacctccgctgaaccacagtaccagcccggggatcagacatagcctgtccgggcatcaaccctctctggcggtggccaccagtccttgccaatccccagagctgttcttccaaagcccccaggctggcttagaaccccatagagtcctagcatcaccgaggacgtggctgctctgacaccacctagggcaacctacttgttttacagatggggcaaaaggaggcccagagctgatctctcatccgctctggccccaagcactatttcttccttttccacttaggcccctacatgcctgtagcctttctcactccatccccacccaaagtgctcagaccttgtctagttatttataaaactgtatgtacctccctcacttctctcctatcactgctttcctactctccttttatctcactctagtccaggtgccaagaatttcccttctaccctctattctcttgtgtctgtaagttacaaagtcaggaaaagtcttggctggacccctttcctgctgggtggatgcagtggtccaggactggggtctgggcccaggtttgagggagaaggttgcagagcacttcccacctctctgaatagtgtgtatgtgttggtttattgattctgtaaataagtaaaatgacaatatgaatcctcaaaccatg

SEQ ID NO: 337385 - DNA, 1392 bp, Artificial Sequence
  derived and/or modified sequence
atgggctgtgtgttctgcaagaagctggagcctgtggccacagccaaggaggatgctggcctggagggggacttccgctcctatggagctgctgaccactacggccctgaccccaccaaggcccggcctgccagcagctttgcccacatccccaactacagcaacttcagcagccaggccatcaaccctggcttcctggacagcggcaccatccggggcgtgtctggaattggagtgaccctcttcatcgccctgtatgactatgaggccaggacagaagatgacctgaccttcaccaagggggagaagttccacatcctgaacaacacagagggcgcctacagcctgagcatccgggactgggaccagaccaggggggaccacgtgaagcactacaagatcaggaagctggacatgggcggctactacatcaccaccagggtgcagttcaacagcgtgcaggagctggtgcagcactacatggaggtgaatgatggcctgtgcaacctgctgattgccccctgcaccatcatgaagccccagaccctgggcctggccaaggatgcctgggagatcagccgcagcagcatcaccctggagcggcggctgggcaccggctgctttggagatgtgtggctgggcacctggaatggcagcaccaaggtggccgtgaagaccctgaagccaggcaccatgagccccaaggccttcctggaggaggcccaggtgatgaagctgctgcggcatgacaagctggtgcagctgtatgctgtggtgtctgaggagcccatctacatcgtgacagagttcatgtgccacggcagcctgctggacttcctgaagaaccctgagggccaggacctgcggctgccccagctggtggacatggccgcccaggtggccgagggcatggcctacatggagaggatgaactacatccaccgggacctgcgggccgccaacatcctggtgggggagcggctggcctgcaagattgctgactttggcctggcccggctcatcaaggatgatgagtacaacccctgccagggcagcaagttccccatcaagtggacagcccctgaggccgccctgtttggccgcttcaccatcaagagtgatgtgtggagctttggcatcctgctgacagagctgatcaccaagggccgcatcccctacccaggcatgaacaagcgggaggtgctggagcaggtggagcagggctaccacatgccctgccccccaggctgcccagccagcctgtatgaggccatggagcagacctggaggctggaccctgaggagcggcccacctttgagtacctgcagagcttcctggaggactacttcaccagcgctgagccccagtaccagcccggggaccagacctag

SEQ ID NO: 337386 - DNA, 1392 bp, Artificial Sequence
  derived and/or modified sequence
atgggctgcgtgttctgcaagaagctggagcccgtggccaccgccaaagaggacgccggactcgaaggggattttaggtcctacggagccgctgatcattatggtcccgatcccactaaggcacggccagcaagcagtttcgctcacattcctaattattcaaacttctctagccaggctatcaacccggggtttttggacagtggcactatcagaggagtgtccggcattggcgtcaccctctttattgctctgtatgactatgaagccagaacggaggacgacttgacgttcacaaaaggggagaagttccacatactgaataacactgaaggagcctatagcctctccatccgcgactgggaccagacccggggagatcacgtcaagcattacaaaatccggaaacttgacatgggaggatattacataacaacccgagttcagtttaacagtgtgcaggagttggtgcagcattatatggaggtgaacgacggtctatgcaacttgcttatcgcaccgtgtacaattatgaaaccacaaaccctgggccttgcaaaagacgcatgggaaatcagccgcagcagcatcaccctggagcggcgcctaggaacaggctgctttggcgatgtgtggctgggcacttggaatgggtccactaaggtggctgtaaaaacactgaaacctggtaccatgtctccaaaggcgtttctcgaagaggctcaagtaatgaagcttttgcgccacgacaagcttgtgcagttgtacgcggtggtgtccgaggaaccaatatatattgtcaccgaatttatgtgccacgggagcctgctcgactttctgaaaaaccctgagggccaagatctacggctgccacagttagtcgatatggcagcccaagtggccgaaggcatggcttacatggagaggatgaactatattcatcgcgatctgagagccgcgaacatcctcgttggcgagcgtttggcgtgtaagatcgccgactttggactcgctaggctgatcaaggacgacgagtacaacccatgtcagggcagcaaatttcccattaagtggacagccccagaagccgctctcttcggaagattcaccataaagagtgatgtgtggagttttgggatcctgctcaccgaactcatcactaaaggtaggatcccctatccgggaatgaacaagcgtgaagtcttagaacaggtggaacaggggtatcacatgccctgcccccctggctgcccagcgtccttgtatgaagccatggaacaaacctggagattggaccccgaggagcgcccaacatttgagtatctgcagtccttcctcgaggactacttcacttctgctgaaccccaatatcagcctggcgatcagacctag

SEQ ID NO: 337387 - DNA, 1392 bp, Artificial Sequence
  derived and/or modified sequence
atgggttgtgtattttgtaagaagctagagccagtcgcaactgccaaggaggacgcgggactcgagggcgactttcgttcatatggcgcagccgaccactacggtccagatccaacgaaagcgaggcctgcctcgtcttttgctcatatccctaactatagtaacttttctagccaggcaataaatccgggtttcctggacagcggaacaatacggggagtttccgggataggcgtaaccctcttcatcgccctgtacgactatgaggcgaggaccgaggacgacctgactttcacgaagggggagaaatttcacattctgaacaacacggaaggggcatattcactgagcattcgagactgggaccaaaccagaggggaccatgtgaaacattacaaaatccggaaacttgatatgggcggatattatataacaacaagggtgcaattcaacagcgttcaggagctggtccagcattacatggaggtgaatgatggattatgtaaccttctaatagcaccttgtaccattatgaagccccaaacactcggcctcgccaaggatgcctgggagatcagtaggtcttctatcacattggagcgcaggctcggtaccggatgctttggagacgtctggctcggcacttggaacggaagtacaaaggttgcagtgaagaccttaaagccaggcacgatgtcccccaaagcgtttctcgaagaagcccaagtgatgaaactgctcagacatgataaactggtgcagttatatgctgtggtctctgaagaacctatttacatagtgacagaattcatgtgccacggctcacttctcgacttcttaaaaaacccagagggtcaggatctcaggcttccccagctcgtggacatggcagcccaggttgccgaagggatggcctatatggagagaatgaattatatacatagagacttgcgggctgcgaacattcttgtgggggaacgattggcttgtaagatcgccgatttcggactggccaggctgattaaggatgacgagtacaacccatgtcaaggatcaaaattcccaatcaagtggacagctcctgaagccgcactcttcggtcgtttcactatcaaatctgacgtctggtcattcgggatactcctgaccgagctcatcaccaaaggacgtatcccatatcccggtatgaacaaacgcgaggtcttggaacaagtggagcaggggtaccatatgccttgccctcccggatgtcccgcaagcctgtacgaggccatggaacagacatggcgactggaccccgaggaaagacccacattcgagtatctgcaatcattcttggaagactatttcacttcggcagagcctcagtatcaaccaggcgatcaaacctag

SEQ ID NO: 337388 - protein, 313 aa, Artificial Sequence
  derived and/or modified sequence
MGCVFCKKLEPVATAKEDAGLEGDFRSYGAADHYGPDPTKARPASSFAHIPNYSNFSSQAINPGFLDSGTIRGVSGIGVTLFIALYDYEARTEDDLTFTKGEKFHILNNTEGDWWEARSLSSGKTGCIPSNYVAPVDSIQAEEWYFGKIGRKDAERQLLSPGNPQGAFLIRESETTKGAYSLSIRDWDQTRGDHVKHYKIRKLDMGGYYITTRVQFNSVQELVQHYMEVNDGLCNLLIAPCTIMKPQTLGLAKDAWEISRSSITLERRLGTGCFGDVWLGTWNGSTKVAVKTLKPGTMSPKAFLEEAQVMKLL

SEQ ID NO: 337389 - DNA, 942 bp, Artificial Sequence
  derived and/or modified sequence
atgggctgcgtgttctgcaagaagctggagcccgtggccaccgccaaggaggacgccggcctggagggcgacttcagaagctacggcgccgccgaccactacggccccgaccccaccaaggccagacccgccagcagcttcgcccacatccccaactacagcaacttcagcagccaggccatcaaccccggcttcctggacagcggcaccatcagaggcgtgagcggcatcggcgtgaccctgttcatcgccctgtacgactacgaggccagaaccgaggacgacctgaccttcaccaagggcgagaagttccacatcctgaacaacaccgagggcgactggtgggaggccagaagcctgagcagcggcaagaccggctgcatccccagcaactacgtggcccccgtggacagcatccaggccgaggagtggtacttcggcaagatcggcagaaaggacgccgagagacagctgctgagccccggcaacccccagggcgccttcctgatcagagagagcgagaccaccaagggcgcctacagcctgagcatcagagactgggaccagaccagaggcgaccacgtgaagcactacaagatcagaaagctggacatgggcggctactacatcaccaccagagtgcagttcaacagcgtgcaggagctggtgcagcactacatggaggtgaacgacggcctgtgcaacctgctgatcgccccctgcaccatcatgaagccccagaccctgggcctggccaaggacgcctgggagatcagcagaagcagcatcaccctggagagaagactgggcaccggctgcttcggcgacgtgtggctgggcacctggaacggcagcaccaaggtggccgtgaagaccctgaagcccggcaccatgagccccaaggccttcctggaggaggcccaggtgatgaagctgctgtag

SEQ ID NO: 337390 - DNA, 942 bp, Artificial Sequence
  derived and/or modified sequence
atgggctgtgtgttctgcaaaaagctagagcctgtggccaccgctaaggaagatgcaggtctcgagggcgattttcgtagttacggcgccgccgatcattacgggcccgaccctaccaaagctcggcctgcgagttcttttgcgcacatccctaactacagtaatttctcatctcaagcgatcaaccctgggtttctcgactcaggcaccataaggggagtgtcaggcatcggggtgactctgttcatcgccctgtatgattatgaagccagaaccgaggacgacctgacatttactaaaggagagaaattccacattctgaataatacagaaggggactggtgggaagctcggtccctctcctctggtaagacggggtgtattccaagtaactacgtggcacctgtggactcaatccaggccgaggaatggtattttggcaagataggccggaaggacgcggagcgccagctcctcagccctggcaatcctcagggggcatttctgatccgagaatcagagaccaccaagggcgcatactcgctgtcaatccgggattgggaccagacaagaggcgatcacgtgaaacactacaagattcggaaattggacatgggtggatattatattacgaccagggtgcagttcaacagcgttcaggaacttgtccagcactacatggaggtgaacgatgggctgtgcaacctcctaatagctccctgcacgatcatgaaaccgcaaacgctgggattggcaaaagatgcctgggaaatttcacgctcatccatcaccttggagcgcaggcttggcacaggttgctttggcgatgtgtggctgggaacgtggaatggctcaacaaaggtggcagtcaaaaccctgaaacccggtactatgagccctaaagcctttttggaagaagcccaagtgatgaagctgttatag

SEQ ID NO: 337391 - DNA, 1104 bp, Artificial Sequence
  derived and/or modified sequence
ctcattgtggggcttcccaaggtactctggtagccccagcttctgacctggtcctttctctggtatggggataggaggagagctccggaggtctctgacccctcccaaggatcatgccgcagccccactgacccaggagtaggggcctaagggcagggaacctggaatgggctgtgtgttctgcaagaaattggagccggtggccacggccaaggaggatgctggcctggaaggggacttcagaagctacggggcagcagaccactatgggcctgaccccactaaggcccggcctgcatcctcatttgcccacatccccaactacagcaacttctcctctcaggccatcaaccctggcttccttgatagtggcaccatcaggggtgtgtcagggattggggtgaccctgttcattgccctgtatgactatgaggctcgaactgaggatgacctcaccttcaccaagggcgagaagttccacatcctgaacaatactgaaggtgactggtgggaggctcggtctctcagctccggaaaaactggctgcattcccagcaactacgtggcccctgttgactcaatccaagctgaagagtggtactttggaaagattgggagaaaggatgcagagaggcagctgctttcaccaggcaacccccagggggcctttctcattcgggaaagcgagaccaccaaaggtgcctactccctgtccatccgggactgggatcagaccagaggcgatcatgtgaagcattacaagatccgcaaactggacatgggcggctactacatcaccacacgggttcagttcaactcggtgcaggagctggtgcagcactacatggaggtgaatgacgggctgtgcaacctgctcatcgcgccctgcaccatcatgaagccgcagacgctgggcctggccaaggacgcctgggagatcagccgcagctccatcacgctggagcgccggctgggcaccggctgcttcggggatgtgtggctgggcacgtggaacggcagcactaaggtggcggtgaagacgctgaagccgggcaccatgtccccgaaggccttcctggaggaggcgcaggtcatgaagctgct

SEQ ID NO: 337392 - DNA, 942 bp, Artificial Sequence
  derived and/or modified sequence
atgggctgtgtgttctgcaagaagctggagcctgtggccacagccaaggaggatgctggcctggagggggacttccgctcctatggagctgctgaccactacggccctgaccccaccaaggcccggcctgccagcagctttgcccacatccccaactacagcaacttcagcagccaggccatcaaccctggcttcctggacagcggcaccatccggggcgtgtctggaattggagtgaccctcttcatcgccctgtatgactatgaggccaggacagaagatgacctgaccttcaccaagggggagaagttccacatcctgaacaacacagaaggagactggtgggaggcccggagcctgagcagcggcaagacaggctgcatccccagcaactacgtggcccctgtggacagcatccaggccgaggagtggtactttgggaagattggaaggaaggatgctgagcggcagctgctgagccctggcaacccccagggcgccttcctgatccgggagagcgagaccaccaagggggcctacagcctgagcatccgggactgggaccagaccaggggggaccacgtgaagcactacaagatcaggaagctggacatgggcggctactacatcaccaccagggtgcagttcaacagcgtgcaggagctggtgcagcactacatggaggtgaatgatggcctgtgcaacctgctgattgccccctgcaccatcatgaagccccagaccctgggcctggccaaggatgcctgggagatcagccgcagcagcatcaccctggagcggcggctgggcaccggctgctttggagatgtgtggctgggcacctggaatggcagcaccaaggtggccgtgaagaccctgaagccaggcaccatgagccccaaggccttcctggaggaggcccaggtgatgaagctgctgtag

SEQ ID NO: 337393 - DNA, 942 bp, Artificial Sequence
  derived and/or modified sequence
atgggctgcgtgttctgcaagaagctggagcccgtggccaccgccaaagaggatgccggacttgagggcgacttccgctcatatggagcagccgatcactacggtccggacccgactaaagctcggcctgccagcagctttgctcacattccaaactattcaaatttttcaagccaagccattaatcccgggttcctggacagtggcactataaggggcgtgtccggcatcggcgtgactctatttatcgccctatatgattacgaggcccggaccgaagatgacctgacgttcacaaaaggcgagaaattccacatcttgaataatacagaaggtgactggtgggaggcgaggagccttagctcaggcaaaacaggatgtataccctccaattatgtagcccccgtggactcaatccaggccgaggagtggtattttggaaaaataggaagaaaggacgccgaaaggcagctgctgtcacccgggaacccccagggcgctttcctgattcgcgaatcagaaactacaaagggcgcttattcactatcaataagggattgggaccaaactagaggggaccatgtcaagcattataaaattcgcaagctggatatgggcggatattacatcacaactagggttcagttcaattcagttcaagaattagtccagcattatatggaggtcaacgatgggctgtgcaatttgttgatagcaccgtgcacaattatgaaacctcagacacttggcctcgcaaaggatgcatgggagatctcccgatcctccatcacccttgagcgaagattaggtacaggttgttttggagacgtttggctgggtacttggaacggttctacaaaagttgccgtgaagaccctcaagcctggaacgatgtctcctaaagcttttctggaggaagcacaggtgatgaaactgctgtag

SEQ ID NO: 337394 - DNA, 942 bp, Artificial Sequence
  derived and/or modified sequence
atgggttgcgtgttctgtaagaagctggagcctgtggcaacggcaaaggaggacgcaggactggagggggattttcggagctacggggcagccgatcactatggacctgatcctacgaaggcgagacccgcttctagttttgcccacatccccaactacagtaacttctccagccaagcaatcaatcccggattcctggattcagggacgatccgtggggtaagcggaatcggggtcaccctttttatcgctctctatgattatgaagccagaaccgaagacgacctgacattcacgaaaggggaaaagtttcatatcctgaacaatactgaaggggattggtgggaagcacgctctctgtctagtggtaagacgggatgtattccctctaactatgtggcaccagtcgacagcatccaggctgaggagtggtatttcggcaagattggacgcaaggacgccgaacgccagctgttgtctcccggaaatccccaaggcgcttttctgattcgtgagtcagagacgacgaaaggtgcatacagcctgagcattcgagactgggatcagactcgtggcgaccacgtcaagcactacaagatccggaagctggacatgggtggctattacattacaacccgggttcagttcaactctgtccaggagctggtacagcactacatggaggtcaacgatggcctgtgtaatctgctgatcgcgccttgtactattatgaagccccagaccctcggattggccaaggatgcctgggagatcagtcgaagcagcatcacactcgaaaggaggctcgggacgggttgcttcggtgacgtttggttgggaacctggaatggttccacaaaggtggctgtcaaaacactgaaacccggtaccatgtccccaaaagcttttctggaggaagcccaagtgatgaaattgctgtag

SEQ ID NO: 337395 - protein, 237 aa, Artificial Sequence
  derived and/or modified sequence
MVTPPPPPVFSLLKISQRIVCLVLDKSGSMGGKDRLNRMNQAAKHFLLQTVENGSWVGMVHFDSTATIVNKLIQIKSSDERNTLMAGLPTYPLGGTSICSGIKYAFQVIGELHSQLDGSEVLLLTDGEDNTASSCIDEVKQSGAIVHFIALGRAADEAVIEMSKITGGSHFYVSDEAQNNGLIDAFGALTSGNTDLSQKSLQVRVLIPWVFMFTFATRKNHLVVISFEFHIFLKVNF

SEQ ID NO: 337396 - DNA, 714 bp, Artificial Sequence
  derived and/or modified sequence
atggtgactcctcccccaccaccagtgttctctctgcttaagatcagccagcggattgtgtgcctcgtcttagataagtccggcagcatgggagggaaggacaggcttaacaggatgaatcaggctgccaaacatttcttactgcagactgtcgagaacggaagttgggtgggcatggtacatttcgactcaacagccacaattgtgaacaagctgatccagattaagtcatccgacgagcgcaatacactcatggcaggactgcccacatatccactggggggtacttccatatgcagcggaattaagtacgccttccaagtgatcggagagctccattcccagttagacgggtctgaagtccttctcctgaccgacggcgaggacaatacggcctcctcgtgcatagacgaggttaagcagtcaggcgcaatcgttcattttatcgcactgggcagggctgccgacgaagcagttatcgaaatgtccaaaatcactgggggaagtcatttctacgtgagcgacgaggcccagaacaatggccttattgatgctttcggggctctcacctctggaaacactgacttgagccagaagtcgctccaggtgcgtgtgctgattccatgggtgtttatgtttacctttgctactaggaaaaaccatcttgtcgtgattagcttcgaatttcatatattcctgaaggtgaatttctag

SEQ ID NO: 337397 - DNA, 714 bp, Artificial Sequence
  derived and/or modified sequence
atggttacgcctccccctccccctgtgtttagcctgctaaaaatcagccagcgaatagtctgcctcgtactggataagtctgggagtatgggtggaaaggatagactgaataggatgaaccaggctgctaagcactttctgctacagactgtagagaatggatcttgggtcggaatggtacactttgatagcaccgctactatcgtgaataaattaatacaaataaagtcctctgacgagcgaaatactctaatggccggactccctacataccccctaggcggtacttctatctgttccgggataaagtacgcctttcaggttattggcgaactccacagtcaactcgacggtagcgaggtactgcttttaacagacggagaggacaatactgcaagctcttgcattgatgaggttaaacaatctggagccatcgttcattttattgcgcttggccgagcggcagacgaagccgtgatcgagatgtctaaaattaccggcggatcacatttttacgtttcagacgaagcccagaacaatggcttgattgatgcatttggagccctcaccagtggtaataccgatctgagccagaaatccctgcaggtgcgcgtgctaattccttgggtttttatgttcacatttgctacccgcaagaatcacctagtggtcatcagttttgaatttcacattttcctgaaggtgaacttctag

SEQ ID NO: 337398 - DNA, 714 bp, Artificial Sequence
  derived and/or modified sequence
atggttacgcctccccctccccctgtgtttagcctgctaaaaatcagccagcgaatagtctgcctcgtactggataagtctgggagtatgggtggaaaggatagactgaataggatgaaccaggctgctaagcactttctgctacagactgtagagaatggatcttgggtcggaatggtacactttgatagcaccgctactatcgtgaataaattaatacaaataaagtcctctgacgagcgaaatactctaatggccggactccctacataccccctaggcggtacttctatctgttccggaatcaaatacgcttttcaagtgattggagaacttcattcccagctggacggatcagaagtgctactcctgacagatggagaagacaatacagccagctcatgtatagatgaagtgaagcagtcaggtgcaatcgtgcactttatcgcgctgggcagagcggccgacgaggcagttattgaaatgtctaaaattaccggagggagtcatttttacgtcagtgatgaggctcagaacaacggcctgatcgatgccttcggcgctttaacctcaggaaatactgaccttagccagaaatcccttcaggtccgcgtgctcattccctgggtctttatgttcacattcgccacacgtaagaaccatctggtggtcatttcttttgaattccatatcttccttaaagtaaatttctag

SEQ ID NO: 337399 - DNA, 1604 bp, Artificial Sequence
  derived and/or modified sequence
gtgccagaagatgaaaaaataattgaacaaatagaggatatggtgactacagcttctacgtacctgtttgaagccacagaaaaaagattttttttcaaaaatgtatctatattaattcctgagaattggaaggaaaatcctcagtacaaaaggccaaaacatgaaaaccataaacatgctgatgttatagttgcaccacctacactcccaggtagagatgaaccatacaccaagcagttcacagaatgtggagagaaaggcgaatacattcacttcacccctgaccttctacttggaaaaaaacaaaatgaatatggaccaccaggcaaactgtttgtccatgagtgggctcacctccggtggggagtgtttgatgagtacaatgaagatcagcctttctaccgtgctaagtcaaaaaaaatcgaagcaacaaggttgttgaattttgtaacgaaaaaacccataatcaagaagctccaagcctacaaaacataaagtgcaattttagaagtacatgggaggtgattagcaattctgaggattttaaaaacaccatacccatggtgacaccacctcctccacctgtcttctcattgctgaagatcagtcaaagaattgtgtgcttagttcttgataagtctggaagcatggggggtaaggaccgcctaaatcgaatgaatcaagcagcaaaacatttcctgctgcagactgttgaaaatggatcctgggtggggatggttcactttgatagtactgccactattgtaaataagctaatccaaataaaaagcagtgatgaaagaaacacactcatggcaggattacctacatatcctctgggaggaacttccatctgctctggaattaaatatgcatttcaggtgattggagagctacattcccaactcgatggatccgaagtactgctgctgactgatggggaggataacactgcaagttcttgtattgatgaagtgaaacaaagtggggccattgttcattttattgctttgggaagagctgctgatgaagcagtaatagagatgagcaagataacaggaggaagtcatttttatgtttcagatgaagctcagaacaatggcctcattgatgcttttggggctcttacatcaggaaatactgatctctcccagaagtcccttcaggtcagagttctcattccttgggttttcatgttcacttttgccacaagaaaaaaccatttggtggttataagttttgagttccatatttttctcaaagtaaatttttaattaaaatctaaactttaatcttaaatagaaattacccttagctatagccaaattaattggtgaaataagagtaaaataaatggtgaaacagcagacatactgtttcttttcctattgccatgggtttggttaagaaatgacattacaatgttataatgtcaaatttttcaccaaaaatggaccttttccaaaataaagcacccatttttcaatgaatgcattttaaaagctcatgcttccaagctttccccatgcttaacttctatgatatagatttagaaacatgaactcaagaacctggctgggaaatggaaggagtgtatcttggaa

SEQ ID NO: 337400 - DNA, 714 bp, Artificial Sequence
  derived and/or modified sequence
atggtgacccccccccccccccccgtgttcagcctgctgaagatcagccagagaatcgtgtgcctggtgctggacaagagcggcagcatgggcggcaaggacagactgaacagaatgaaccaggccgccaagcacttcctgctgcagaccgtggagaacggcagctgggtgggcatggtgcacttcgacagcaccgccaccatcgtgaacaagctgatccagatcaagagcagcgacgagagaaacaccctgatggccggcctgcccacctaccccctgggcggcaccagcatctgcagcggcatcaagtacgccttccaggtgatcggcgagctgcacagccagctggacggcagcgaggtgctgctgctgaccgacggcgaggacaacaccgccagcagctgcatcgacgaggtgaagcagagcggcgccatcgtgcacttcatcgccctgggcagagccgccgacgaggccgtgatcgagatgagcaagatcaccggcggcagccacttctacgtgagcgacgaggcccagaacaacggcctgatcgacgccttcggcgccctgaccagcggcaacaccgacctgagccagaagagcctgcaggtgagagtgctgatcccctgggtgttcatgttcaccttcgccaccagaaagaaccacctggtggtgatcagcttcgagttccacatcttcctgaaggtgaacttctag

SEQ ID NO: 337401 - DNA, 714 bp, Artificial Sequence
  derived and/or modified sequence
atggtcactccaccaccccctcccgtctttagcttactaaagatctcacaaaggatcgtgtgtctggtactcgacaaatcgggcagtatgggaggcaaggatagactaaatagaatgaaccaagcagccaagcacttcttgctacagactgtagaaaacggtagctgggtcggaatggttcactttgactcgactgcgacaatcgtcaacaagctgattcagatcaaaagctccgacgaaagaaacactttgatggctggactaccaacatatccccttggaggaacttcaatctgtagtggaatcaagtatgcttttcaggtgattggtgaactgcatagccagttggatggcagtgaggtgctcctgttgacagacggtgaggataatactgccagctcatgtatagatgaggtaaagcagagtggcgccattgttcatttcattgctctaggaagagccgccgatgaggccgtgatcgaaatgtccaaaatcacgggcggaagtcacttctacgtgtctgacgaagcccaaaataacgggctaatcgacgcctttggtgcccttacttcaggaaatactgacctctcccagaagtcattgcaagtgcgggtcttaattccttgggttttcatgtttacattcgctaccaggaagaaccatcttgtggtcatcagcttcgaattccatatatttctgaaagtgaatttttag

SEQ ID NO: 337402 - DNA, 714 bp, Artificial Sequence
  derived and/or modified sequence
atggtgaccccacctcctcctcctgtgttcagcctgctgaagatcagccagagaattgtgtgcctggtgctggacaagagcggctccatgggcggcaaggaccggctgaacaggatgaaccaggccgccaagcacttcctgctgcagacagtggagaatggctcctgggtgggcatggtgcactttgacagcacagccaccatcgtgaacaagctgatccagatcaagagcagtgatgaaagaaacaccctgatggccggcctgcccacctaccccctgggcggcaccagcatctgcagcggcatcaagtatgccttccaggtgattggagagctgcacagccagctggatggcagcgaggtgctgctgctgacagatggagaggacaacacagccagcagctgcattgatgaggtgaagcagagcggggccatcgtgcacttcatcgccctgggccgggctgctgatgaggccgtcatcgagatgagcaagatcaccggcggcagccacttctacgtgtctgatgaggcccagaacaacggcctgattgatgccttcggggccctgaccagcggcaacacagacctgagccagaagagcctgcaggtgcgggtgctgatcccctgggtgttcatgttcacctttgccaccaggaagaaccacctggtggtgatcagctttgagttccacatcttcctgaaggtgaacttctag

SEQ ID NO: 337403 - DNA, 714 bp, Artificial Sequence
  derived and/or modified sequence
atggtgacccccccccccccccccgtgttcagcctgctgaagatcagtcagaggatcgtctgtctggtcttggacaaatccggctctatgggcggcaaagatcggttaaaccggatgaaccaagccgcaaaacatttcttgttgcagactgtagagaatggatcctgggtggggatggtgcactttgatagtaccgcaacaatcgttaacaaactcatacaaataaaaagctcagacgaacgaaatacgttgatggcggggttgcccacttacccactgggagggactagcatatgctcggggatcaaatacgctttccaggtgatcggggaactgcactcccagctcgatggaagcgaggttctgctactcacagatggggaggacaataccgcttcgtcgtgcattgatgaggtgaaacagagtggcgcaatcgtgcacttcattgctctggggagggctgctgacgaagccgtcattgaaatgtcaaagattactggcggaagtcatttttacgtgagtgacgaagcccagaataacggacttatcgacgcctttggcgccctcacatctggtaacacggacctgtcacagaaaagtctccaagtgcgggtgctcattccctgggtgttcatgttcaccttcgccacccgtaaaaatcatctggtggtgatttcgttcgagttccatattttcctcaaagtgaatttttag

SEQ ID NO: 337404 - RNA, 714 nt, Artificial Sequence
  derived and/or modified sequence
augguuacgccucccccucccccuguguuuagccugcuaaaaaucagccagcgaauagucugccucguacuggauaagucugggaguauggguggaaaggauagacugaauaggaugaaccaggcugcuaagcacuuucugcuacagacuguagagaauggaucuugggucggaaugguacacuuugauagcaccgcuacuaucgugaauaaauuaauacaaauaaaguccucugacgagcgaaauacucuaauggccggacucccuacauacccccuaggcgguacuucuaucuguuccgggauaaaguacgccuuucagguuauuggcgaacuccacagucaacucgacgguagcgagguacugcuuuuaacagacggagaggacaauacugcaagcucuugcauugaugagguuaaacaaucuggagccaucguucauuuuauugcgcuuggccgagcggcagacgaagccgugaucgagaugucuaaaauuaccggcggaucacauuuuuacguuucagacgaagcccagaacaauggcuugauugaugcauuuggagcccucaccagugguaauaccgaucugagccagaaaucccugcaggugcgcgugcuaauuccuuggguuuuuauguucacauuugcuacccgcaagaaucaccuaguggucaucaguuuugaauuucacauuuuccugaaggugaacuucuag

SEQ ID NO: 337405 - RNA, 714 nt, Artificial Sequence
  derived and/or modified sequence
augguuacgccucccccucccccuguguuuagccugcuaaaaaucagccagcgaauagucugccucguacuggauaagucugggaguauggguggaaaggauagacugaauaggaugaaccaggcugcuaagcacuuucugcuacagacuguagagaauggaucuugggucggaaugguacacuuugauagcaccgcuacuaucgugaauaaauuaauacaaauaaaguccucugacgagcgaaauacucuaauggccggacucccuacauacccccuaggcgguacuucuaucuguuccggaaucaaauacgcuuuucaagugauuggagaacuucauucccagcuggacggaucagaagugcuacuccugacagauggagaagacaauacagccagcucauguauagaugaagugaagcagucaggugcaaucgugcacuuuaucgcgcugggcagagcggccgacgaggcaguuauugaaaugucuaaaauuaccggagggagucauuuuuacgucagugaugaggcucagaacaacggccugaucgaugccuucggcgcuuuaaccucaggaaauacugaccuuagccagaaaucccuucagguccgcgugcucauucccugggucuuuauguucacauucgccacacguaagaaccaucugguggucauuucuuuugaauuccauaucuuccuuaaaguaaauuucuag

SEQ ID NO: 337406 - protein, 286 aa, Artificial Sequence
  derived and/or modified sequence
MASLYGQLDTTKKLRDFFTVTDLRIRLLRPAVGEIFVDELHLARYFYAISDIKVRGRCKCNLHATVCVYDNSKLTCECEHNTTGPDCGKCKKNYQGRPWSPGSYLPIPKGTANTCIPSISSIGNPPKFNRIWPNISSLEVSNPKQVAPKLALSTVSSVQVANHKRECYCNPLGSIHDRCNGSGFCECKTGTTGPKCDECLPGNSWHYGCQPNVCDNELLHCQNGGTCHNNVRCLCPAAYTGILCEKLRCEEAGSCGSDSGQGAPPHGSPALLLLTTLLGTASPLVF

SEQ ID NO: 337407 - DNA, 861 bp, Artificial Sequence
  derived and/or modified sequence
atggcctccttgtacggacagcttgacactactaagaaattgagggacttttttacggtgaccgatctgcgaatacgactcctgcggcctgcagtcggcgaaatcttcgtggacgagctgcacctggctcgctatttctacgctatcagcgatatcaaggtcagggggaggtgcaaatgtaacttgcatgccaccgtgtgcgtgtatgacaactcaaagcttacttgcgagtgtgaacataatactacagggcccgactgtgggaaatgtaagaagaattaccagggccgcccttggtctcctgggagctacctccccatccctaaaggtacggccaatacttgcattccaagcattagcagcataggtaaccctcccaagtttaaccggatatggccaaacataagcagcctggaagtttcaaatccaaaacaggtggctcccaagctggccctctccactgtcagttctgtgcaagtagcaaatcacaagcgggaatgttattgtaacccgctgggcagtatccatgaccggtgcaacgggagcggattctgcgagtgtaagaccggtacgaccggccccaaatgcgacgaatgtctacccggcaacagttggcattatgggtgccagcctaatgtgtgtgacaacgagttgctgcactgccagaatggcgggacctgccacaacaatgtcaggtgtttatgtcctgcagcttatacaggaatcctctgcgagaaactcagatgcgaggaagccggcagttgtgggtccgacagcggacagggggctcccccacacggcagcccagcattgctgttactgacaactctgcttggaaccgcttccccactagtgttttag

SEQ ID NO: 337408 - DNA, 861 bp, Artificial Sequence
  derived and/or modified sequence
atggccagcctgtatggccagctggacaccaccaagaagctgcgggacttcttcaccgtgacagacctgcgcatccggctgctgcggcctgctgtgggggagatctttgtggatgagctgcacctggcccgctacttctacgccatcagtgacatcaaggtgcggggccgctgcaagtgcaacctgcacgccaccgtgtgtgtgtatgacaacagcaagctgacctgtgaatgtgagcacaacaccactggaccagactgtgggaagtgcaagaagaactaccagggccggccctggagccctggcagctacctgcccatccccaagggcacagccaacacctgcatccccagcatcagcagcatcggcaacccccccaagttcaaccgcatctggcccaacatcagcagcctggaggtgagcaaccccaagcaggtggcccccaagctggccctgagcacagtgtcctctgtgcaggtggccaaccacaagcgggagtgctactgcaaccccctgggcagcatccatgaccgctgcaatggcagcggcttctgtgagtgcaagacaggcaccaccggccccaagtgtgatgagtgcctgcccggcaacagctggcactacggctgccagcccaacgtgtgtgacaatgagctgctgcactgccagaatggaggcacctgccacaacaacgtgcgctgcctgtgcccagctgcctacacaggcatcctgtgtgagaagctgcgctgtgaggaggccggcagctgtggcagtgacagcggccagggcgccccaccccacggcagccctgccctgctgctgctgaccaccctgctgggcacagccagccccctggtgttctag

SEQ ID NO: 337409 - DNA, 861 bp, Artificial Sequence
  derived and/or modified sequence
atggccagcctgtacggccagctggacaccaccaagaagctgcgggattttttcacagtgactgacctccgaattcgcctgttaagacccgctgtgggagaaattttcgtggacgaactgcacctggcaaggtatttttacgccataagtgacatcaaagtgcgcggccggtgcaaatgtaatcttcatgccacggtctgtgtgtacgataattcgaagctcacctgcgaatgcgagcataataccaccggccctgattgcggcaagtgtaaaaagaactaccaggggagaccctggtctcccgggtcttatctgccaatccctaaaggaaccgccaatacttgtatcccatccatatccagcattggcaatccaccaaaattcaatcggatctggcctaatataagctccctggaggtcagcaatcctaaacaggttgcccccaaacttgcgctttcaaccgtctcatcagtgcaggtggccaatcacaagcgagagtgttattgcaatcctctcggttcgatacatgacaggtgtaatggctctggcttttgtgaatgcaaaacaggcactactggacccaagtgcgatgaatgtctgcctgggaattcttggcactacgggtgccagccaaacgtgtgcgacaacgagctattgcactgccagaatgggggcacctgtcataacaacgtgcggtgcttgtgccctgctgcttatacaggcattctctgcgaaaaactccgttgtgaggaagccggcagctgtgggtccgattccgggcagggagcccccccgcacggcagtcccgctcttctgcttctgaccaccctgcttggaaccgcctcccctttagtgttttag

SEQ ID NO: 337410 - DNA, 2916 bp, Artificial Sequence
  derived and/or modified sequence
aggagttactggaaacggcgcttctgtggaggagccgggggggatggggagtagagggagggggccctgttgcctcagcgccccgaggtcgtggagcggcagcagctgcagccggagcagcaccagcaacagcaacagcgagcgggacggagttaggaccgctcggagcgcacaggtctcgagggtgttggtgccagaagaaaagaatgattgatgggaaacagacaccgggctatagacactcatccttttgcttcagatactgatatctcagcctgcttgagcatcccttgtgagctgtgaacattgaggatcactcagggttatcggatgtacaacgggagagccatcgctttgctaaattattatctgcaattggacatcttttacaaaaaccaaactagacctgagtctaatagatatgttctaagacaaagaaaaagctgcaagttgttaacgcctaacacacaagtatgttaggcttccaccaaagtcctcaatatacctgaatacgcacaatatcttaactcttcatatttggttttgggatctgctttgaggtcccatcttcatttaaaaaaaaatacagagacctacctacccgtacgcatacatacatatgtgtatatatatgtaaactagacaaagatcgcagatcataaagcaagctctgctttagtttccaagaagattacaaagaatttagagatgtatttgtcaagattcctgtcgattcatgccctttgggttacggtgtcctcagtgatgcagccctaccctttggtttggggacattatgatttgtgtaagactcagatttacacggaagaagggaaagtttgggattacatggcctgccagccggaatccacggacatgacaaaatatctgaaagtgaaactcgatcctccggatattacctgtggagaccctcctgagacgttctgtgcaatgggcaatccctacatgtgcaataatgagtgtgatgcgagtacccctgagctggcacacccccctgagctgatgtttgattttgaaggaagacatccctccacattttggcagtctgccacttggaaggagtatcccaagcctctccaggttaacatcactctgtcttggagcaaaaccattgagctaacagacaacatagttattacctttgaatctgggcgtccagaccaaatgatcctggagaagtctctcgattatggacgaacatggcagccctatcagtattatgccacagactgcttagatgcttttcacatggatcctaaatccgtgaaggatttatcacagcatacggtcttagaaatcatttgcacagaagagtactcaacagggtatacaacaaatagcaaaataatccactttgaaatcaaagacaggttcgcgttttttgctggacctcgcctacgcaatatggcttccctctacggacagctggatacaaccaagaaactcagagatttctttacagtcacagacctgaggataaggctgttaagaccagccgttggggaaatatttgtagatgagctacacttggcacgctacttttacgcgatctcagacataaaggtgcgaggaaggtgcaagtgtaatctccatgccactgtatgtgtgtatgacaacagcaaattgacatgcgaatgtgagcacaacactacaggtccagactgtgggaaatgcaagaagaattatcagggccgaccttggagtccaggctcctatctccccatccccaaaggcactgcaaatacctgtatccccagtatttccagtattggtaatcctccaaagtttaataggatatggccgaatatttcttcccttgaggtttctaacccaaaacaagttgctcccaaattagctttgtcaacagtttcttctgttcaagttgcaaaccacaagagagagtgttattgtaaccctttgggctcaatccatgatcgttgtaatggctcaggattttgtgagtgtaagactggaacaacagggcctaagtgtgatgagtgtctgccgggaaattcctggcactacggctgtcaaccgaatgtctgcgacaacgagctcctgcactgccagaacggagggacgtgccacaacaacgtgcgctgcctgtgcccggccgcatacacgggcatcctctgcgagaagctgcggtgcgaggaggctggcagctgcggctccgactctggccagggcgcgcccccgcacggctccccagcgctgctgctgctgaccacgctgctgggaaccgccagccccctggtgttctaggtgtcacctccagccacaccggacgggcctgtgccgtggggaagcagacacaacccaaacatttgctactaacataggaaacacacacatacagacacccccactcagacagtgtacaaactaagaaggcctaactgaactaagccatatttatcacccgtggacagcacatccgagtcaagactgttaatttctgactccagaggagttggcagctgttgatattatcactgcaaatcacattgccagctgcagagcatattgtggattggaaaggctgcgacagccccccaaacaggaaagacaaaaaacaaacaaatcaaccgacctaaaaacattggctactctagcgtggtgcgccctagtacgactccgcccagtgtgtggaccaaccaaatagcattctttgctgtcaggtgcattgtgggcataaggaaatctgttacaagctgccatattggcctgcttccgtccctgaatcccttccaacctgtgctttagtgaacgttgctctgtaacccttgttggttgaaagatttctttgtctgatgttagtgatgcacatgtgtaacagccccctctaaaagcgcaagccagtcatacccctgtatatcttagcagcactgagtc

SEQ ID NO: 337411 - DNA, 861 bp, Artificial Sequence
  derived and/or modified sequence
atggcctcgttgtatgggcagctggacactaccaaaaagcttagggatttttttacggtgacagacctccgcattcggctccttcggcctgccgtgggtgaaattttcgtcgatgaattacatctcgcccgatacttttatgccattagcgacatcaaggtacgagggcgatgtaagtgcaacctgcacgcaacagtgtgcgtctacgataatagcaaactgacctgtgaatgcgaacataatactacggggcctgattgcgggaaatgcaagaaaaattaccagggcaggccatggtcaccagggagttacctgccgattccaaaggggaccgccaacacttgcataccatccatttcctctatcggcaatccgcctaagtttaacaggatatggcccaatatttcctctctggaggtttcaaaccctaaacaggttgcgccaaaactcgccctgtctacagtctccagcgttcaggttgcaaatcataagagggaatgctactgcaacccactggggtccattcatgaccgttgcaacggcagtggattctgtgaatgcaagactggtaccactggacccaagtgtgatgagtgcctccctggtaattcttggcactacggatgtcagcccaatgtctgtgacaacgagctgctccactgtcaaaacggtggaacgtgtcacaataacgtgcgttgcttgtgccccgctgcttatacaggcatcctgtgtgagaagcttagatgcgaggaggctgggagctgcggtagcgactcagggcaaggcgcaccgcctcacggatctccagctttgctactgctcacaaccttgctcggtacagctagccctctcgtgttttag

SEQ ID NO: 337412 - DNA, 861 bp, Artificial Sequence
  derived and/or modified sequence
atggccagcctgtacggccagctggacaccaccaagaagctgagagacttcttcaccgtgaccgacctgagaatcagactgctgagacccgccgtgggcgagatcttcgtggacgagctgcacctggccagatacttctacgccatcagcgacatcaaggtgagaggcagatgcaagtgcaacctgcacgccaccgtgtgcgtgtacgacaacagcaagctgacctgcgagtgcgagcacaacaccaccggccccgactgcggcaagtgcaagaagaactaccagggcagaccctggagccccggcagctacctgcccatccccaagggcaccgccaacacctgcatccccagcatcagcagcatcggcaacccccccaagttcaacagaatctggcccaacatcagcagcctggaggtgagcaaccccaagcaggtggcccccaagctggccctgagcaccgtgagcagcgtgcaggtggccaaccacaagagagagtgctactgcaaccccctgggcagcatccacgacagatgcaacggcagcggcttctgcgagtgcaagaccggcaccaccggccccaagtgcgacgagtgcctgcccggcaacagctggcactacggctgccagcccaacgtgtgcgacaacgagctgctgcactgccagaacggcggcacctgccacaacaacgtgagatgcctgtgccccgccgcctacaccggcatcctgtgcgagaagctgagatgcgaggaggccggcagctgcggcagcgacagcggccagggcgcccccccccacggcagccccgccctgctgctgctgaccaccctgctgggcaccgccagccccctggtgttctag

SEQ ID NO: 337413 - protein, 460 aa, Artificial Sequence
  derived and/or modified sequence
MYLSRFLSIHALWVTVSSVMQPYPLVWGHYDLCKTQIYTEEGKVWDYMACQPESTDMTKYLKVKLDPPDITCGDPPETFCAMGNPYMCNNECDASTPELAHPPELMFDFEGRHPSTFWQSATWKEYPKPLQVNITLSWSKTIELTDNIVITFESGRPDQMILEKSLDYGRTWQPYQYYATDCLDAFHMDPKSVKDLSQHTVLEIICTEEYSTGYTTNSKIIHFEIKDRFAFFAGPRLRNMASLYGQLDTTKKLRDFFTVTDLRIRLLRPAVGEIFVDELHLARYFYAISDIKVRGRCKCNLHATVCVYDNSKLTCECEHNTTGPDCGKCKKNYQGRPWSPGSYLPIPKGTANTCIPSISSIGNPPKFNRIWPNISSLEVSNPKQANVCDNELLHCQNGGTCHNNVRCLCPAAYTGILCEKLRCEEAGSCGSDSGQGAPPHGSPALLLLTTLLGTASPLVF

SEQ ID NO: 337414 - protein, 460 aa, Artificial Sequence
  derived and/or modified sequence
MYLSRFLSIHALWVTVSSVMQPYPLVWGHYDLCKTQIYTEEGKVWDYMACQPESTDMTKYLKVKLDPPDITCGDPPETFCAMGNPYMCNNECDASTPELAHPPELMFDFEGRHPSTFWQSATWKEYPKPLQVNITLSWSKTIELTDNIVITFESGRPDQMILEKSLDYGRTWQPYQYYATDCLDAFHMDPKSVKDLSQHTVLEIICTEEYSTGYTTNSKIIHFEIKDRFAFFAGPRLRNMASLYGQLDTTKKLRDFFTVTDLRIRLLRPAVGEIFVDELHLARYFYAISDIKVRGRCKCNLHATVCVYDNSKLTCECEHNTTGPDCGKCKKNYQGRPWSPGSYLPIPKGTANTCDPYLTSCGDPPKFNRIWPNISSLEVSNPKQANVCDNELLHCQNGGTCHNNVRCLCPAAYTGILCEKLRCEEAGSCGSDSGQGAPPHGSPALLLLTTLLGTASPLVF

SEQ ID NO: 337415 - DNA, 1383 bp, Artificial Sequence
  derived and/or modified sequence
atgtacctttccagatttttaagtattcacgctctgtgggtcacggtaagttctgtgatgcagccttatccgctggtatggggccattacgatttgtgcaaaacccagatttacaccgaagagggcaaagtctgggactacatggcctgccagccagaatccaccgatatgacgaagtacctgaaggtgaagctcgaccctcctgatattacctgtggcgatccgccggaaaccttttgcgccatgggcaacccctacatgtgcaacaatgaatgcgatgcatccacccctgagctggcccaccctccggaactaatgttcgacttcgagggcagacacccctccacattctggcagtccgcaacttggaaggagtatccaaaacccctccaagttaacatcaccctgtcgtggtccaaaacgatcgaactcacggacaatatcgtgattacgtttgaatccgggaggcctgatcagatgatcctcgaaaagtcactggactacgggcgcacatggcaaccttaccagtactacgctaccgactgcttagatgccttccacatggacccgaagtccgttaaggatctgagccagcatacggttctcgagattatctgcaccgaggaatactctactggatacaccactaacagtaagattatccactttgaaattaaagatagatttgctttctttgctggaccgcgacttaggaatatggcctctctatatggccaactcgataccacgaaaaagcttcgcgacttctttacggtgaccgacctgcggatccgcctcctccggcctgcggtcggggaaatatttgtggatgagctgcacttagccagatatttttatgcaataagcgatataaaggtacgcggccgctgtaagtgtaacctccacgctactgtctgtgtgtacgataatagcaaactgacatgtgagtgcgaacataatactaccggaccagattgcggcaaatgtaagaagaactatcaggggagaccgtggtctcctggttcgtacttaccgatcccgaaggggactgcaaacacttgtataccatccatcagttcaattggaaatcccccaaaatttaatcggatttggcctaacattagtagcttagaggtcagtaatccaaagcaagcgaacgtttgtgacaacgagctactgcattgtcaaaacgggggcacctgtcacaataacgtgagatgtctttgccccgccgcctacacagggatactttgcgagaaactacggtgtgaagaggccggcagctgcgggtctgattcaggccaaggggcccccccccacggttcaccagcattgctgctgctgacgactctgctcgggacagcgtcaccgctggtgttttag

SEQ ID NO: 337416 - DNA, 1383 bp, Artificial Sequence
  derived and/or modified sequence
atgtacttgtctcgctttctgagtatacacgccctctgggtgaccgtgtcctccgtcatgcagccctaccctctagtatggggtcactatgacttgtgcaagactcaaatttacacagaggaaggaaaggtatgggactacatggcctgccaacctgagtctacggacatgaccaaatacctgaaagtgaaattggatccccctgacattacatgtggagatccacccgagactttttgcgctatggggaacccttatatgtgtaataacgagtgcgacgcatctacccccgagctggcgcatccaccagagcttatgtttgatttcgagggacggcaccctagtacgttctggcagtccgccacctggaaagaatacccaaagcccctccaggtaaatatcaccctctcctggagtaaaaccattgagctgactgacaacattgtgatcacattcgagtcaggacgacccgatcagatgatcttagagaagtcactggactacggccgcacctggcagccataccagtactacgcaactgactgcctcgacgccttccatatggacccaaagagcgttaaggacctgtctcagcacaccgtgttggaaatcatatgtaccgaagaatacagcaccggatacactacaaattccaaaatcatccactttgaaatcaaggacagatttgccttcttcgctggaccacggctaagaaacatggccagcctttacggccagctggacacgactaaaaaactccgcgatttcttcacagtcaccgatttgcgaatccgacttctgcgccctgccgtcggagagatcttcgtggacgaactccacctggctcgctatttttatgcaatctccgatatcaaggtgagggggaggtgcaaatgcaatctgcatgccaccgtgtgcgtgtacgacaacagcaagctgacctgcgagtgtgaacataacaccacggggcctgattgcggcaaatgtaagaagaattatcagggaagaccatggtctcccggtagttacctaccaattcccaaagggacagctaatacatgtgatccctacttaacatcttgtggggatcccccaaaattcaaccgcatttggcccaacatctctagtttggaggtgtcaaaccccaagcaggccaatgtctgtgacaatgagctcctgcactgccagaacggagggacatgccataataatgttagatgtctctgccccgcggcttacactggcatcctgtgcgagaaactccgttgcgaggaagcaggctcgtgtggctccgattcgggtcaaggagctcctccacacggaagtcccgcattgctgttactcacaaccttattaggtacagctagtcccctggttttttag

SEQ ID NO: 337417 - DNA, 1383 bp, Artificial Sequence
  derived and/or modified sequence
atgtacctgagccgcttcctgagcatccacgccctgtgggtgacagtgtcctctgtgatgcagccctaccccctggtgtggggccactatgacctgtgcaagacccagatctacacagaggagggcaaggtgtgggactacatggcctgccagcctgagagcacagacatgaccaagtacctgaaggtgaagctggaccccccagacatcacctgtggggaccccccagagaccttctgtgccatgggcaacccctacatgtgcaacaatgaatgtgatgccagcaccccagagctggcccaccccccagagctgatgtttgattttgagggccgccaccccagcaccttctggcagagcgccacctggaaggagtaccccaagcccctgcaggtgaacatcaccctgtcctggagcaagaccatcgagctgacagacaacatcgtcatcacctttgagagcggccgcccagaccagatgatcctggagaagagcctggactatggccgcacctggcagccctaccagtactatgccacagactgcctggatgccttccacatggaccccaagtctgtgaaggacctgagccagcacacagtgctggagatcatctgcacagaggagtacagcacaggctacaccaccaacagcaagatcatccactttgagatcaaggacagatttgccttctttgctggcccccggctgaggaacatggccagcctgtatggccagctggacaccaccaagaagctgcgggacttcttcaccgtgacagacctgcgcatccggctgctgcggcctgctgtgggggagatctttgtggatgagctgcacctggcccgctacttctacgccatcagtgacatcaaggtgcggggccgctgcaagtgcaacctgcacgccaccgtgtgtgtgtatgacaacagcaagctgacctgtgaatgtgagcacaacaccaccggccctgactgtgggaagtgcaagaagaactaccagggccggccctggagccctggcagctacctgcccatccccaagggcacagccaacacctgcatccccagcatcagcagcatcggcaacccccccaagttcaaccgcatctggcccaacatcagcagcctggaggtgagcaaccccaagcaggccaacgtgtgtgacaatgagctgctgcactgccagaatggaggcacctgccacaacaacgtgcgctgcctgtgcccagctgcctacacaggcatcctgtgtgagaagctgcgctgtgaggaggccggcagctgtggcagtgacagcggccagggcgccccaccccacggcagccctgccctgctgctgctgaccaccctgctgggcacagccagccccctggtgttctag

SEQ ID NO: 337418 - DNA, 1383 bp, Artificial Sequence
  derived and/or modified sequence
atgtacctgagccgcttcctgagcatccacgccctgtgggtgacagtgtcctctgtgatgcagccctaccccctggtgtggggccactatgacctgtgcaagacccagatctacacagaggagggcaaggtgtgggactacatggcctgccagcctgagagcacagacatgaccaagtacctgaaggtgaagctggaccccccagacatcacctgtggggaccccccagagaccttctgtgccatgggcaacccctacatgtgcaacaatgaatgtgatgccagcaccccagagctggcccaccccccagagctgatgtttgattttgagggccgccaccccagcaccttctggcagagcgccacctggaaggagtaccccaagcccctgcaggtgaacatcaccctgtcctggagcaagaccatcgagctgacagacaacatcgtcatcacctttgagagcggccgcccagaccagatgatcctggagaagagcctggactatggccgcacctggcagccctaccagtactatgccacagactgcctggatgccttccacatggaccccaagtctgtgaaggacctgagccagcacacagtgctggagatcatctgcacagaggagtacagcacaggctacaccaccaacagcaagatcatccactttgagatcaaggacagatttgccttctttgctggcccccggctgaggaacatggccagcctgtatggccagctggacaccaccaagaagctgcgggacttcttcaccgtgacagacctgcgcatccggctgctgcggcctgctgtgggggagatctttgtggatgagctgcacctggcccgctacttctacgccatcagtgacatcaaggtgcggggccgctgcaagtgcaacctgcacgccaccgtgtgtgtgtatgacaacagcaagctgacctgtgaatgtgagcacaacaccaccggccctgactgtgggaagtgcaagaagaactaccagggccggccctggagccctggcagctacctgcccatccccaagggcacagccaacacctgtgacccctacctgaccagctgtggggacccccccaagttcaaccgcatctggcccaacatcagcagcctggaggtgagcaaccccaagcaggccaacgtgtgtgacaatgagctgctgcactgccagaatggaggcacctgccacaacaacgtgcgctgcctgtgcccagctgcctacacaggcatcctgtgtgagaagctgcgctgtgaggaggccggcagctgtggcagtgacagcggccagggcgccccaccccacggcagccctgccctgctgctgctgaccaccctgctgggcacagccagccccctggtgttctag

SEQ ID NO: 337419 - DNA, 1383 bp, Artificial Sequence
  derived and/or modified sequence
atgtacctgagccggttcctgagcatccacgccctgtgggtgaccgtgagctctgtgatgcagccttatcccctggtctgggggcattacgatctctgtaaaactcagatctatacagaagaggggaaggtatgggattacatggcctgccaacccgaatccaccgatatgactaagtacctcaaagtgaaactcgacccccccgatataacatgtggtgaccctccagagacattctgtgctatggggaacccttacatgtgcaataatgagtgcgatgcatccacacccgagctggctcaccctcctgagctgatgttcgattttgagggccgtcatccctccaccttttggcagagcgccacctggaaagagtacccgaagcccctccaggttaacatcactctgtcctggtctaagaccattgaacttaccgacaatattgtgattactttcgagtctggcaggccggaccagatgatcctggaaaaatcattggactacggaaggacatggcagccctaccagtattacgccacagattgtctggatgcctttcatatggatcctaaatctgtaaaggacttatcccaacatacagttctcgagataatctgcactgaggagtactcaacaggctacacaacgaactcaaaaatcatccactttgagatcaaagatcgctttgccttcttcgccggcccccggttgcggaatatggcaagtctctacgggcagctggatacaactaagaagcttcgggatttctttactgtcacggatctccggatccggctgttgagaccagccgttggagagatttttgtagacgagctacacctggcccgctatttctatgccatctccgatattaaagtgcgcgggcggtgcaagtgcaatttgcatgccacagtatgtgtctacgacaacagtaagcttacctgcgaatgcgagcacaacacgactggcccggattgcggtaaatgcaaaaagaactatcaaggaaggccttggagtcctggttcatacttacccattcctaaaggcacagccaacacctgtatccctagtatctcatccatcggtaacccccccaaattcaatcgcatctggccaaacataagctcactggaggtgtccaatcctaaacaggcaaacgtatgcgacaacgagctgcttcactgccagaacggcggcacctgtcacaacaacgtgcgctgtctgtgcccagcggcttacacaggcatcctatgtgaaaagctgagatgcgaagaggcagggtcatgcggttctgatagcggccaaggcgcccccccgcatgggtccccggctctcttgctgctgactaccctgttggggactgcaagccctctggttttttag

SEQ ID NO: 337420 - DNA, 1383 bp, Artificial Sequence
  derived and/or modified sequence
atgtacctgagccggttcctgagcatccacgccctgtgggtgaccgtgagtagcgtgatgcagccgtaccctcttgtgtgggggcactacgacctgtgcaagactcaaatttatacagaggaggggaaggtatgggactatatggcctgtcagcctgagtccaccgatatgacaaagtacctcaaggtcaagttggatcctcccgacattacatgtggagatccccctgaaacgttttgcgcaatgggcaacccttatatgtgcaataacgagtgtgacgctagcaccccggagttagcacatcccccagagctaatgtttgactttgagggacgccaccccagcaccttctggcagtctgctacctggaaagagtatcctaaacctcttcaggtgaacattactctttcttggtctaagacaattgaactgacagataatatcgtgattacgtttgagtctggaagacctgaccagatgatccttgaaaagagcctcgattacggtagaacctggcaaccataccaatattacgctactgactgcctggacgccttccatatggaccccaaatccgtgaaagatctttcacagcacacagtgctggaaattatttgtacagaggagtactctactggatacaccaccaattctaaaattatccatttcgaaataaaggatcggttcgcatttttcgccggaccacggctccgaaacatggcatctttatacggacaactggacactacaaaaaagctccgagactttttcaccgtgacggatctccgaattcggctgctacggccggcagtgggagaaattttcgtggacgagctacaccttgctagatatttctatgcaatttcagacatcaaagtgcggggccgctgtaaatgcaatctgcacgcgacagtctgcgtttacgataattccaaacttacttgtgagtgtgagcacaacacgaccggacccgattgcgggaaatgcaaaaaaaactaccagggcagaccctggtcccctgggtcctatctaccgatacctaagggtaccgctaatacttgcgatccctatcttactagctgcggggacccacccaagtttaacaggatttggcctaacatctcctcgctggaagtgtcaaaccctaagcaggccaatgtctgcgacaacgaactgctgcactgccagaatggcggaacttgtcacaataacgttagatgcctgtgtcccgccgcctacaccggaatactgtgcgagaagcttcgttgcgaggaagccggttcttgcggttccgatagcggccagggggccccaccacacggttcacctgccttgctcctgttgactacattgctgggaaccgcctcaccactggtattttag

SEQ ID NO: 337421 - DNA, 4628 bp, Artificial Sequence
  derived and/or modified sequence
gcatttcggaagaggacgtcaacgggaaggaattccccctctgggtgcgggctccgagagggggcgacttgcaggaggctccccccgggggcggaggcgaagggtgttggtgccagaagaaaagaatgattgatgggaaacagacaccgggctatagacactcatccttttgcttcagatactgatatctcagcctgcttgagcatcccttgtgagctgtgaacattgaggatcactcagggttatcggatgtacaacgggagagccatcgctttgctaaattattatctgcaattggacatcttttacaaaaaccaaactagacctgagtctaatagatatgttctaagacaaagaaaaagctgcaagttgttaacgcctaacacacaagtatgttaggcttccaccaaagtcctcaatatacctgaatacgcacaatatcttaactcttcatatttggttttgggatctgctttgaggtcccatcttcatttaaaaaaaaatacagagacctacctacccgtacgcatacatacatatgtgtatatatatgtaaactagacaaagatcgcagatcataaagcaagctctgctttagtttccaagaagattacaaagaatttagagatgtatttgtcaagattcctgtcgattcatgccctttgggttacggtgtcctcagtgatgcagccctaccctttggtttggggacattatgatttgtgtaagactcagatttacacggaagaagggaaagtttgggattacatggcctgccagccggaatccacggacatgacaaaatatctgaaagtgaaactcgatcctccggatattacctgtggagaccctcctgagacgttctgtgcaatgggcaatccctacatgtgcaataatgagtgtgatgcgagtacccctgagctggcacacccccctgagctgatgtttgattttgaaggaagacatccctccacattttggcagtctgccacttggaaggagtatcccaagcctctccaggttaacatcactctgtcttggagcaaaaccattgagctaacagacaacatagttattacctttgaatctgggcgtccagaccaaatgatcctggagaagtctctcgattatggacgaacatggcagccctatcagtattatgccacagactgcttagatgcttttcacatggatcctaaatccgtgaaggatttatcacagcatacggtcttagaaatcatttgcacagaagagtactcaacagggtatacaacaaatagcaaaataatccactttgaaatcaaagacaggttcgcgttttttgctggacctcgcctacgcaatatggcttccctctacggacagctggatacaaccaagaaactcagagatttctttacagtcacagacctgaggataaggctgttaagaccagccgttggggaaatatttgtagatgagctacacttggcacgctacttttacgcgatctcagacataaaggtgcgaggaaggtgcaagtgtaatctccatgccactgtatgtgtgtatgacaacagcaaattgacatgcgaatgtgagcacaacactacaggtccagactgtgggaaatgcaagaagaattatcagggccgaccttggagtccaggctcctatctccccatccccaaaggcactgcaaatacctgtatccccagtatttccagtattggtaatcctccaaagtttaataggatatggccgaatatttcttcccttgaggtttctaacccaaaacaagcgaatgtctgcgacaacgagctcctgcactgccagaacggagggacgtgccacaacaacgtgcgctgcctgtgcccggccgcatacacgggcatcctctgcgagaagctgcggtgcgaggaggctggcagctgcggctccgactctggccagggcgcgcccccgcacggctccccagcgctgctgctgctgaccacgctgctgggaaccgccagccccctggtgttctaggtgtcacctccagccacaccggacgggcctgtgccgtggggaagcagacacaacccaaacatttgctactaacataggaaacacacacatacagacacccccactcagacagtgtacaaactaagaaggcctaactgaactaagccatatttatcacccgtggacagcacatccgagtcaagactgttaatttctgactccagaggagttggcagctgttgatattatcactgcaaatcacattgccagctgcagagcatattgtggattggaaaggctgcgacagccccccaaacaggaaagacaaaaaacaaacaaatcaaccgacctaaaaacattggctactctagcgtggtgcgccctagtacgactccgcccagtgtgtggaccaaccaaatagcattctttgctgtcaggtgcattgtgggcataaggaaatctgttacaagctgccatattggcctgcttccgtccctgaatcccttccaacctgtgctttagtgaacgttgctctgtaacccttgttggttgaaagatttctttgtctgatgttagtgatgcacatgtgtaacagccccctctaaaagcgcaagccagtcatacccctgtatatcttagcagcactgagtccagtgcgagcacacacccactatacaagagtggctataggaaaaaagaaagtgtatctatccttttgtattcaaatgaagttatttttcttgaactactgtaatatgtagattttttgtattattgccaatttgtgttaccagacaatctgttaatgtatctaattcgaatcagcaaagactgacattttattttgtcctctttcgttctgttttgtttcactgtgcagagatttctctgtaagggcaacgaacgtgctggcatcaaagaatatcagtttacatatataacaagtgtaataagattccaccaaaggacattctaaatgttttcttgttgctttaacactggaagatttaaagaataaaaactcctgcataaacgatttcaggaatttgtattgcaatttcttaagatgaaaggaacagccaccaagcagtttcacactcactttactgatttctgtgtggactgagtacattcagctgacgaatttagttcccaggaagatggattgatgttcactagcttggacaacttctgcaaaatatgagactatttccacttgggaaaaattacaacagcaaaaaaaaaaaaaaaaaaaaaaaaaaatctaagtgattgccaagattatgccaaagcctgttggcagagtactaagagacttttatttttaagtcatgctattttcacagattgatggtgatcatgtgactctagggatgctgatctatgtatctttccaaatacagtgtttacatggagtatcacaagacgcaacctggggaaccaggaagggagcagggaaattgagtgatttgcaatttgactttgaatatattcagacttaagtatttagaggaaatatcaaaatataaagcagcaagtagacataactgctgttcctgagaataaagtttgttttaagtgctgcccaaggtgtaataaattcttgtttctgccttttattaggccaattactgtgcaagacagcaaggggaggcaggtggggaagaacctttgcaaagtttcaaagaggctaagacagtgtgcatttcgttcccagcacactgttgtcctacagattacaagtgtattagcagcagcatctcctggaatcaaaaacaattatcagcccgaaccagagtcttaaggacaatgaaattctacatgacttggtagaacaataacctatgatagtgtaaggtcagaaacctagttccagtctgaattcttcaccctgctgccactccttgctgaaacagggaaggggggaggaatgtctcctgataaataacctgggtaaaaactagatgaaggaacagcatgtcttattggttttgttcccagaaaagccaattcgaagaaggcaataaaaggtaaacaggtaatgcctgtgctgcctgccaccccacgtctaagtctattgaatgtttgttattcaaaccaacagtctcttttgatgtaagaaataaggaaagatggaaataaattagagcttaggcttagtgccagagtggccaaccagaaattggagatttacgttggaagcataaatagaaaattatatttcaggctcaccaaagaaacacatgaaaatgctgataacatagggagtttgagattatttataatgaggtggatttctgatattaaaattagagtttaagttgtcttatagtttattagcacaaaccaaaggcagcccatgttatttctggcaaagatgcactttatcgttatctgctcatggctttgtcgcaacgctcaggaatcagacactgcacacttcaatagttgggattccaaaagctaattctaaaatttaatgaaggcctgatttaaactgattcatctgcattttatctttatgaggccataagaatctaaattgatgaggaatatctttcattccgtgtatttagatatagttttctgaatttcctgaagcgatgtgatctgcttttaataaaaattcacttttaggt

SEQ ID NO: 337422 - DNA, 2721 bp, Artificial Sequence
  derived and/or modified sequence
aggagttactggaaacggcgcttctgtggaggagccgggggggatggggagtagagggagggggccctgttgcctcagcgccccgaggtcgtggagcggcagcagctgcagccggagcagcaccagcaacagcaacagcgagcgggacggagttaggaccgctcggagcgcacaggtctcgagggtgttggtgccagaagaaaagaatgattgatgggaaacagacaccgggctatagacactcatccttttgcttcagatactgatatctcagcctgcttgagcatcccttgtgagctgtgaacattgaggatcactcagggttatcggatgtacaacgggagagccatcgctttgctaaattattatctgcaattggacatcttttacaaaaaccaaactagacctgagtctaatagatatgttctaagacaaagaaaaagctgcaagttgttaacgcctaacacacaagtatgttaggcttccaccaaagtcctcaatatacctgaatacgcacaatatcttaactcttcatatttggttttgggatctgctttgaggtcccatcttcatttaaaaaaaaatacagagacctacctacccgtacgcatacatacatatgtgtatatatatgtaaactagacaaagatcgcagatcataaagcaagctctgctttagtttccaagaagattacaaagaatttagagatgtatttgtcaagattcctgtcgattcatgccctttgggttacggtgtcctcagtgatgcagccctaccctttggtttggggacattatgatttgtgtaagactcagatttacacggaagaagggaaagtttgggattacatggcctgccagccggaatccacggacatgacaaaatatctgaaagtgaaactcgatcctccggatattacctgtggagaccctcctgagacgttctgtgcaatgggcaatccctacatgtgcaataatgagtgtgatgcgagtacccctgagctggcacacccccctgagctgatgtttgattttgaaggaagacatccctccacattttggcagtctgccacttggaaggagtatcccaagcctctccaggttaacatcactctgtcttggagcaaaaccattgagctaacagacaacatagttattacctttgaatctgggcgtccagaccaaatgatcctggagaagtctctcgattatggacgaacatggcagccctatcagtattatgccacagactgcttagatgcttttcacatggatcctaaatccgtgaaggatttatcacagcatacggtcttagaaatcatttgcacagaagagtactcaacagggtatacaacaaatagcaaaataatccactttgaaatcaaagacaggttcgcgttttttgctggacctcgcctacgcaatatggcttccctctacggacagctggatacaaccaagaaactcagagatttctttacagtcacagacctgaggataaggctgttaagaccagccgttggggaaatatttgtagatgagctacacttggcacgctacttttacgcgatctcagacataaaggtgcgaggaaggtgcaagtgtaatctccatgccactgtatgtgtgtatgacaacagcaaattgacatgcgaatgtgagcacaacactacaggtccagactgtgggaaatgcaagaagaattatcagggccgaccttggagtccaggctcctatctccccatccccaaaggcactgcaaatacctgtgatccctatcttacctcatgtggagatcctccaaagtttaataggatatggccgaatatttcttcccttgaggtttctaacccaaaacaagcgaatgtctgcgacaacgagctcctgcactgccagaacggagggacgtgccacaacaacgtgcgctgcctgtgcccggccgcatacacgggcatcctctgcgagaagctgcggtgcgaggaggctggcagctgcggctccgactctggccagggcgcgcccccgcacggctccccagcgctgctgctgctgaccacgctgctgggaaccgccagccccctggtgttctaggtgtcacctccagccacaccggacgggcctgtgccgtggggaagcagacacaacccaaacatttgctactaacataggaaacacacacatacagacacccccactcagacagtgtacaaactaagaaggcctaactgaactaagccatatttatcacccgtggacagcacatccgagtcaagactgttaatttctgactccagaggagttggcagctgttgatattatcactgcaaatcacattgccagctgcagagcatattgtggattggaaaggctgcgacagccccccaaacaggaaagacaaaaaacaaacaaatcaaccgacctaaaaacattggctactctagcgtggtgcgccctagtacgactccgcccagtgtgtggaccaaccaaatagcattctttgctgtcaggtgcattgtgggcataaggaaatctgttacaagctgccatattggcctgcttccgtccctgaatcccttccaacctgtgctttagtgaacgttgctctgtaacccttgttggttgaaagatttctttgtctgatgttagtgatgcacatgtgtaacagccccctctaaaagcgcaagccagtcatacccctgtatatcttagcagcactgagtc

SEQ ID NO: 337423 - DNA, 1383 bp, Artificial Sequence
  derived and/or modified sequence
atgtacttgtcacgcttcctgtctatccatgcgctttgggtgacggtaagctcagtaatgcagccgtacccgctggtatggggtcactatgatctatgcaagacccagatctacacagaggagggtaaggtctgggattatatggcatgtcagcctgagagtactgacatgactaaatacctgaaagttaaactggaccctccggacatcacttgtggagatccacctgagaccttctgcgccatggggaacccgtatatgtgcaataacgaatgcgacgcatctacacctgaactggcccatccccctgaattgatgttcgacttcgaaggacggcatcctagcactttctggcagagcgccacctggaaagagtaccctaaacccctccaggtcaatatcaccttatcctggagcaagacaatcgagctcacagataacatagtgataacgttcgagtccggccgtcccgatcagatgatcttagaaaaatctttggactatggccgtacttggcaaccctaccagtactacgctactgactgtctcgatgctttccacatggatccgaagtctgtgaaggacctgtctcagcatactgtgctggaaattatatgcacagaagagtacagcacagggtataccacgaatagtaagatcatccacttcgaaatcaaggaccgctttgcattctttgccggacccaggctaagaaatatggccagcctgtacggccagctcgacaccacaaagaaacttagggacttcttcacagtgactgacttgagaatccggttacttaggccggctgtgggggagatctttgtggacgaactgcatctggccagatacttctacgctatcagtgacattaaggtgagaggacgctgtaaatgcaatctccacgcgacggtttgcgtgtacgataatagcaaactgacatgcgaatgtgagcacaatacaacaggtcccgactgcggcaagtgtaagaagaactatcaaggtaggccctggagccccggaagctatttgccaatcccgaagggtaccgccaatacctgcatccccagcataagctcgattggcaacccaccaaagttcaatcgtatttggccgaatatttcttcactagaggtgtccaatcccaagcaggcaaatgtctgtgataacgaactgcttcactgtcagaacggcggaacatgccataacaatgtgcgctgcctgtgtccggcagcttatacgggcatcctctgcgagaagcttcgctgcgaggaggcaggatcttgtggaagcgactccggacagggcgctccccctcatggttcaccagctctgctgctcctgaccactctactcggcacggcaagccccttggtcttctag

SEQ ID NO: 337424 - DNA, 1383 bp, Artificial Sequence
  derived and/or modified sequence
atgtacttgagtcggtttctcagcattcatgccctctgggtcactgtttcaagtgtgatgcagccatatcccctggtgtggggacactatgacctgtgcaagacccagatctatacagaggagggtaaggtctgggactacatggcgtgccaacccgagtcgaccgacatgaccaagtatctgaaggtgaagctcgacccaccagatatcacgtgcggcgatccaccagagactttctgcgccatgggcaacccatatatgtgcaataatgaatgcgacgcttccaccccggagctggctcacccgccagagttaatgtttgatttcgaggggcgacacccctccacgttttggcaatccgcaacctggaaagagtatcccaagccactccaggtgaacattactcttagttggtctaaaactatcgaactgacagacaacatcgtcattacttttgagtctgggagacccgaccagatgattctggaaaaatccctcgattacgggcgaacctggcagccttatcaatattacgctaccgattgccttgacgctttccatatggacccaaaatccgtcaaggatctctctcaacatacggtgctagaaataatctgtacagaggaatatagtactggctataccaccaactccaaaataattcacttcgagattaaagatagattcgcctttttcgcaggacctagattgcgtaatatggcttcactttacggccagttagacactactaagaaactgcgggatttctttactgtgaccgatctgaggatcagactgctgaggcctgctgtgggtgaaatattcgtcgatgaacttcacctggctcgatatttctatgccatctctgatatcaaagtccggggacggtgtaaatgtaatttacatgctacggtctgtgtgtatgacaactccaagctcacatgcgagtgcgagcacaatacaactgggcctgattgcgggaaatgcaagaaaaactatcagggccgaccctggagcccaggatcgtacctccctatccccaagggcacagctaacacctgcgatccctatctaacatcgtgtggtgatcctcccaagtttaataggatttggccaaatatctcaagccttgaggtttcaaaccccaagcaggccaacgtatgcgacaatgaattgcttcactgtcagaatggcggaacatgccacaataacgtcagatgtttgtgccccgctgcgtacaccggaatcctgtgtgagaagttacgatgtgaagaggccggttcgtgcggtagtgatagcggccagggtgcaccaccccacggttcccccgctctcctcctgctcacaactctgctgggcacagccagcccacttgtgttctag

SEQ ID NO: 337425 - DNA, 1383 bp, Artificial Sequence
  derived and/or modified sequence
atgtacctgagcagattcctgagcatccacgccctgtgggtgaccgtgagcagcgtgatgcagccctaccccctggtgtggggccactacgacctgtgcaagacccagatctacaccgaggagggcaaggtgtgggactacatggcctgccagcccgagagcaccgacatgaccaagtacctgaaggtgaagctggacccccccgacatcacctgcggcgacccccccgagaccttctgcgccatgggcaacccctacatgtgcaacaacgagtgcgacgccagcacccccgagctggcccacccccccgagctgatgttcgacttcgagggcagacaccccagcaccttctggcagagcgccacctggaaggagtaccccaagcccctgcaggtgaacatcaccctgagctggagcaagaccatcgagctgaccgacaacatcgtgatcaccttcgagagcggcagacccgaccagatgatcctggagaagagcctggactacggcagaacctggcagccctaccagtactacgccaccgactgcctggacgccttccacatggaccccaagagcgtgaaggacctgagccagcacaccgtgctggagatcatctgcaccgaggagtacagcaccggctacaccaccaacagcaagatcatccacttcgagatcaaggacagattcgccttcttcgccggccccagactgagaaacatggccagcctgtacggccagctggacaccaccaagaagctgagagacttcttcaccgtgaccgacctgagaatcagactgctgagacccgccgtgggcgagatcttcgtggacgagctgcacctggccagatacttctacgccatcagcgacatcaaggtgagaggcagatgcaagtgcaacctgcacgccaccgtgtgcgtgtacgacaacagcaagctgacctgcgagtgcgagcacaacaccaccggccccgactgcggcaagtgcaagaagaactaccagggcagaccctggagccccggcagctacctgcccatccccaagggcaccgccaacacctgcatccccagcatcagcagcatcggcaacccccccaagttcaacagaatctggcccaacatcagcagcctggaggtgagcaaccccaagcaggccaacgtgtgcgacaacgagctgctgcactgccagaacggcggcacctgccacaacaacgtgagatgcctgtgccccgccgcctacaccggcatcctgtgcgagaagctgagatgcgaggaggccggcagctgcggcagcgacagcggccagggcgcccccccccacggcagccccgccctgctgctgctgaccaccctgctgggcaccgccagccccctggtgttctag

SEQ ID NO: 337426 - DNA, 1383 bp, Artificial Sequence
  derived and/or modified sequence
atgtacctgagcagattcctgagcatccacgccctgtgggtgaccgtgagcagcgtgatgcagccctaccccctggtgtggggccactacgacctgtgcaagacccagatctacaccgaggagggcaaggtgtgggactacatggcctgccagcccgagagcaccgacatgaccaagtacctgaaggtgaagctggacccccccgacatcacctgcggcgacccccccgagaccttctgcgccatgggcaacccctacatgtgcaacaacgagtgcgacgccagcacccccgagctggcccacccccccgagctgatgttcgacttcgagggcagacaccccagcaccttctggcagagcgccacctggaaggagtaccccaagcccctgcaggtgaacatcaccctgagctggagcaagaccatcgagctgaccgacaacatcgtgatcaccttcgagagcggcagacccgaccagatgatcctggagaagagcctggactacggcagaacctggcagccctaccagtactacgccaccgactgcctggacgccttccacatggaccccaagagcgtgaaggacctgagccagcacaccgtgctggagatcatctgcaccgaggagtacagcaccggctacaccaccaacagcaagatcatccacttcgagatcaaggacagattcgccttcttcgccggccccagactgagaaacatggccagcctgtacggccagctggacaccaccaagaagctgagagacttcttcaccgtgaccgacctgagaatcagactgctgagacccgccgtgggcgagatcttcgtggacgagctgcacctggccagatacttctacgccatcagcgacatcaaggtgagaggcagatgcaagtgcaacctgcacgccaccgtgtgcgtgtacgacaacagcaagctgacctgcgagtgcgagcacaacaccaccggccccgactgcggcaagtgcaagaagaactaccagggcagaccctggagccccggcagctacctgcccatccccaagggcaccgccaacacctgcgacccctacctgaccagctgcggcgacccccccaagttcaacagaatctggcccaacatcagcagcctggaggtgagcaaccccaagcaggccaacgtgtgcgacaacgagctgctgcactgccagaacggcggcacctgccacaacaacgtgagatgcctgtgccccgccgcctacaccggcatcctgtgcgagaagctgagatgcgaggaggccggcagctgcggcagcgacagcggccagggcgcccccccccacggcagccccgccctgctgctgctgaccaccctgctgggcaccgccagccccctggtgttctag

SEQ ID NO: 337427 - DNA, 1095 bp, Artificial Sequence
  derived and/or modified sequence
atgtatttgtcccgatttttaagcattcacgctctttgggttaccgtgagttcagttatgcagccttaccccttggtgtggggtcactacgatttatgtaaaacccagatttataccgaggagggcaaggtgtgggactacatggcgtgccaaccagagagcacggacatgactaaatatctgaaggtgaaattagatccccccgatataacatgtggtgacccaccggagactttttgcgccatgggaaacccctatatgtgcaataatgaatgcgacgcttcaacgcccgagttagctcatccccccgaactcatgtttgactttgaaggcagacatccaagcactttttggcagagtgcgacatggaaagaataccccaaacccctgcaagtgaacataacgctgtcctggagcaagaccatcgagttgacagacaatattgtgatcacatttgagtccggacgtccagaccaaatgattctcgagaaatctttggattacggcaggacatggcagccttaccagtattatgccacggactgtctggatgccttccacatggaccccaagtcagtgaaagatctaagccaacacacagtcctggagattatttgtaccgaggagtacagcaccgggtataccaccaacagtaaaatcatacacttcgaaatcaaggaccgctttgcttttttcgctggccctagactgcgtaacatggcctctctatacggtcaactagataccaccaaaaagctacgggatttcttcacagtgacggacttacggatcaggttactccgccctgcagtgggggaaattttcgtcgacgagttgcatctggccagatacttctacgctatctccgatataaaggtccgtggacgctgtaagtgcaatctgcacgcaaccgtatgtgtgtatgacaacagtaagctgacttgcgaatgtgagcacaatacgacaggtcccgactgcgggaaatgcaaaaaaaattaccagggacggccctggagcccaggatcatatctcccgatacccaagggaactgctaatacctgcataccatcgatctcctcaattggctctaaatag

SEQ ID NO: 337428 - DNA, 1095 bp, Artificial Sequence
  derived and/or modified sequence
atgtacctgtcacgctttctgtcaatccatgccttgtgggttaccgtcagctctgtgatgcaaccctaccccctggtgtggggccattacgatctgtgcaagacacagatatacactgaggagggcaaggtgtgggactatatggcatgccagcctgagtctaccgatatgaccaagtacttaaaggtgaagctggaccctcccgatattacatgcggcgacccgcctgaaacattctgcgctatggggaatccatacatgtgtaataacgaatgcgatgctagcactcccgaactggcgcacccacctgagctgatgttcgactttgaaggtagacacccctccaccttttggcagtcagccacttggaaagagtaccccaagccactgcaggttaacatcactctatcctggagcaagactatcgagttaactgataacatagtcatcacattcgaaagtggcaggccagaccagatgatcctggagaagagcctagactacggaagaacctggcagccataccagtactatgccactgattgcctggatgcttttcacatggatccaaaatccgtgaaagatctctcacagcacactgtcttggagattatatgcacagaggagtattcaaccggttatactacaaattccaaaattatccactttgaaataaaagaccggttcgcattctttgccgggccacggctgagaaacatggcctccctgtatggccaacttgacacaacgaagaagctgcgcgatttctttacagtcaccgaccttaggattcgtctccttcggcccgccgtcggggagatcttcgtggacgaactccatctcgcccgatatttttacgcaattagcgacattaaggttcgcggccgatgtaaatgcaaccttcacgccacagtatgcgtttacgataacagtaagcttacatgcgaatgcgagcacaacactacaggcccagactgcgggaagtgcaaaaagaactaccaaggtagaccatggtccccagggtcttaccttccgattcctaaagggactgccaacacttgcattcctagcatctccagcatcgggtccaaatag

SEQ ID NO: 337429 - DNA, 1095 bp, Artificial Sequence
  derived and/or modified sequence
atgtacctgagccgcttcctgagcatccacgccctgtgggtgacagtgtcctctgtgatgcagccctaccccctggtgtggggccactatgacctgtgcaagacccagatctacacagaggagggcaaggtgtgggactacatggcctgccagcctgagagcacagacatgaccaagtacctgaaggtgaagctggaccccccagacatcacctgtggggaccccccagagaccttctgtgccatgggcaacccctacatgtgcaacaatgaatgtgatgccagcaccccagagctggcccaccccccagagctgatgtttgattttgagggccgccaccccagcaccttctggcagagcgccacctggaaggagtaccccaagcccctgcaggtgaacatcaccctgtcctggagcaagaccatcgagctgacagacaacatcgtcatcacctttgagagcggccgcccagaccagatgatcctggagaagagcctggactatggccgcacctggcagccctaccagtactatgccacagactgcctggatgccttccacatggaccccaagtctgtgaaggacctgagccagcacacagtgctggagatcatctgcacagaggagtacagcacaggctacaccaccaacagcaagatcatccactttgagatcaaggacagatttgccttctttgctggcccccggctgaggaacatggccagcctgtatggccagctggacaccaccaagaagctgcgggacttcttcaccgtgacagacctgcgcatccggctgctgcggcctgctgtgggggagatctttgtggatgagctgcacctggcccgctacttctacgccatcagtgacatcaaggtgcggggccgctgcaagtgcaacctgcacgccaccgtgtgtgtgtatgacaacagcaagctgacctgtgaatgtgagcacaacaccaccggccctgactgtgggaagtgcaagaagaactaccagggccggccctggagccctggcagctacctgcccatccccaagggcacagccaacacctgcatccccagcatcagcagcatcggcagcaagtag

SEQ ID NO: 337430 - DNA, 1095 bp, Artificial Sequence
  derived and/or modified sequence
atgtacctgagccggttcctgagcatccacgccctgtgggtgaccgtctcaagtgtgatgcagccttatccccttgtttggggccactacgatctgtgcaaaacacagatatatactgaagagggcaaagtgtgggattacatggcttgtcaacccgaaagcacagacatgacgaaatatcttaaagtaaagctggatcctcccgacattacatgtggcgaccccccagaaacattctgcgctatgggaaatccctatatgtgcaataacgaatgcgatgcgtccacccctgagcttgctcaccctccagaactgatgttcgactttgagggaaggcatcccagtaccttctggcagagtgccacgtggaaggagtaccctaagcctctgcaggtaaacattacattgtcatggagcaaaaccattgaactcacagataacatagttatcacctttgaaagcgggcgaccagatcagatgatcttggagaagagcctcgattatggccgcacttggcagccataccagtactatgccaccgattgcctggacgcgtttcatatggaccccaaaagtgttaaggacctgtctcagcacactgttctggagatcatttgcaccgaggaatattctacagggtacaccacaaactccaaaattatacatttcgagataaaggatcggtttgcattcttcgcaggacccaggctgcgcaacatggcaagcctgtatggacagctcgatacaactaaaaaactcagagattttttcaccgtcactgatttgagaatcagattgctcaggcctgcagtcggcgagatatttgtggatgaactccatctcgcccgttatttctacgccatctccgatatcaaggtgcgaggaagatgcaaatgcaatcttcacgccaccgtctgcgtgtacgataattctaaactcacatgtgaatgcgaacataatactacaggccccgattgtggcaagtgtaagaaaaattaccagggcagaccctggtcacccgggagctatctgcccatcccaaagggcacagctaacacctgtatcccgtccatcagctccattggctccaagtag

SEQ ID NO: 337431 - DNA, 1095 bp, Artificial Sequence
  derived and/or modified sequence
atgtacctgagccggttcctgagcatccacgccctgtgggtgaccgtgagcagtgtgatgcagccttaccctcttgtctgggggcactacgacctatgcaaaacccagatctatactgaagagggcaaggtgtgggattatatggcctgccagcctgagtccaccgatatgaccaagtacctgaaggtcaaactcgatcccccagacatcacctgtggtgaccctcctgaaaccttctgcgccatgggaaacccttatatgtgtaacaacgaatgcgacgccagtacacccgaactggcccacccccctgaactgatgtttgactttgagggacgtcaccccagcaccttctggcagtctgctacttggaaggagtatcccaagccactgcaagtcaatatcacacttagttggagcaagacgatcgagttgacggacaatatagttattacattcgagagcggtaggccagaccagatgatcctggagaagagccttgactatggacggacttggcaaccctaccagtattacgcaactgactgtctggacgccttccatatggaccccaaatctgtgaaggacttaagtcagcatacggttttagagattatctgcacagaggagtatagcacaggatacaccactaattccaagatcatccatttcgaaatcaaagataggtttgcattcttcgctggaccacgcctccggaatatggctagcctgtacggccagctggacactacaaagaaattgcgggatttctttaccgtcaccgacctccgcatacgattgttgagaccggctgtgggcgaaatttttgtggacgaacttcatctggcgcgatatttctatgcaatttctgatataaaagttcgcgggcgctgtaaatgcaatctccatgccacagtgtgcgtctatgacaactccaagcttacctgcgagtgtgaacataatactacgggccctgactgcggcaaatgcaagaagaactaccagggcaggccatggtccccaggttcctacttgcccataccaaaagggaccgctaacacctgcataccgagtatttccagcattggctccaaatag

SEQ ID NO: 337432 - DNA, 4703 bp, Artificial Sequence
  derived and/or modified sequence
ttattaatatcactatatttttggagggagaggcacctttctcatcctctcttcctctccgcccacccttactccctccccctcatctacctgtcaaagtcactgatcttttgcatttcggaagaggacgtcaacgggaaggaattccccctctgggtgcgggctccgagagggggcgacttgcaggaggctccccccgggggcggaggcgaagggtgttggtgccagaagaaaagaatgattgatgggaaacagacaccgggctatagacactcatccttttgcttcagatactgatatctcagcctgcttgagcatcccttgtgagctgtgaacattgaggatcactcagggttatcggatgtacaacgggagagccatcgctttgctaaattattatctgcaattggacatcttttacaaaaaccaaactagacctgagtctaatagatatgttctaagacaaagaaaaagctgcaagttgttaacgcctaacacacaagtatgttaggcttccaccaaagtcctcaatatacctgaatacgcacaatatcttaactcttcatatttggttttgggatctgctttgaggtcccatcttcatttaaaaaaaaatacagagacctacctacccgtacgcatacatacatatgtgtatatatatgtaaactagacaaagatcgcagatcataaagcaagctctgctttagtttccaagaagattacaaagaatttagagatgtatttgtcaagattcctgtcgattcatgccctttgggttacggtgtcctcagtgatgcagccctaccctttggtttggggacattatgatttgtgtaagactcagatttacacggaagaagggaaagtttgggattacatggcctgccagccggaatccacggacatgacaaaatatctgaaagtgaaactcgatcctccggatattacctgtggagaccctcctgagacgttctgtgcaatgggcaatccctacatgtgcaataatgagtgtgatgcgagtacccctgagctggcacacccccctgagctgatgtttgattttgaaggaagacatccctccacattttggcagtctgccacttggaaggagtatcccaagcctctccaggttaacatcactctgtcttggagcaaaaccattgagctaacagacaacatagttattacctttgaatctgggcgtccagaccaaatgatcctggagaagtctctcgattatggacgaacatggcagccctatcagtattatgccacagactgcttagatgcttttcacatggatcctaaatccgtgaaggatttatcacagcatacggtcttagaaatcatttgcacagaagagtactcaacagggtatacaacaaatagcaaaataatccactttgaaatcaaagacaggttcgcgttttttgctggacctcgcctacgcaatatggcttccctctacggacagctggatacaaccaagaaactcagagatttctttacagtcacagacctgaggataaggctgttaagaccagccgttggggaaatatttgtagatgagctacacttggcacgctacttttacgcgatctcagacataaaggtgcgaggaaggtgcaagtgtaatctccatgccactgtatgtgtgtatgacaacagcaaattgacatgcgaatgtgagcacaacactacaggtccagactgtgggaaatgcaagaagaattatcagggccgaccttggagtccaggctcctatctccccatccccaaaggcactgcaaatacctgtatccccagtatttccagtattggtagtaagtaaaaacaaaaacaaaaaaaacaccaaaccaagtctaggctagctttgctttgttgttcacctcctcagatctattttcccagtgtccatttctgatgtaatagggtattttctttgtgaattgcatttttgtgttggttttctgcacagatctggtgagaacacagataaagtgattatttgtgcataactccatgaacatggcagtgctatgacttttctgactactcttaaccagtgagggctacctagactcaggtgcaattccttagataatcatcattcaggaaaaatataagtagtcctatttatccatacttagcaaccaacaaacaaattgaactctctcttagactggatttggatgtctgacataattttaaaaagcagaaaatgaaagccaatgaatgccttgggtatatgcatcagaacccaagaaaaagtccatgataccaagggaagggaattttgttaatgcattaaattctatgttttgtgaaggcctgaaacaggcaaatttgtgatcagtagtctctctggagagataaaggaaaaagagaatctgtacattcatttctccttcctaaaatacgatgatctatgtcttcttgactacttagctttgagtttgatatagaaagagtataaaaaatatgtgcagaatttgggagtgagagtactagaaattcctttaataaatctgttagtatgaatccaagcaattgaagagaaaccgctcttcaaccatctgtagaacacttccccagtatcactacaaagaactttcttccagctatcatgggagaaccaggtgtagctcccgcttcatgtgtaaaataatgatgccctcatgccaagcctgaaattcacattaagaaaatgcccagtaactttacagagcaaaattttaaatttttttttatacattgcaccctttatctctaatggctaaaatctttgaacaactactaagtaactgattacaaataaattaccgagaaagcaagattacgcatggtaagcggagagaattttcactgtagtgtcatcccctcacaggcttgtgtcataggtgctgtgccaggcagggtgatcgcagtgtaaatagccattgaatgattgcgattcccagcatccatctaaaaagcaatactctgataatttggataaagcaacttcctgcttcttataaatgcacagtcaggtgtcccaatttataaatcaacccagtttacttgagcttgtgaataggcctggacactgatttgttaagcgctagatgtggtaaatgccatgaaaattggccactttgtaaatagaagtagtgttcacatccatttagagataccagcctaatgctacagcatcctctttgtgatcttgttgaaacagcatcagtgttaaaaacttgcaaatgaaaaccttcagctctaatagtctaatttttctgctttagtatcccccttggcatttgcctaactgtatatataccccacaatgtgctcctttcaggccttgacaattgcatttgcacgtgcattttagtgcaacagggaagcaagtagaagcaagctgacacagattattgaggctgctatagtgatctggcctgtcagaagtttcagaaatggatggatggaaaagtagttctttggcgttggggtgtctttctgtttggagtgtcagttgtatgttgcatggcccctctaactgtactgctcactcgacatcccattcggccgcctccaccacattccccatatctgagcatcagcagatgttgaccttttacacatcaaatcaggaaatttctgttttgttttgttttgttttgttttgaaatcagtggtgacctgaaaggatgcttcgttgtgcctttgaaaaaaatatattaacctttattatcgagaacctaggaaaatttactcctaataaaaaccctctgactaaaagtgatattttggactctcccttcaatatgcctctggctgttccgcttagaatgcaatgggtattttctcagatttccagcaaacaggatgtaagagcttccagaggtcacccaacatcacacatgactagcttacctgtttcctggcttttaaggtaaagagttacagtaaaaccatcaaacgtgattgtatcttctaggctgctttaatggcattcgaaagttccttctttgtgggcttataagttgctttttgcgtgcactcgtggattcctttcccctccaaagggcaagaattcacacgtagacgacactgcctgttccagagggcacgggaatggggttttcaaggtgcaagccagagaaaaggaagctgtttggatatttagctaagttatgggtgtttgccagtgctttttgcattaccccaaagaaggaatcaatgactataattccactaactatatagaaagataccattatagcagatgtaacacccctgagaccccgattatcacagcatagctcaaggaaaataaatgatgtatattatcgatgtagattattgatgtatataaccatcagtttacatacatattctgtatacacagtgattaaaggttttggggccctaataaatttcagtatagatctcaaaatgccaacgcctgtattaaggttcaaatgcatggatagggtggtcatcctttccgatcatctgctaaaaatgtttttgaaacaaatttcccattaaggtcattcgtacctgctgttgtctatctattaacaaataggtttcccataatcctaaggatacttgacttagaactcagtcattctgatctgctttggccatggctgaaaaaatgctggtgatattgtcagcaattaatgaatcccaaaataaatctgtagcctttg

SEQ ID NO: 337433 - DNA, 1829 bp, Artificial Sequence
  derived and/or modified sequence
gaggtacacgaggagttactggaaacggcgcttctgtggaggagccgggggggatggggagtagagggagggggccctgttgcctcagcgccccgaggtcgtggagcggcagcagctgcagccggagcagcaccagcaacagcaacagcgagcgggacggagttaggaccgctcggagcgcacaggtctcgagggtgttggtgccagaagaaaagaatgattgatgggaaacagacaccgggctatagacactcatccttttgcttcagatactgatatctcagcctgcttgagcatcccttgtgagctgtgaacattgaggatcactcagggttatcggatgtacaacgggagagccatcgctttgctaaattattatctgcaattggacatcttttacaaaaaccaaactagacctgagtctaatagatatgttctaagacaaagaaaaagctgcaagttgttaacgcctaacacacaagtatgttaggcttccaccaaagtcctcaatatacctgaatacgcacaatatcttaactcttcatatttggttttgggatctgctttgaggtcccatcttcatttaaaaaaaaatacagagacctacctacccgtacgcatacatacatatgtgtatatatatgtaaactagacaaagatcgcagatcataaagcaagctctgctttagtttccaagaagattacaaagaatttagagatgtatttgtcaagattcctgtcgattcatgccctttgggttacggtgtcctcagtgatgcagccctaccctttggtttggggacattatgatttgtgtaagactcagatttacacggaagaagggaaagtttgggattacatggcctgccagccggaatccacggacatgacaaaatatctgaaagtgaaactcgatcctccggatattacctgtggagaccctcctgagacgttctgtgcaatgggcaatccctacatgtgcaataatgagtgtgatgcgagtacccctgagctggcacacccccctgagctgatgtttgattttgaaggaagacatccctccacattttggcagtctgccacttggaaggagtatcccaagcctctccaggttaacatcactctgtcttggagcaaaaccattgagctaacagacaacatagttattacctttgaatctgggcgtccagaccaaatgatcctggagaagtctctcgattatggacgaacatggcagccctatcagtattatgccacagactgcttagatgcttttcacatggatcctaaatccgtgaaggatttatcacagcatacggtcttagaaatcatttgcacagaagagtactcaacagggtatacaacaaatagcaaaataatccactttgaaatcaaagacaggttcgcgttttttgctggacctcgcctacgcaatatggcttccctctacggacagctggatacaaccaagaaactcagagatttctttacagtcacagacctgaggataaggctgttaagaccagccgttggggaaatatttgtagatgagctacacttggcacgctacttttacgcgatctcagacataaaggtgcgaggaaggtgcaagtgtaatctccatgccactgtatgtgtgtatgacaacagcaaattgacatgcgaatgtgagcacaacactacaggtccagactgtgggaaatgcaagaagaattatcagggccgaccttggagtccaggctcctatctccccatccccaaaggcactgcaaatacctgtatccccagtatttccagtattggtagtaagtaaaaacaaaaacaaaaaa

SEQ ID NO: 337434 - DNA, 1095 bp, Artificial Sequence
  derived and/or modified sequence
atgtatttgtcaaggtttctgagtattcatgccttgtgggtcactgtgtcctccgtgatgcagccatacccactggtgtgggggcactatgatctttgcaaaacccagatttacacagaggaagggaaggtatgggattacatggcctgccagccagaaagtaccgacatgacaaagtatctgaaggtcaaactggacccccctgatatcacatgcggcgacccccctgagaccttctgtgcaatgggcaacccctatatgtgtaacaacgagtgtgatgcctcaacacccgagctggcccacccacctgagcttatgttcgattttgagggacgccatcccagcaccttttggcagtctgcgacctggaaagagtatccaaagcctctgcaagtcaacattacgctttcctggtctaagactatcgaactcaccgacaatattgtgatcacatttgagtccggcaggcccgaccagatgatcttagagaaatccctcgattacggtaggacatggcagccttatcagtactacgcaacagactgtctggatgcctttcacatggatccaaaaagtgtgaaagatctctcgcagcatactgtgcttgaaatcatctgcacagaagaatatagcactggttacacgacaaattccaagatcattcactttgaaatcaaagatcgctttgctttctttgccggaccacggctccgcaatatggcttctctgtacggccagttagatactacaaaaaaactgagggatttcttcactgtgaccgatttgcggattcgcttgttacggcctgctgtgggtgagatctttgttgacgaactgcaccttgctagatatttctatgccatttcggacatcaaggtccgtggtagatgcaaatgcaacctacatgccacagtttgtgtgtacgataatagtaagctgacctgcgagtgcgagcacaataccaccgggccagattgtggcaagtgcaaaaagaactaccaaggcaggccgtggagtcccggaagctaccttccaattccaaagggaactgccaacacttgcattccgtcaatcagcagcatcggctcaaagtag

SEQ ID NO: 337435 - DNA, 1095 bp, Artificial Sequence
  derived and/or modified sequence
atgtatctttctcggttcctatccatccacgcactgtgggtgaccgtgtctagcgtgatgcagccttatcctctggtttgggggcactatgacctctgtaaaacacagatctataccgaggaggggaaggtctgggattatatggcttgccagcctgagagtacagacatgacaaagtaccttaaggtcaagttggatcctcctgacatcacctgcggcgacccaccggagactttctgcgccatgggcaatccttacatgtgcaacaacgagtgtgacgcatctaccccagagcttgctcacccgcctgagctaatgtttgactttgaaggacggcatccatctaccttttggcagtccgcaacatggaaggaatatccgaaacccctacaggtgaatattaccctgagttggagtaagacaattgagttgactgacaacatcgtgatcacctttgaaagcgggaggccggaccagatgattctggagaaaagtctcgactatggtcggacctggcagccctaccagtattacgctaccgattgtcttgacgcgttccacatggatcctaagtctgtaaaagatctgtcccagcatacagttctcgaaattatatgcaccgaggagtattcgaccggctacaccactaatagcaagatcattcatttcgagataaaagaccgatttgcgttttttgctggtcccagactaagaaatatggcctccctgtacgggcaacttgatacaactaagaagctccgagacttttttaccgtgaccgatcttcggattcgattgctgcggccagccgtgggggaaatctttgtggacgaattacatctggcacgatatttttacgcaatctcggacatcaaggttagagggagatgcaagtgtaacctgcacgccactgtctgtgtatatgacaattccaagcttacatgtgaatgcgagcataacacaactggccctgactgcggtaaatgcaaaaagaactaccagggtagaccgtggtcacccggatcgtatctacccataccaaaaggcaccgcgaatacttgtataccgtccatttcctcgatcggctccaaatag

SEQ ID NO: 337436 - DNA, 1095 bp, Artificial Sequence
  derived and/or modified sequence
atgtacctgagcagattcctgagcatccacgccctgtgggtgaccgtgagcagcgtgatgcagccctaccccctggtgtggggccactacgacctgtgcaagacccagatctacaccgaggagggcaaggtgtgggactacatggcctgccagcccgagagcaccgacatgaccaagtacctgaaggtgaagctggacccccccgacatcacctgcggcgacccccccgagaccttctgcgccatgggcaacccctacatgtgcaacaacgagtgcgacgccagcacccccgagctggcccacccccccgagctgatgttcgacttcgagggcagacaccccagcaccttctggcagagcgccacctggaaggagtaccccaagcccctgcaggtgaacatcaccctgagctggagcaagaccatcgagctgaccgacaacatcgtgatcaccttcgagagcggcagacccgaccagatgatcctggagaagagcctggactacggcagaacctggcagccctaccagtactacgccaccgactgcctggacgccttccacatggaccccaagagcgtgaaggacctgagccagcacaccgtgctggagatcatctgcaccgaggagtacagcaccggctacaccaccaacagcaagatcatccacttcgagatcaaggacagattcgccttcttcgccggccccagactgagaaacatggccagcctgtacggccagctggacaccaccaagaagctgagagacttcttcaccgtgaccgacctgagaatcagactgctgagacccgccgtgggcgagatcttcgtggacgagctgcacctggccagatacttctacgccatcagcgacatcaaggtgagaggcagatgcaagtgcaacctgcacgccaccgtgtgcgtgtacgacaacagcaagctgacctgcgagtgcgagcacaacaccaccggccccgactgcggcaagtgcaagaagaactaccagggcagaccctggagccccggcagctacctgcccatccccaagggcaccgccaacacctgcatccccagcatcagcagcatcggcagcaagtag

SEQ ID NO: 337437 - DNA, 2115 bp, Artificial Sequence
  derived and/or modified sequence
atgtcccggcagctgtcgcgggcccggccagccacggtgctgggcgccatggagatggggcgccgcatggacgcgcccaccagcgccgcagtcacgcgcgccttcctggagcgcggccacaccgagatagacacggccttcctgtacagcgacggccagtccgagaccatccttggcggcctggggctccgaatgggcagcagcgactgcagagtgaaaattgctaccaaggccaatccatggattgggaactccctgaagcctgacagtgtccgatcccagctggagacgtcactgaagcggctgcagtgtccctgagtggacctcttctatctacatgcacctgaccacagcgccccggtggaagagacactgcgtgcctgccaccagctgcaccaggagggcaagttcgtggagcttggcctctccaactatgccgcctgggaagtggccgagatctgtaccctctgcaagagcaacggctggatcctgcccactgtgtaccagcttctggaaggagcaccacttcgagggcattgccctggtggagaaggccctgcaggccgcgtatggcgccagcgctcccagcatgacctcggccgccctccggtggatgtaccaccactcacagctgcagggtgcccacggggacgcggtcatcctgggcatgtccagcctggagcagctggagcagaacttggcagcggcagaggaagggcccctggagccggctgtcgtggacgcctttaatcaagcctggcatttgtttgcccacgaatgtcccaactacttcatctaagctcattgtggctcaggctgcccaaggcttttctgtcaactcttttgctctctcccgctttgtctaatttagaactgcctcactaaattcttagggatggaagtatttggaaaaaaacctaacagtagagtcaccacctaaggaagaataaaatctcccagggtgctgtgtgttagtctgtttgcgttgctataaaagaatacctgagactgggtcatgtataaagaaaagaggtttctttggctcacagttctgcagtctgtacaagagggtgtggtgccggcatctgctcttggtgagggcctcaggaagcttagaatcatggcagaaggggaaacggagccagcgtgtcacatggtgagagagggagcaagagacagacaggggaggaaattcacacactgatggtggggatgtaaaatggtacaaccagtttggaaaacagtttggcagtttctcaaaggattaaacataaaattaccataggattcagcagttccacttgtgggtatgtagccaagagaaatgaaaacatatctccccacaaaaaaacttgggtatgagatttcacattatcattgctcataatagccaataagtaaaaacaacccaaatgtccaagaatgaataaatggataaacaaaatatggtatatttatacaacagactattattcggccattaaaaaaaaaaaagagtggctgacacctgtaatctcagcactttgagaggccaaggcagtaggactgattgaagacaggagttccagaccagtctgggaaacaaagcgagaccctgtctccactaaacataaaaacaaaattactggggccccatggcacacacctgtagtcccagctgctcgggaagctgagatgggcggattgcttgagcccaggtattcaagtctggagtgagctatgactgtgccactgcactccagcctgggcgacagagcaaaccctgtttccaaacaaacaaacaaacaaacaaatacacagacagaagtagttaaacatctacaaggtaagtgcatcttgaagacgtgttaagttaaagaagccaattacaaaaggtttcacgttgtatgatttcgtttatatgaaatgtccagaataggcaaatctgtttgagagagagaaagtagatgagtacttgcctaggactgggaggaggattgcgaggaaatggagattcactgctaatgagtacagggtttcttttgggggcgcttatgaagatgctctgaaattgattgtgatggttgtacaactctgaatacatgaaacagcattaaacatcactttaagtaagtc

SEQ ID NO: 337438 - DNA, 429 bp, Artificial Sequence
  derived and/or modified sequence
atttagtgggcaaggtgctggggttgactcccggctctgccccagtagctctggggtcccaggaagcagaggtggggccacctacatttacatgaaggccgcctacctcagcatgtttgggaaggaggaccacaagccgttcggggacgacgaagtggaattatttcgagctgtgccaggcctgaagctcaagattgctgggaaatctctacccacagagaagtttgccatccggaagtcccggcgctacttctcctccaaccctatctcgctgccagtgcctgctctggaaatgatgtacatctggaacggctacgccgtgattgggaagcagccgaaactcacggatgggatacttgagattatcactaaggctgaagagatgctggagaaaggcccagagaacgagtactcagtggatgacgagtg

SEQ ID NO: 337439 - DNA, 1780 bp, Artificial Sequence
  derived and/or modified sequence
catggcaggccgttagggcagagggagctgggcagggcacagcagggcaggagtgtgtttgatgtgtcctgggaaccgccctgaggccgtcgtgtggctggagtgctgcaggtgtcaaggaaattgtaggagatgtctcctgagtgtgatggaatataaccagatttccagaaggaactgacatgatctgacttaaaaaggccacctacatttacatgaaggccgcctacctcagcatgtttgggaaggaggaccacaagccgttcggggacgacgaagtggaattatttcgagctgtgccaggcctgaagctcaagattgctgggaaatctctacccacagagaagtttgccatccggaagtcccggcgctacttctcctccaaccctatctcgctgccagtgcctgctctggaaatgatgtacatctggaacggctacgccgtgattgggaagcagccgaaactcacggatgggatacttgagattatcactaaggctgaagagatgctggagaaaggcccagagaacgagtactcagtggatgacgagtgcttggtgaaattgttgaaaggcctgtgtctgaaatacctgggccgtgtccaggaggccgaggagaattttaggagcatctctgccaatgaaaagaagattaaatatgaccactacttgatcccaaacgccctgctggagctggccctgctgcttatggagcaagacagaaacgaagaggccatcaaacttttggaatctgccaagcaaaactacaagaattactccatggagtcaaggacacactttcgaatccaggcagccacactccaagccaagtcttccctagagaacagcagcagatccatggtctcatcagtgtccttgtagctttgtgcagcagttccgggctggaagacagagacagctggacagagctcctgaaaacatttcaaaataccccctccccctgccctgccctgcctttggggtccaccggcactccagttggatggcacaacatagtgtatccgtgcagaagccgagctggcattttcaccagtgtagccaagggcctttgccaagggcagagcaggtggagccctctgcctgccctatcacacatacgggtacttgcttttcactgtgatgtttaagagaatgtatgaacagtttacattttccttagaaatacattgatgggatcacagttggctttaaaaaccaacaacaatcaaccacctgtaagtctttgtcttcacctattatcatctggaggtaaatctctttatatgatgatgccaaagggcaaattgcttttcaaattcagcaagttctcagcttgtgtgacggaaggtccttcagaggacctgaggaatgcctgggagaggctaagcctcaggcttcaatgcttctggggttgggcatgaggatgtacacagacacccactaccttactactcacacttcatttcactccttttgtaaatttccaatttaaaaatcaagcacgtctttttagtgagataaaatctgagctcttctgtagaaaaatcaatctctaccagtagaaaatgccagggcttgatggaagagctgtgtagccctttctatgccaaagccaggaaatttggggggcaggaggaggttctcagaatccagtctgtatctttgctgtatgccaaactgaaaccactgggaataatttatgaaacataaaaatcttctgtacttcactccaaggtacatttgcttactgacagcatttttgttaaaactgttattcttga

SEQ ID NO: 337440 - protein, 73 aa, Artificial Sequence
  derived and/or modified sequence
MSAFRNHCPHLDSVGEITKEDLIQKSLGTCQDCKVQGPNLWACLENRCSYVGCGESQVDHSTIHSQETKHYLT

SEQ ID NO: 337441 - protein, 111 aa, Artificial Sequence
  derived and/or modified sequence
MTGSNSHITILTLKVLPHFESLGKQEKIPNKMSAFRNHCPHLDSVGEITKEDLIQKSLGTCQDCKVQGPNLWACLENRCSYVGCGESQVDHSTIHSQETKHYLTVNLTTLR

SEQ ID NO: 337442 - DNA, 609 bp, Artificial Sequence
  derived and/or modified sequence
atgaccggcagcaacagccacatcaccatcctgaccctgaaggtgctgccccacttcgagagcctgggcaagcaggagaagatccccaacaagatgagcgccttcagaaaccactgcccccacctggacagcgtgggcgagatcaccaaggaggacctgatccagaagagcctgggcacctgccaggactgcaaggtgcagggccccaacctgtgggcctgcctggagaacagatgcagctacgtgggctgcggcgagagccaggtggaccacagcaccatccacagccaggagaccaagcactacctgaccgtgaacctgaccaccctgagagtgtggtgctacgcctgcagcaaggaggtgttcctggacagaaagctgggcacccagcccagcctgccccacgtgagacagccccaccagatccaggagaacagcgtgcaggacttcaagatccccagcaacaccaccctgaagacccccctggtggccgtgttcgacgacctggacatcgaggccgacgaggaggacgagctgagagccagaggcctgaccggcctgaagaacatcggcaacacctgctacatgaacgccgccctgcaggcctag

SEQ ID NO: 337443 - DNA, 222 bp, Artificial Sequence
  derived and/or modified sequence
atgagcgccttcagaaaccactgcccccacctggacagcgtgggcgagatcaccaaggaggacctgatccagaagagcctgggcacctgccaggactgcaaggtgcagggccccaacctgtgggcctgcctggagaacagatgcagctacgtgggctgcggcgagagccaggtggaccacagcaccatccacagccaggagaccaagcactacctgacctag

SEQ ID NO: 337444 - DNA, 336 bp, Artificial Sequence
  derived and/or modified sequence
atgaccggcagcaacagccacatcaccatcctgaccctgaaggtgctgccccacttcgagagcctgggcaagcaggagaagatccccaacaagatgagcgccttcagaaaccactgcccccacctggacagcgtgggcgagatcaccaaggaggacctgatccagaagagcctgggcacctgccaggactgcaaggtgcagggccccaacctgtgggcctgcctggagaacagatgcagctacgtgggctgcggcgagagccaggtggaccacagcaccatccacagccaggagaccaagcactacctgaccgtgaacctgaccaccctgagatag

SEQ ID NO: 337445 - DNA, 609 bp, Artificial Sequence
  derived and/or modified sequence
atgaccggctccaattctcacatcaccatactgacgctgaaagtcctgccccatttcgaatcactcggcaaacaggaaaagattcccaataaaatgagtgcattcaggaatcactgtccccacctcgattccgtcggggaaataactaaagaggacttgattcagaaatccctcggtacttgccaagattgcaaggtacagggccctaacctctgggcttgcctggaaaacaggtgctcatacgtggggtgtggtgagagccaagtggatcacagtaccatccactcgcaagagacgaagcactacctgacggtcaacttaaccacccttcgggtgtggtgttacgcttgcagcaaggaagtcttcctagaccggaagctgggaacacaacctagtctaccccatgtgcgacagccccaccaaatacaggagaacagcgtacaggacttcaagatccccagtaatacaacgctgaagacccctttggtagcagtctttgacgatctagacattgaagccgacgaagaggatgagctgagggcacggggcctgaccggcctcaagaatattggtaacacctgttacatgaacgccgcgctacaggcctag

SEQ ID NO: 337446 - DNA, 222 bp, Artificial Sequence
  derived and/or modified sequence
atgtccgccttccggaatcattgcccgcatctggatagcgtgggggagataacgaaagaagacctgattcagaaatctctgggtacgtgtcaggactgcaaggtgcagggaccaaacctctgggcctgcttagagaaccgctgctcttatgtaggctgcggagagtcacaggtggaccactctacgatccattctcaggagactaaacactacctgacgtag

SEQ ID NO: 337447 - DNA, 336 bp, Artificial Sequence
  derived and/or modified sequence
atgaccggctccaacagccacattaccattttaaccctaaaggtattgccacatttcgagtccctcggtaagcaggagaagatccccaataagatgtcagcctttcgaaatcactgccctcatctggactccgtgggtgaaatcacaaaagaagatttaatccaaaagtctctggggacgtgccaggactgtaaggtgcagggccccaatctctgggcctgtctggagaacagatgcagctacgtgggctgcggcgagtcacaggtggatcattccaccattcattctcaggagacaaaacactacctcacggtgaatctgaccaccctgagatag

SEQ ID NO: 337448 - DNA, 609 bp, Artificial Sequence
  derived and/or modified sequence
atgacaggcagcaacagccacatcaccatcctgaccctgaaggtgctgccccactttgagagcctgggcaagcaggagaagatccccaacaagatgtctgccttcaggaaccactgcccccacctggacagcgtgggggagatcaccaaggaggacctgatccagaagagcctgggcacctgccaggactgcaaggtgcagggccccaacctgtgggcctgcctggagaaccgctgcagctatgtgggctgtggggagagccaggtggaccacagcaccatccacagccaggagaccaagcactacctgactgtgaacctgaccaccctgcgggtgtggtgctacgcctgcagcaaggaggtgttcctggacaggaagctgggcacccagcccagcctgccccacgtgcggcagccccaccagatccaggagaacagcgtgcaggacttcaagatccccagcaacaccaccctgaagacccccctggtggccgtgtttgatgacctggacattgaagcagatgaggaggatgagctgcgggcccggggcctgaccggcctgaagaacatcggcaacacctgctacatgaatgctgccctgcaggcctag

SEQ ID NO: 337449 - DNA, 222 bp, Artificial Sequence
  derived and/or modified sequence
atgtctgccttcaggaaccactgcccccacctggacagcgtgggggagatcaccaaggaggacctgatccagaagagcctgggcacctgccaggactgcaaggtgcagggccccaacctgtgggcctgcctggagaaccgctgcagctatgtgggctgtggggagagccaggtggaccacagcaccatccacagccaggagaccaagcactacctgacctag

SEQ ID NO: 337450 - DNA, 336 bp, Artificial Sequence
  derived and/or modified sequence
atgacaggcagcaacagccacatcaccatcctgaccctgaaggtgctgccccactttgagagcctgggcaagcaggagaagatccccaacaagatgtctgccttcaggaaccactgcccccacctggacagcgtgggggagatcaccaaggaggacctgatccagaagagcctgggcacctgccaggactgcaaggtgcagggccccaacctgtgggcctgcctggagaaccgctgcagctatgtgggctgtggggagagccaggtggaccacagcaccatccacagccaggagaccaagcactacctgactgtgaacctgaccaccctgaggtag

SEQ ID NO: 337451 - DNA, 609 bp, Artificial Sequence
  derived and/or modified sequence
atgaccggcagcaacagccacatcaccatcctgaccctgaaggtgctgccgcacttcgagtcattgggcaagcaggaaaagattcccaacaaaatgagtgcctttcgtaatcactgtccgcatctggacagtgtgggcgagataactaaagaagaccttatccagaaaagcctggggacgtgccaggactgcaaggtccagggaccaaatctgtgggcctgcttggaaaaccgatgtagctatgttggttgcggggagagtcaagtggatcatagcactattcacagtcaggagacaaagcattacctgactgtgaacctcactacactgcgagtatggtgctatgcctgctccaaggaagtgttccttgaccgaaaactcggcacccagccatccctgcctcatgtgcggcagccgcaccagattcaagagaacagcgtgcaagattttaagatacctagcaacactacgctgaagactcccctggtcgcggtgtttgatgatctggacattgaggcagatgaggaggatgagttgcgagcaagaggactgactggactgaagaacatagggaatacatgctacatgaacgccgccctccaggcctag

SEQ ID NO: 337452 - DNA, 222 bp, Artificial Sequence
  derived and/or modified sequence
atgagcgccttccggaaccactgcccccacctggacagcgtgggcgaaattaccaaagaggatttaatccagaagagcctgggtacttgtcaggattgcaaggtccagggccctaatctgtgggcgtgccttgagaatcgatgcagctatgtcggctgtggcgagagccaggttgatcattcaacgatccacagccaggagactaaacattatctgacatag

SEQ ID NO: 337453 - DNA, 336 bp, Artificial Sequence
  derived and/or modified sequence
atgaccggcagcaacagccacatcaccatcctgaccctgaaggtgctgccacactttgagtcgctggggaaacaggagaaaattcccaacaagatgagcgcatttaggaaccattgtccacatcttgactctgtcggcgagatcacgaaggaggacctgatccaaaagagtctggggacctgccaggactgtaaggttcagggaccaaatttatgggcttgtctcgaaaacagatgctcatacgtcggttgcggcgagagtcaggtcgatcactccaccattcactcccaggagacaaaacactatttgacggtgaatcttacaactcttcggtag

SEQ ID NO: 337454 - DNA, 609 bp, Artificial Sequence
  derived and/or modified sequence
atgaccggctccaactctcacattacaatcctcacattgaaggttctcccccatttcgagagcctcggaaagcaggagaaaattcctaataaaatgagcgcattccgaaaccactgtccacacctggacagtgtcggtgaaattacaaaggaggacctgattcagaaaagtctgggtacctgccaggactgtaaggtgcagggacctaacctttgggcatgcctggaaaaccgttgcagctatgtgggctgtggcgaatcacaagtcgaccattcaaccatccacagccaagagacaaagcattacctgacagtcaacctgaccaccctgcgcgtgtggtgctacgcctgtagcaaggaggtgtttctggatcgaaagctagggactcagcccagcttgcctcacgtgaggcagccccaccagatacaggagaattctgtccaggactttaaaatccctagtaatactaccctgaagacccccctcgttgcagtgttcgatgacctggatatcgaagcggacgaagaggatgaattgcgggcacgcggattaaccggattgaaaaacattggcaacacgtgttacatgaacgccgcactgcaagcgtag

SEQ ID NO: 337455 - DNA, 222 bp, Artificial Sequence
  derived and/or modified sequence
atgagcgctttcaggaaccattgcccacacttagatagcgtcggagagattacgaaagaggatctgatacagaaatcactgggtacctgtcaggactgcaaggtccaggggccaaatctttgggcgtgtctcgagaataggtgtagttacgtggggtgtggtgaatcacaggtggatcactccactatccactcccaggaaacaaagcactacctcacctag

SEQ ID NO: 337456 - DNA, 336 bp, Artificial Sequence
  derived and/or modified sequence
atgaccggttctaattcacatatcacaatactgacccttaaagtgttacctcattttgagtcactggggaagcaggaaaaaatccctaataaaatgagcgccttccgaaaccactgtccccaccttgattccgtgggggagatcaccaaagaagatcttattcaaaagtccctgggaacctgccaggactgtaaggttcagggccctaacttgtgggcctgcctggagaaccggtgcagttatgtgggttgcggggagtcgcaggtggatcacagcactatacactctcaggagacaaaacactacctgactgttaacctcacaacactgaggtag

SEQ ID NO: 337457 - DNA, 949 bp, Artificial Sequence
  derived and/or modified sequence
ggccgttgttggtcgagctggcgggtcccgcgggccaggccgtggaggctttggtgtcaggatgatgctggcttcataaaatgagttacggaggattccttctttttatattgattggaatagtttcagaaggaatggtaccagctcctctttgtacctctggtagaattcggctgtgaatccgtctggtcctggactttttttgagctcctgaaggaagcactaaacatggaaaggaacaaccggtaccagccactgcaaaaacatgccaaattgtaaagaccatcgatgttaggaagaaactgcctcaactaatgagcaaaataaccagctaacatcgtaatgacaggatcaaattcacacataacgatattaaccttaaaggtgttacctcattttgaaagtcttgggaaacaggaaaaaattcctaacaaaatgtcagcttttcgaaatcattgtccacatttggattcagttggtgaaataacaaaagaagatttgatacaaaaatcccttggtacttgtcaggattgtaaagtccaaggaccaaatctttgggcatgtctggagaatagatgttcatatgttggctgtggtgaatcacaagtagatcacagcaccatacattctcaggagacaaagcattatctaactgtgaaccttaccactcttcgagtatggtgttatgcttgcagcaaagaagtatttttggataggaaattaggaactcagccttcattgcctcatgtaagacaacctcaccaaatacaagaaaacagtgtccaggattttaaaatacccagtaatacaacattaaaaactcctctggttgccgtatttgatgatctggatatagaagcggatgaagaagatgaacttagggccagaggtcttacaggtttgaaaaatattggaaatacttgttacatgaatgcagctttgcaggctc

SEQ ID NO: 337458 - DNA, 389 bp, Artificial Sequence
  derived and/or modified sequence
gaagtggccagttcaggaggcggaccccccgagggcagcgctgcggggccgttttccggccctcctgacgcgacactgcccctctccgagagctgagaaggaaaagaggagcttgcggaggtgttacctcattttgaaagtcttgggaaacaggaaaaaattcctaacaaaatgtcagcttttcgaaatcattgtccacatttggattcagttggtgaaataacaaaagaagatttgatacaaaaatcccttggtacttgtcaggattgtaaagtccaaggaccaaatctttgggcatgtctggagaatagatgttcatatgttggctgtggtgaatcacaagtagatcacagcaccatacattctcaggagacaaagcattatctaac

SEQ ID NO: 337459 - DNA, 549 bp, Artificial Sequence
  derived and/or modified sequence
aagggtcctcaggggttcttccctggaagcgggaggtgcagtgctttacttccaactatgtggtcaattttgtttacaagagctcctgaaggaagcactaaacatggaaaggaacaaccggtaccagccactgcaaaaacatgccaaattgtaaagaccatcgatgttaggaagaaactgcctcaactaatgagcaaaataaccagctaacatcgtaatgacaggatcaaattcacacataacgatattaaccttaaaggtgttacctcattttgaaagtcttgggaaacaggaaaaaattcctaacaaaatgtcagcttttcgaaatcattgtccacatttggattcagttggtgaaataacaaaagaagatttgatacaaaaatcccttggtacttgtcaggattgtaaagtccaaggaccaaatctttgggcatgtctggagaatagatgttcatatgttggctgtggtgaatcacaagtagatcacagcaccatacattctcaggagacaaagcattatctaactgtgaaccttaccactcttcg

SEQ ID NO: 337460 - protein, 792 aa, Artificial Sequence
  derived and/or modified sequence
MFSPTSAPALFLTKVPFSADCALATSPLAIFLNPRAHSSPGTPCSSRPLPWSCRTSNRKSLIVTSSTSPTLPRPHSPLHGHTGNSPLDSPRNFSPNAPAHFSFVPARRTDGRRWSLASLPSSGYGTNTPSSTVSSSCSSQEKLHQLPFQPTADELHFLTKHFSTESVPDEEGRQSPAMRPRSRSLSPGRSPVSFDSEIIMMNHVYKERFPKATAQMEERLAEFISSNTPDSVLPLADGALSFIHHQVIEMARDCLDKSRSGLITSQYFYELQDNLEKLLQDAHERSESSEVAFVMQLVKKLMIIIARPARLLECLEFDPEEFYHLLEAAEGHAKEGQGIKCDIPRYIVSQLGLTRDPLEEMAQLSSCDSPDTPETDDSIEGHGASLPSKKTPSEEDFETIKLISNGAYGAVFLVRHKSTRQRFAMKKINKQNLILRNQIQQAFVERDILTFAENPFVVSMFCSFDTKRHLCMVMEYVEGGDCATLLKNIGALPVDMVRLYFAETVLALEYLHNYGIVHRDLKPDNLLITSMGHIKLTDFGLSKIGLMSLTTNLYEGHIEKDAREFLDKQVCGTPEYIAPEVILRQGYGKPVDWWAMGIILYEFLVGCVPFFGDTPEELFGQVISDEIVWPEGDEALPPDAQDLTSKLLHQNPLERLGTGSAYEVKQHPFFTGLDWTGLLRQKAEFIPQLESEDDTSYFDTRSERYHHMDSEDEEEVSEDGCLEIRQFSSCSPRFNKVYSSMERLSLLEERRTPPPTKRSLSEEKEDHSDGLAGLKGRDRSWVIGSPEHHPSA

SEQ ID NO: 337461 - DNA, 2379 bp, Artificial Sequence
  derived and/or modified sequence
atgttttcccctacatcagctcccgcattgtttcttacaaaggtacccttttccgcagattgcgctctggcaactagcccacttgctatcttcctcaacccccgagcccatagttccccgggaaccccatgttcctcaagacctcttccttggtcatgtcgaacgtctaatcgaaaatcgctcatagtgacatctagcaccagcccaaccttgccaaggccgcactctcctctacatggtcataccggcaatagccctctggacagtcccagaaacttcagcccgaatgcccccgcacactttagcttcgtgcccgctcgacgtacggatgggcgacggtggtcactcgcatccttgccttccagcggttatggcaccaatacaccatcatcaaccgtgagttctagttgttcttctcaggagaaattgcatcagctgcccttccagcctacagcggacgagttgcattttctgacaaagcacttttctacagagtctgtcccagacgaggaaggccggcagagtccagccatgcgaccaagatcacggtcactctctccagggaggtccccagtctccttcgattccgagatcataatgatgaatcacgtttacaaggaaagatttcctaaggcgaccgcccagatggaggagagactggccgagtttatttcctcaaatacaccggatagcgtcctccccctcgccgacggggctctttcattcattcatcaccaggtcatcgagatggctagggactgcctagacaagtcaagatcaggtctcattacctcacaatacttctatgagctgcaggacaatctggaaaagctgttgcaagacgcccacgagcggtcagagtcaagtgaagtagccttcgtgatgcagctggtgaagaagttgatgattataatcgcaaggcctgcccggttgcttgaatgtctagagttcgaccctgaggagttttatcacttactcgaggccgctgagggtcacgcaaaagagggccagggcatcaaatgcgacatcccccgatacattgtcagtcagctcggcttaactcgcgaccccctagaagaaatggctcagctcagctcctgcgatagcccagacactccagaaacagatgactcaatcgaagggcacggagcctctttacccagtaaaaaaacaccgtcagaagaggacttcgagacaattaagctgatctcaaatggggcctatggagccgtgttcttggttagacacaaatctaccaggcaaaggttcgctatgaagaagattaacaaacagaaccttatcttacgcaatcaaatacagcaggcatttgtggagagagatatcttaacatttgcagaaaatccattcgttgtttcaatgttctgcagcttcgatacgaaacggcacctgtgtatggtgatggaatacgttgagggtggggactgcgccactttactcaagaatattggagccctgcctgttgacatggtgcggctttacttcgccgaaactgtcttggccctggaatacttacataactacgggatcgtacacagagacctcaagccagataatctcctgattacttctatgggccatatcaaattaaccgatttcgggctgtctaaaatcggtcttatgagtttgacaacaaatttgtacgagggccatatagagaaggatgccagggaattcttggataaacaggtgtgtggcacacccgagtacattgcaccagaagtcatcctaaggcagggatacggtaaacctgtggactggtgggctatgggaatcatactgtacgagtttctggtgggctgcgttcccttttttggagatacaccagaggagttgttcggccaggtcatcagcgatgagatagtctggcccgaaggcgatgaggcactgccccccgatgcgcaggacttgactagcaaactgttgcatcagaatcctcttgaaagactgggtacaggctctgcatacgaggtgaaacagcatcccttttttacgggactggactggaccggactgttgcgccagaaggctgaatttattcctcagttggaaagcgaagacgacaccagttatttcgacacaaggtccgagcgctaccatcatatggacagtgaggatgaggaggaggtttcagaggatggatgcttggagatccgtcaatttagctcttgcagtccaagatttaacaaggtttactcatcaatggaacgcctctcactactcgaggagcggaggactcctccacccacgaagagatctctgtcagaggaaaaagaggaccattctgacggcttggccggcttgaaaggaagggaccggtcctgggtgattggaagtcccgaacatcacccctcagcctag

SEQ ID NO: 337462 - DNA, 2379 bp, Artificial Sequence
  derived and/or modified sequence
atgttcagccccaccagcgccccagccctcttcctgaccaaggtgcccttctctgctgactgtgccctggccaccagccccctggccatcttcctgaacccccgggcccacagcagccctggcaccccctgcagcagccggcccctgccctggagctgcaggaccagcaacaggaagagcctcatcgtgaccagcagcaccagccccaccctgccccggccccacagccccctgcacggccacacaggcaacagccccctggacagccccaggaacttcagccccaatgccccagcccacttctcctttgtgcctgccaggagaacagatggccgccgctggagcctggccagcctgcccagcagcggctacggcaccaacacccccagcagcacagtgagcagcagctgcagcagccaggagaagctgcaccagctgcccttccagcccacagcagatgagctgcacttcctgaccaagcacttcagcacagagagcgtgcctgatgaggagggccggcagagccctgccatgaggcccaggagccgcagcctgagccctggccgcagccctgtgtcctttgacagcgagatcatcatgatgaaccacgtgtacaaggagcgcttccccaaggccacagcccagatggaggagcggctggccgagttcatcagcagcaacaccccagattctgtgctgcccctggctgatggagccctgtccttcatccaccaccaggtgattgagatggcccgggactgcctggacaagagccgcagcggcctcatcaccagccagtacttctatgagctgcaggacaacctggagaagctgctgcaggatgcccacgagaggtctgagagcagcgaggtggcctttgtgatgcagctggtgaagaagctgatgatcatcatcgcccggcctgcccggctgctggagtgcctggagtttgatcctgaggagttctaccacctgctggaggccgctgagggccacgccaaggagggccagggcatcaagtgtgacatcccccgctacatcgtgtcccagctgggcctgacccgggaccccctggaggagatggcccagctgagcagctgtgacagcccagacaccccagagacagatgacagcattgagggccacggggccagcctgcccagcaagaagaccccatctgaagaagattttgagaccatcaagctgatcagcaatggagcctacggggctgtgttcctggtgcgccacaagagcacccggcagagatttgccatgaagaagatcaacaagcagaacctgatcctgaggaaccagatccagcaggcctttgtggagcgggacatcctgacctttgctgagaacccctttgtggtgtccatgttctgcagctttgacaccaagaggcacctgtgcatggtgatggagtatgtggagggcggggactgtgccaccctgctgaagaacattggagccctgcctgtggacatggtgcggctgtactttgctgagaccgtgctggccctggagtacctgcacaactacggcatcgtgcaccgggacctgaagccagacaacctgctgatcacctccatgggccacatcaagctgacagactttggcctgagcaagattggcctgatgagcctgaccaccaacctgtatgagggccacatcgagaaggatgcccgggagttcctggacaagcaggtgtgtggcaccccagagtacatcgcccctgaggtgatcctgcggcagggctacggcaagcctgtggactggtgggccatgggcatcatcctgtatgagttcctggtgggctgtgtgcccttctttggagacaccccagaggagctgtttggccaggtgatcagtgatgaaattgtgtggccagaaggagatgaggccctgcccccagatgcccaggacctgaccagcaagctgctgcaccagaaccccctggagcggctgggcaccggcagcgcctatgaggtgaagcagcaccccttcttcaccggcctggactggacaggcctgctgcggcagaaggccgagttcatcccccagctggagagtgaagatgacaccagctactttgacaccaggtctgagcgctaccaccacatggacagtgaagatgaggaggaggtgtctgaagatggctgcctggagatccggcagttcagcagctgcagcccccgcttcaacaaggtgtacagctccatggagcggctgagcctgctggaggagaggaggaccccaccacccaccaagaggagcctgtctgaggagaaggaggaccacagtgatggcctggccggcctgaagggccgggaccgctcctgggtgattggcagccctgagcaccaccccagcgcctag

SEQ ID NO: 337463 - DNA, 2757 bp, Artificial Sequence
  derived and/or modified sequence
attcatttgggatctggaacttgtcactgtcccactgctgcctcgtgggctcttaggtcttttgtggggggatgggaggggtgttctgaagatcatgtttttgaagaaaagtactttaatttttgccaatctctaccctttgccgaggagctgaagtaaaccagcacatgttttcacccacatctgctccagccctcttcctcactaaagtcccatttagtgctgattgtgctttggctacttctcctcttgccattttcctgaacccacgagcccacagcagtcctggcactccttgttccagccgcccactgccgtggagttgtcggacaagtaaccgcaagagcttgattgtgacctctagcacatcacctacactaccacggccacactcaccactccatggccacacaggtaacagtcctttggacagcccccggaatttctctccaaatgcacctgctcacttttcttttgttcctgcccgtaggactgatgggcggcgctggtctttggcctctttgccctcttcaggatatggaactaacactcctagctccactgtctcatcatcatgctcctcacaggaaaagctgcatcagttgcctttccagcctacagctgatgagctgcactttttgacgaagcatttcagcacagagagcgtaccagatgaggaaggacggcagtccccagccatgcggcctcgctcccggagcctcagtcccggacgatccccagtatcctttgacagtgaaataataatgatgaatcatgtttacaaagaaagattcccaaaggccaccgcacaaatggaagagcgactagcagagtttatttcctccaacactccagacagcgtgctgcccttggcagatggagccctgagctttattcatcatcaggtgattgagatggcccgagactgcctggataaatctcggagtggcctcattacatcacaatacttctacgaacttcaagataatttggagaaacttttacaagatgctcatgagcgctcagagagctcagaagtggcttttgtgatgcagctggtgaaaaagctgatgattatcattgcccgcccagcacgtctcctggaatgcctggagtttgaccctgaagagttctaccaccttttagaagcagctgagggccacgccaaagagggacaagggattaaatgtgacattccccgctacatcgttagccagctgggcctcacccgggatcccctagaagaaatggcccagttgagcagctgtgacagtcctgacactccagagacagatgattctattgagggccatggggcatctctgccatctaaaaagacaccctctgaagaggacttcgagaccattaagctcatcagcaatggcgcctatggggctgtatttctggtgcggcacaagtccacccggcagcgctttgccatgaagaagatcaacaagcagaacctgatcctacggaaccagatccagcaggccttcgtggagcgtgacatactgactttcgctgagaacccctttgtggtcagcatgttctgctcctttgataccaagcgccacttgtgcatggtgatggagtacgttgaagggggagactgtgccactctgctgaagaatattggggccctgcctgtggacatggtgcgtctatactttgcggaaactgtgctggccctggagtacttacacaactatggcatcgtgcaccgtgacctcaagcctgacaacctcctaattacatccatggggcacatcaagctcacggactttggactgtccaaaattggcctcatgagtctgacaacgaacttgtatgagggtcatattgaaaaggatgcccgggaattcctggacaagcaggtatgcgggaccccagaatacattgcgcctgaggtgatcctgcgccagggctatgggaagccagtggactggtgggccatgggcattatcctgtatgagttcctggtgggctgcgtccctttttttggagatactccggaggagctctttgggcaggtgatcagtgatgagattgtgtggcctgagggtgatgaggcactgcccccagacgcccaggacctcacctccaaactgctccaccagaaccctctggagagacttggcacaggcagtgcctatgaggtgaagcagcacccattctttactggtctggactggacaggacttctccgccagaaggctgaatttattcctcagttggagtcagaggatgatactagctattttgacacccgctcagagcgataccaccacatggactcggaggatgaggaagaagtgagtgaggatggctgccttgagatccgccagttctcttcctgctctccaaggttcaacaaggtgtacagcagcatggagcggctctcactgctcgaggagcgccggacaccacccccgaccaagcgcagcctgagtgaggagaaggaggaccattcagatggcctggcagggctcaaaggccgagaccggagctgggtgattggctcccctgagcatcacccaagtgcctgatgcctcaggtgacagaaggcaggacgttccatgccgaggctgccccctcacccagaagtctgagcccagcctcaggaggggccaagaaccagggggccatcaaaagcatcgggatttggcattggttccagatgagcttttaaagcaaacatagcagttgtttgccatttcttgcactcagacctgtgtaatatatgctcctggaaaccat

SEQ ID NO: 337464 - DNA, 2379 bp, Artificial Sequence
  derived and/or modified sequence
atgttcagccccaccagcgcccccgccctgttcctgaccaaggtgcctttctcagccgattgcgccttggctaccagtcccctggcaattttcttaaatccccgtgcacactcttcacctggcaccccctgttcatcccgccccctcccctggtcctgccgaacaagtaatagaaaatccctcatagttaccagctccacctctccgacccttccacgtccccacagcccactacacggccatactgggaactcgccactggacagccctaggaacttctcccccaatgcgcctgcgcatttctcattcgtgcccgctcgaaggacggatggcaggcggtggtcactggctagcctgccttccagtggttacggtaccaacacgccgtccagcaccgtgtcgagttcctgcagttctcaggagaaactccaccagctcccttttcagccaacagctgacgagctacatttcctaaccaagcatttctcaactgagagcgtgccagacgaagagggtcgacagagccccgcaatgagacccaggtcacgctcactctctcccgggcgatctccggtatctttcgactccgaaattataatgatgaatcacgtgtataaagagaggtttccaaaggccacagcacagatggaggagcgactcgccgagttcattagtagcaatacacctgactcagtcctccccctggcagatggtgctctcagtttcattcatcaccaggtgatagaaatggctagagactgtctggataaatcgcgaagcggtctgatcactagccagtacttctatgaacttcaggataatcttgaaaagctgcttcaggacgcccacgaacgatctgaaagcagtgaggttgctttcgtgatgcaattagtgaaaaagcttatgatcatcattgcccggcctgcaagactgctggagtgcctggagtttgatcctgaagagttctaccatctcctggaggctgccgaggggcacgcaaaggaggggcaaggtatcaaatgtgacatccccaggtatatcgtcagtcaactcggactaaccagagacccccttgaagagatggctcagttatcaagttgtgattctccagacacacctgaaacagatgacagcattgagggtcatggggcttcactcccctccaagaagaccccgtccgaggaggatttcgagacgataaagttgatctccaatggtgcatacggagcagtttttcttgtgagacacaagtcaacccgccaacgcttcgccatgaaaaagataaataaacagaatttgatcctgaggaatcaaatacagcaagctttcgttgagcgtgatatcctgactttcgctgagaacccttttgtggtttctatgttctgctcctttgacaccaagagacacttatgtatggttatggagtatgtggaaggaggagactgcgcaaccctcctgaagaatatcggggccctgcctgtggatatggtaagattgtactttgcagagaccgtactagctctggaatacctccacaactatggcatagtacatcgggatttgaaaccagataacctcctgattactagcatgggacatatcaaattaactgactttggcttgagcaaaatcgggctgatgtctctaacaacaaacctctatgagggccacattgaaaaggacgctcgcgagtttttagataagcaggtctgtggcactccagagtatattgccccggaagtgatactgcgacagggttacggcaaacctgtagattggtgggcaatggggatcattctctacgaatttctcgtgggatgcgttccgttcttcggggatactcctgaggagctgttcggccaggtgatctcagacgagatcgtatggcctgaaggcgacgaggctctgcctcctgatgcacaggacctgacctccaagctgctgcaccagaaccccctcgaaaggcttggcacgggaagtgcctatgaagtcaagcaacatccctttttcaccggtctggattggaccggccttctccgccaaaaagccgaatttattccacagctcgagtccgaagatgacacctcttactttgacacccggagtgagcgctaccaccatatggattctgaagacgaagaggaggttagcgaggacggatgtctcgaaattaggcagttcagctcctgtagcccccggtttaacaaggtgtactcctctatggagcggctttctctccttgaggaaaggagaactccccctcctactaagcgtagtctaagcgaagaaaaagaagaccactcagacggactcgccgggctaaagggaagagatcggagctgggtgattggttcacctgagcaccaccccagcgcatag

SEQ ID NO: 337465 - DNA, 2379 bp, Artificial Sequence
  derived and/or modified sequence
atgttctcccccacctccgctcctgcactgttcctcaccaaggtacccttctccgccgattgcgcacttgcaacctcccctcttgccatctttctaaatcctcgcgcacatagtagccctggtacaccgtgctctagccggccactgccctggtcttgtcgcacaagcaatagaaagtccctgatcgtcaccagcagtacttccccgactctacccagaccacattccccacttcacggtcacacaggtaattctcctttggactcccctcgaaatttttctcccaacgctcctgctcatttttcatttgtgcccgctcgaagaactgacgggaggagatggagtctggcatccctcccaagctccggctatggaacaaacacaccatccagcacggtcagctcttcatgcagctcacaggagaaattgcaccagcttcccttccagcctaccgccgacgaattgcactttcttacgaagcatttctccaccgagagcgtcccagacgaagaaggtcgccagtcaccggctatgcgacccagatcccggtcactctcacccggtcgaagtcctgtgagctttgattcagaaattataatgatgaatcacgtttacaaagaacgattccctaaagctacagcgcagatggaggaacgactcgcagaattcatctcctccaacacccctgacagcgtgctccccttagcggacggcgctctctcttttatacaccatcaggtgattgaaatggcaagggactgtcttgataaatccagaagtggccttatcactagtcaatatttctatgaattgcaagataacttggagaagctgctgcaggacgcccacgaaaggtctgagtcctctgaagttgccttcgttatgcagctagtgaagaaactgatgatcatcattgctagacccgctagactgctggagtgtcttgagttcgatcctgaggagttttaccatctcttagaggccgcagaaggtcacgcgaaagaagggcagggaattaagtgcgatattccaagatacatcgtttcacagctcgggctgacccgggacccacttgaggagatggctcagctgtcttcgtgtgatagtcctgacactcccgagacagacgactccatagaaggccacggagcaagcttaccgagtaaaaagaccccttctgaagaagattttgaaaccattaagcttatttcgaacggcgcatatggtgctgtcttcttagtccgacataagagtacccgccagcgtttcgcgatgaagaaaatcaacaagcaaaacctaatcctccggaaccagattcagcaggctttcgtcgagagggatatattgaccttcgctgaaaacccattcgttgtgagcatgttctgtagtttcgacacaaagagacatctgtgtatggtgatggagtatgtggaaggcggagactgcgcgactctcctgaaaaatatcggagcccttcccgtcgacatggttagattgtacttcgcagaaaccgtgctggccttggaataccttcacaattatggaatagttcatcgggatttgaagccggacaacttgcttataacgtccatggggcacattaaattgacggattttggactgagtaaaatcgggctaatgtcgctcacaacgaacctgtatgagggccacatcgagaaggatgcccgagaatttttagataagcaggtttgcggcacacctgaatacatagcccctgaggtcatcctgaggcagggctatggaaagccagtggactggtgggcaatggggataattctgtatgaattcctggtgggatgcgtgcccttcttcggcgatacccctgaagaattatttggccaggtgatctcggacgagatcgtgtggcctgagggggacgaggccctgccacctgacgcccaagacctgacctctaagctgctgcatcagaaccccctggagcgcttgggtaccggatccgcatatgaggtgaaacagcatcctttcttcaccggattggattggaccggcctattacggcagaaggccgagttcatcccacagttagagagcgaagatgacacatcttatttcgacactcgctcagaacgctatcatcacatggatagtgaggatgaggaagaggtttccgaggatgggtgtctggaaattagacagttcagtagctgttcaccccgattcaacaaggtgtactcgagtatggaacggttaagtctcctggaggaacggaggacacctcccccaaccaagcggtccctgtcagaggaaaaggaagaccacagtgacggactggcgggactcaaaggcagagacagatcgtgggttataggctctcctgagcatcacccttctgcgtag

SEQ ID NO: 337466 - DNA, 2379 bp, Artificial Sequence
  derived and/or modified sequence
atgttcagccccaccagcgcccccgccctgttcctgaccaaggtgcccttcagcgccgactgcgccctggccaccagccccctggccatcttcctgaaccccagagcccacagcagccccggcaccccctgcagcagcagacccctgccctggagctgcagaaccagcaacagaaagagcctgatcgtgaccagcagcaccagccccaccctgcccagaccccacagccccctgcacggccacaccggcaacagccccctggacagccccagaaacttcagccccaacgcccccgcccacttcagcttcgtgcccgccagaagaaccgacggcagaagatggagcctggccagcctgcccagcagcggctacggcaccaacacccccagcagcaccgtgagcagcagctgcagcagccaggagaagctgcaccagctgcccttccagcccaccgccgacgagctgcacttcctgaccaagcacttcagcaccgagagcgtgcccgacgaggagggcagacagagccccgccatgagacccagaagcagaagcctgagccccggcagaagccccgtgagcttcgacagcgagatcatcatgatgaaccacgtgtacaaggagagattccccaaggccaccgcccagatggaggagagactggccgagttcatcagcagcaacacccccgacagcgtgctgcccctggccgacggcgccctgagcttcatccaccaccaggtgatcgagatggccagagactgcctggacaagagcagaagcggcctgatcaccagccagtacttctacgagctgcaggacaacctggagaagctgctgcaggacgcccacgagagaagcgagagcagcgaggtggccttcgtgatgcagctggtgaagaagctgatgatcatcatcgccagacccgccagactgctggagtgcctggagttcgaccccgaggagttctaccacctgctggaggccgccgagggccacgccaaggagggccagggcatcaagtgcgacatccccagatacatcgtgagccagctgggcctgaccagagaccccctggaggagatggcccagctgagcagctgcgacagccccgacacccccgagaccgacgacagcatcgagggccacggcgccagcctgcccagcaagaagacccccagcgaggaggacttcgagaccatcaagctgatcagcaacggcgcctacggcgccgtgttcctggtgagacacaagagcaccagacagagattcgccatgaagaagatcaacaagcagaacctgatcctgagaaaccagatccagcaggccttcgtggagagagacatcctgaccttcgccgagaaccccttcgtggtgagcatgttctgcagcttcgacaccaagagacacctgtgcatggtgatggagtacgtggagggcggcgactgcgccaccctgctgaagaacatcggcgccctgcccgtggacatggtgagactgtacttcgccgagaccgtgctggccctggagtacctgcacaactacggcatcgtgcacagagacctgaagcccgacaacctgctgatcaccagcatgggccacatcaagctgaccgacttcggcctgagcaagatcggcctgatgagcctgaccaccaacctgtacgagggccacatcgagaaggacgccagagagttcctggacaagcaggtgtgcggcacccccgagtacatcgcccccgaggtgatcctgagacagggctacggcaagcccgtggactggtgggccatgggcatcatcctgtacgagttcctggtgggctgcgtgcccttcttcggcgacacccccgaggagctgttcggccaggtgatcagcgacgagatcgtgtggcccgagggcgacgaggccctgccccccgacgcccaggacctgaccagcaagctgctgcaccagaaccccctggagagactgggcaccggcagcgcctacgaggtgaagcagcaccccttcttcaccggcctggactggaccggcctgctgagacagaaggccgagttcatcccccagctggagagcgaggacgacaccagctacttcgacaccagaagcgagagataccaccacatggacagcgaggacgaggaggaggtgagcgaggacggctgcctggagatcagacagttcagcagctgcagccccagattcaacaaggtgtacagcagcatggagagactgagcctgctggaggagagaagaacccccccccccaccaagagaagcctgagcgaggagaaggaggaccacagcgacggcctggccggcctgaagggcagagacagaagctgggtgatcggcagccccgagcaccaccccagcgcctag

SEQ ID NO: 337467 - DNA, 4827 bp, Artificial Sequence
  derived and/or modified sequence
atgaaacggtcacggtgcagggatcggccacagcccccaccccctgataggagggaagatggcgttcagcgcgccgcagagttgtctcagagtctccccccacggagaagggcccctcctgggcgccagcgccttgaggagcgaacaggaccagcaggtccagaaggcaaggaacaggatgtggtaacaggcgtgagtccactgttattccgaaaattgtctaatccggacatcttttcctccaccgggaaagtgaaactgcagcgccaactcagtcaggacgattgcaaattgtggagagggaatctggcatcatcattgagtggtaagcagctgctgccattgtcatctagtgtgcattcctccgtgggccaggtaacatggcagagctctggggaggcaagcaatttggtcagaatgaggaaccagtccctgggacagtctgcgccatctctcacagcggggctgaaggaattgtcgctacctaggcgtggcagcttctgtcggacaagtaaccgaaaaagtcttatcgtgacatctagtaccagtcctaccctgcctcggccacacagtcctctgcacggccacaccggcaacagccctctggacagtccccggaacttctctccaaatgccccagcccacttctcattcgtgcccgctaggcggactgacggtcgccggtggtcactggcttcccttccttcctctggatacggtaccaacaccccctcgtccactgtttcttcctcttgctccagtcaggaaaagctgcatcagcttccattccagcctactgccgatgagctccacttcctgaccaagcacttctcaaccgagagcgttccagacgaagaaggacggcaatcccctgcaatgcgacccaggtctagatcactctcaccaggccggtccccagtatccttcgacagtgaaatcatcatgatgaaccatgtgtataaggagcgattccccaaagcccacgaacgcagtgaatcaagcgaggtggcatttgtgatgcagctggtcaagaaactcatgatcattattgcgaggccagcccggttactggaatgcctggagttcgaccctgaggagttctatcatcttctggaagcagcggagggacatgcaaaagaagggcaagggatcaaatgtgatatcccacggtatattgtgtctcagctcggactcacgcgcgacccgctggaagaaatggctcaacttagttcctgcgactcacctgacacccccgagacagatgatagtatcgagggccatggcgcgagccttccctcaaagaagacaccatccgaagaggactttgaaacaatcaagctcatatctaatggcgcctacggggcagtttttcttgtgcggcacaagagtacaagacagcggtttgctatgaagaagattaataagcagaatttaattctgaggaatcagatccagcaggcctttgtcgagcgagatattcttacctttgctgagaaccccttcgtggtgtccatgttttgttcctttgataccaaaagacacctgtgtatggtaatggagtacgtggaggggggtgactgcgcaaccctgttgaagaatatcggtgcattacccgtcgacatggtgcggttgtacttcgcagaaaccgtccttgcattggagtacttgcataattatggcatagtgcatcgcgacttaaaacctgataacctactaattaccagcatgggccacatcaagctgaccgactttggcctctcaaagattgggttaatgagtctgaccacgaatctgtatgaaggacatattgagaaagatgcacgggaatttctggataaacaagtgtgcgggactccagagtacatcgctcctgaagtcattctgaggcagggttacgggaagcctgttgattggtgggccatggggatcatcttgtacgagtttctcgtggggtgtgtgccattctttggggacacacccgaagagctcttcggtcaagtcatctcagacgaaatcgtgtggccagagggagacgaggctctgcccccagacgcccaggatctgacctcgaagctcctccaccagaacccactggagcggcttgggaccggcagcgcctatgaggtaaaacagcacccctttttcactggcttagattggacaggccttctgaggcagaaagctgaatttatccctcagttagaaagtgaggacgacacatcttatttcgacaccaggtccgaacgctatcatcacatggatagtgaagatgaagaagaagtctctgaggacgggtgcttagagatccggcagttctcaagctgctcccctaggttcaataaagtatactctagtatggaacgtctgtcactcctggaagagaggagaactccacctcccaccaaacgatctctgtccgaggaaaaggaagaccattcagatggactggctggtcttaaagggagggaccgaagctgggtcattggttctcccgaaatcctgaggaaacgtctgtccgtttctgagtcatcacacacagagtctgactctagccccccaatgacagtgaggcggcggtgctcggggctgctcgatgctcccagatttccggagggcccagaggaggccagcagtaccctgaggagacaacctcaagaaggcatatgggtattaacaccacctagtggggaaggggtgagcggtcctgtgaccgagcacagtggtgagcagagaccaaagctggacgaagaggccgtagggcggtcttccggctcctctcccgctatggagacacggggaagggggacatctcagctagccgaaggagctacagctaaggccatctcagatcttgctgtgaggcgcgcgcggcaccgcctcctttcaggagactccactgagaagcgcaccgcccgcccagtgaacaaggtaataaagagtgcatccgctactgccctgagcctgttgatccccagcgaacaccacacgtgtagccccctggcttctcctatgagtccacacagccagtcttcgaacccatctagccgtgattcctccccttatggattcactctcagagcaattcgcgtgtatatgggggactctgatgtgtacacagtacaccatatggtatggcatgtagaggacggtggtcctgcttcagaagctggcttgcgtcaaggcgacttaattactcacgtgaacggggagcccgttcatggacttgtgcataccgaggtcgtcgagctaatcctgaagtccggaaataaagtggccataagtacaacaccactcgagaatacctctatcaaggtgggccccgccaggaaaggatcttataaggcaaagatggcaaggcgcagcaaacggagcagaggaaaagatggtcaagaatctcgcaagcggagctccctctttcgtaaaattaccaagcaagcgtctctcctgcatacgagcaggtcactctccagtctcaacagatcactgagctctggtgagagcgggcctggcagccctacccacagtcacagtctttcgccacgatctcccacccagggatatcgggttacccctgatgccgtgcactcggagctgagtagacccaagtcagcagaacctcctagaagccccttgttaaaaagggtccagagtgccgagaaattggccgccgcgctggctgcctctgagaaaaagttggccacgtcacgcaagcactctctggacctgcctcattcggaactgaagaaggagctccctccccgggaggtcagtccgctcgaagtagtgggagcaagatccgtgctctctggaaagggagccctgccaggcaagggcgttctgcagcccgctccaagtagagcacttggcacattgcgacaagaccgtgctgagaggcgagagagccttcagaaacaagaagccattagagaggtcgactcttccgaggacgacacagaggaaggtcccgagaattcccaaggcgcccaggagctgtccctggctccacatcctgaagtgagtcagagtgtggcacccaagggcgcaggcgagtccggggaggaagacccattcccgagtagggatcctagatccttaggccctatggttccgtctctgcttaccgggattacgctaggcccacctcggatggaaagtcccagtggcccacaccgccgactggggagtccacaggccattgaggaggcagctagctcttcttccgccggacccaacctaggacaatccggggccacagaccctattccccctgagggatgttggaaggcacagcacctacacacgcaggcgctcactgccctgtccccttctacatctggactcacgcctacatccagctgtagccctcctagcagcacctctggcaaattgtctatgtggagttggaagtccttgattgaaggcccagatcgggcaagccccagtaggaaggcaactatggcgggggggctcgcaaacttgcaagacttagagaacactacccctgctcagccgaagaacttgtcccctcgggaacagggcaaaacccaacctccaagcgccccacgactggcccacccaagttacgaagatccgtcccaggggtggctgtgggagagtgagtgtgcccaggccgtgaaagaggaccccgcactcagtatcacccaagtgcccgacgcatcgggggaccgccggcaggacgtgccgtgtagaggttgtccactgactcagaaaagcgagccctctctgagaagaggccaagagccagggggccatcaaaaacatagggatctggcactggtacctgacgagctgcttaaacagacttag

SEQ ID NO: 337468 - DNA, 1035 bp, Artificial Sequence
  derived and/or modified sequence
atggacgacagcagcatcctgcggcggaggggactccaaaaagaactgagcctcccacggcgcgggagcttttgccgcaccagtaaccgcaagagccttatcgtgacaagcagcaccagtcccacactacctagacctcattcccccctgcatggccacactggaaatagccccctggacagccctcggaatttctccccaaacgcgcccgcccacttcagttttgttccagcccgatcgcactcccatcgggctgatagaacagacggtaggcggtggtcactcgctagccttccttcttcaggatatgggacaaatactccgagttcgaccgtgtcgtcatcttgttctagtcaggagaagctgcaccagcttccatttcagcctacggcagacgaattacatttcctgactaagcacttcagcaccgagagcgtgccagacgaagagggtcgccagtcccccgccatgcgacccgcaccttcacgcgccctgggtacactgaggcaagatagagccgagcgtcgagaatcattgcagaagcaggaagccatacgagaggtggactcttcagaggatgacacagaagagggccctgaaaacagtcagggcgctcaggagctgtcactggcaccccacccagaggtctctcagtcagtggcacctaagggagctggggaaagtggggaggaagatccctttccatccagagatccccgaagtcttggccccatggtcccgtccttacttacgggtataacccttggtccacctcgcatggagtccccctctgggccccaccgccgactcgggtcaccgcaagctatcgaagaggctgctagttcttctagtgcagggccgaacctaggacagtctggcgccacggaccctataccgcccgaaggatgctggaaagcccagcatctccacacccaagcactgaccgctctgagcccgagcacctccggtttggcacacctgatgcggattccagccagggcgggttatggttctctcagcgtccacaagcaatag

SEQ ID NO: 337469 - DNA, 4827 bp, Artificial Sequence
  derived and/or modified sequence
atgaagaggagccgctgccgggaccggccccagcccccacctccagacagaagagaagatggagtgcagagagctgctgagctgagccagagcctgcccccaagaagaagagcccctcctggccggcagaggctggaggagaggactggacctgctggccctgagggcaaggagcaggatgtggtgactggagtgagccccctgctcttcaggaagctgagcaacccagacatcttcagcagcacaggcaaggtgaagctgcagaggcagctgagccaggatgactgcaagctgtggaggggcaacctggccagcagcctgagcggcaagcagctgctgcccctgagcagctctgtgcacagctctgtgggccaggtgacctggcagagcagtggagaggccagcaacctggtgaggatgaggaaccagagcctgggccagagcgcccccagcctgacagctggcctgaaggagctgagcctgccccggcggggcagcttctgcaggaccagcaacaggaagagcctgattgtgaccagcagcaccagccccaccctgccccggccccacagccccctgcacggccacactggaaacagccccctggacagccccaggaacttcagccccaatgccccagcccacttctcctttgtgcctgcccggaggacagatggaagacgctggagcctggccagcctgcccagcagcggctacggcaccaacacccccagcagcacagtgagcagcagctgcagcagccaggagaagctgcaccagctgcccttccagcccacagcagatgagctgcacttcctgaccaagcacttcagcacagaatctgtgcctgatgaggagggccggcagagccctgccatgaggcccaggagccgcagcctgagccctggccgcagccctgtgtcctttgattctgagatcatcatgatgaaccacgtgtacaaggagcgcttccccaaggcccacgagaggtctgagagcagcgaggtggcctttgtgatgcagctggtgaagaagctgatgatcatcatcgcccggcctgcccggctgctggagtgcctggagtttgatcctgaggagttctaccacctgctggaggccgctgagggccacgccaaggagggccagggcatcaagtgtgacatcccccgctacatcgtgtcccagctgggcctgacccgggaccccctggaggagatggcccagctgagcagctgtgacagcccagacaccccagagacagatgacagcattgagggccatggagccagcctgcccagcaagaagacccccagcgaggaggactttgagaccatcaagctgatcagcaatggagcctatggagctgtgttcctggtgcgccacaagagcacccggcagagatttgccatgaagaagatcaacaagcagaacctgatcctgaggaaccagatccagcaggcctttgtggagcgggacatcctgacctttgctgagaacccctttgtggtgtccatgttctgcagctttgacaccaagaggcacctgtgcatggtgatggagtatgtggagggcggggactgtgccaccctgctgaagaacatcggggccctgcctgtggacatggtgcggctgtactttgctgagaccgtgctggccctggagtacctgcacaactatggaattgtgcaccgggacctgaagccagacaacctgctgatcacctccatgggccacatcaagctgacagactttggcctgagcaagattggcctgatgagcctgaccaccaacctgtatgagggccacatcgagaaggatgcccgggagttcctggacaagcaggtgtgtggcaccccagagtacatcgcccctgaggtgatcctgcggcagggctacggcaagcctgtggactggtgggccatgggcatcatcctgtatgagttcctggtgggctgtgtgcccttcttcggggacaccccagaggagctgtttggccaggtgatcagtgatgagatcgtgtggccagaaggagatgaggccctgcccccagatgcccaggacctgaccagcaagctgctgcaccagaaccccctggagcggctgggcactggaagtgcctatgaggtgaagcagcaccccttcttcaccggcctggactggacaggcctgctgcggcagaaggccgagttcatcccccagctggagagtgaagatgacaccagctactttgacaccaggtctgagcgctaccaccacatggattctgaagatgaggaggaggtgtctgaagatggctgcctggagatccggcagttcagcagctgcagcccccgcttcaacaaggtgtacagctccatggagcggctgagcctgctggaggagaggaggaccccaccacccaccaagaggagcctgtctgaggagaaggaggaccacagtgatggcctggccggcctgaagggccgggaccgctcctgggtgattggcagccctgagatcctgaggaagaggctgtctgtgtctgagagcagccacacagaaagtgacagcagcccccccatgacagtgagaagacgctgcagcggcctgctggatgccccccgcttccctgagggccctgaggaggccagcagcaccctgcggcggcagccccaggagggcatctgggtgctgaccccaccttctggagagggcgtgtctggccctgtgacagagcacagcggggagcagaggcccaagctggatgaggaggccgtgggccgcagcagcggcagcagccctgccatggagacccggggccggggcaccagccagctggccgagggcgccacagccaaggccatcagtgacctggccgtgcggcgggcccggcaccggctgctgagcggggacagcacagagaagaggacagcccggcctgtgaacaaggtgatcaagagcgccagcgccacagccctgagcctgctgatccccagcgagcaccacacctgcagccccctggccagccccatgagcccccacagccagagcagcaaccccagcagccgggacagcagcccctacggcttcaccctgcgggccatccgggtgtacatgggagacagtgatgtgtacacagtgcaccacatggtgtggcacgtggaggatggcggccctgccagcgaggccggcctgcggcagggcgacctgatcacccacgtgaatggagagcctgtgcacggcctggtgcacacagaggtggtggagctgatcctgaagagcggcaacaaggtggccatcagcaccacccccctggagaacaccagcatcaaggtgggccctgccaggaagggcagctacaaggccaagatggcccggcgcagcaagaggagccggggcaaggatggccaggagagcaggaagaggagcagcctcttcaggaagatcaccaagcaggccagcctgctgcacaccagccgcagcctgagcagcctgaacagaagcctgagcagcggggagagcggccctggcagccccacccacagccacagcctgagccccaggagccccacccagggctacagagtgaccccagatgctgtgcacagcgagctgagccggcccaagtctgctgagccccccaggagccccctgctgaagagggtgcagagcgctgagaagctggccgccgccctggccgccagcgagaagaagctggccaccagcaggaagcacagcctggacctgccccacagcgagctgaagaaggagctgcccccccgggaggtgagccccctggaggtggtgggcgcccggtctgtgctgtctggaaaaggagccctgcctggaaaaggagtgctgcagcctgcccccagccgggccctgggcaccctgcggcaggacagagctgagcggcgggagagcctgcagaagcaggaggccatccgggaggtggacagcagtgaagatgacacagaggagggccctgagaacagccagggcgcccaggagctgagcctggccccccaccctgaggtgtcccagagcgtggcccccaagggggccggggagagcggggaggaggaccccttccccagccgggaccccaggagcctgggccccatggtgcccagcctgctgaccggcatcaccctgggcccccccaggatggagagccccagcggcccccaccggcggctgggcagcccccaggccatcgaggaggccgccagcagcagcagcgctggccccaacctgggccagagcggggccacagaccccatccccccagagggctgctggaaggcccagcacctgcacacccaggccctgacagccctgagccccagcaccagcggcctgacccccaccagcagctgcagcccccccagcagcaccagcggcaagctgtccatgtggagctggaagagcctcatcgagggccctgaccgggccagccccagcaggaaggccaccatggccggcggcctggccaacctgcaggacctggagaacaccaccccagcccagcccaagaacctgagcccccgggagcagggcaagacccagcccccatctgccccccggctggcccaccccagctatgaggaccccagccagggctggctgtgggagagtgaatgtgcccaggccgtgaaggaggaccctgccctgagcatcacccaggtgcctgatgccagcggggaccggcggcaggatgtgccctgccggggctgccccctgacccagaagtctgagcccagcctgcggcggggccaggagcccggcggccaccagaagcaccgggacctggccctggtgcctgatgagctgctgaagcagacctag

SEQ ID NO: 337470 - DNA, 1035 bp, Artificial Sequence
  derived and/or modified sequence
atggatgacagcagcatcctgcggcggcggggcctgcagaaggagctgagcctgccccggcggggcagcttctgcaggaccagcaacaggaagagcctcatcgtgaccagcagcaccagccccaccctgccccggccccacagccccctgcacggccacacaggcaacagccccctggacagccccaggaacttcagccccaatgccccagcccacttctcctttgtgcctgcccggagccacagccacagagctgacagaacagatggaagacgctggagcctggccagcctgcccagcagcggctacggcaccaacacccccagcagcacagtgagcagcagctgcagcagccaggagaagctgcaccagctgcccttccagcccacagcagatgagctgcacttcctgaccaagcacttcagcacagaatctgtgcctgatgaggagggccggcagagccctgccatgaggcctgcccccagccgggccctgggcaccctgcggcaggacagagctgagcggcgggagagcctgcagaagcaggaggccatccgggaggtggacagcagtgaagatgacacagaggagggccctgagaacagccagggcgcccaggagctgagcctggccccccaccctgaggtgtcccagagcgtggcccccaagggagctggggagagcggggaggaggaccccttccccagccgggaccccaggagcctgggccccatggtgcccagcctgctgaccggcatcaccctgggcccccccaggatggagagccccagcggcccccaccggcggctgggcagcccccaggccatcgaggaggccgccagcagcagcagcgctggccccaacctgggccagagcggggccacagaccccatccccccagagggctgctggaaggcccagcacctgcacacccaggccctgacagccctgagccccagcaccagcggcctggcccacctgatgaggatcccagcccgggccggctacggcagcctgtctgtgcacaagcagtag

SEQ ID NO: 337471 - DNA, 5110 bp, Artificial Sequence
  derived and/or modified sequence
taggcaggcggctgagccggcggcgggtggcctgcccaacgtgtgctgggtgggagaaggcgaggcgtcagcgatgctgtctcttccgtgaggagcgcagaggaggtcgcggcgccggaggccccagaaggctcgaaggcgccgcgggctggggtcggtggcttagggagcccgtccggccatggtggccgcgggtggtggttggcgcggctgcgctgcggcccggggcagtgcggagccgggacagtcgcggcgctgacgcccgcgggccccagctgcagatatgaagcggagccgctgccgcgaccgaccgcagccgccgccgcccgaccgccgggaggatggagttcagcgggcagcggagctgtctcagtctttgccgccgcgccggcgagcgccgcccgggaggcagcggctggaggagcggacgggccccgcggggcccgagggcaaggagcaggatgtagtaactggagttagtcccctgctcttcaggaaactcagtaatcctgacatattttcatccactggaaaagttaaacttcagcgacaactgagtcaggatgattgtaagttatggagaggaaacctggccagctctctatcgggtaagcagctgctccctttgtccagcagtgtacatagcagtgtgggacaggtgacttggcagtcgtcaggagaagcatcaaacctggttcgaatgagaaaccagtcccttggacagtctgcaccttctcttactgctggcctgaaggagttgagccttccaagaagaggcagcttttgtcggacaagtaaccgcaagagcttgattgtgacctctagcacatcacctacactaccacggccacactcaccactccatggccacacaggtaacagtcctttggacagcccccggaatttctctccaaatgcacctgctcacttttcttttgttcctgcccgtaggactgatgggcggcgctggtctttggcctctttgccctcttcaggatatggaactaacactcctagctccactgtctcatcatcatgctcctcacaggaaaagctgcatcagttgcctttccagcctacagctgatgagctgcactttttgacgaagcatttcagcacagagagcgtaccagatgaggaaggacggcagtccccagccatgcggcctcgctcccggagcctcagtcccggacgatccccagtatcctttgacagtgaaataataatgatgaatcatgtttacaaagaaagattcccaaaggctcatgagcgctcagagagctcagaagtggcttttgtgatgcagctggtgaaaaagctgatgattatcattgcccgcccagcacgtctcctggaatgcctggagtttgaccctgaagagttctaccaccttttagaagcagctgagggccacgccaaagagggacaagggattaaatgtgacattccccgctacatcgttagccagctgggcctcacccgggatcccctagaagaaatggcccagttgagcagctgtgacagtcctgacactccagagacagatgattctattgagggccatggggcatctctgccatctaaaaagacaccctctgaagaggacttcgagaccattaagctcatcagcaatggcgcctatggggctgtatttctggtgcggcacaagtccacccggcagcgctttgccatgaagaagatcaacaagcagaacctgatcctacggaaccagatccagcaggccttcgtggagcgtgacatactgactttcgctgagaacccctttgtggtcagcatgttctgctcctttgataccaagcgccacttgtgcatggtgatggagtacgttgaagggggagactgtgccactctgctgaagaatattggggccctgcctgtggacatggtgcgtctatactttgcggaaactgtgctggccctggagtacttacacaactatggcatcgtgcaccgtgacctcaagcctgacaacctcctaattacatccatggggcacatcaagctcacggactttggactgtccaaaattggcctcatgagtctgacaacgaacttgtatgagggtcatattgaaaaggatgcccgggaattcctggacaagcaggtatgcgggaccccagaatacattgcgcctgaggtgatcctgcgccagggctatgggaagccagtggactggtgggccatgggcattatcctgtatgagttcctggtgggctgcgtccctttttttggagatactccggaggagctctttgggcaggtgatcagtgatgagattgtgtggcctgagggtgatgaggcactgcccccagacgcccaggacctcacctccaaactgctccaccagaaccctctggagagacttggcacaggcagtgcctatgaggtgaagcagcacccattctttactggtctggactggacaggacttctccgccagaaggctgaatttattcctcagttggagtcagaggatgatactagctattttgacacccgctcagagcgataccaccacatggactcggaggatgaggaagaagtgagtgaggatggctgccttgagatccgccagttctcttcctgctctccaaggttcaacaaggtgtacagcagcatggagcggctctcactgctcgaggagcgccggacaccacccccgaccaagcgcagcctgagtgaggagaaggaggaccattcagatggcctggcagggctcaaaggccgagaccggagctgggtgattggctcccctgagatattacggaagcggctgtcggtgtctgagtcatcccacacagagagtgactcaagccctccaatgacagtgcgacgccgctgctcaggcctcctggatgcgcctcggttcccggagggccctgaggaggccagcagcaccctcaggaggcaaccacaggagggtatatgggtcctgacacccccatctggagagggggtatctgggcctgtcactgaacactcaggggagcagcggccaaagctggatgaggaagctgttggccggagcagtggttccagtccagctatggagacccgaggccgtgggacctcacagctggctgagggagccacagccaaggccatcagtgacctggctgtgcgtagggcccgccaccggctgctctctggggactcaacagagaagcgcactgctcgccctgtcaacaaagtgatcaagtccgcctcagccacagccctctcactcctcattccttcggaacaccacacctgctccccgttggccagccccatgtccccacattctcagtcgtccaacccatcatcccgggactcttctccatatggcttcaccctgcgggccattcgcgtctacatgggtgactccgatgtctacaccgtgcaccatatggtgtggcacgtggaggatggaggtccggccagtgaggcagggcttcgtcaaggtgacctcatcacccatgtcaatggggaacctgtgcatggcctggtgcacacggaggtggtagagctgatcctgaagagtggaaacaaggtggccatttcaacaactcccctggagaacacatccattaaagtggggccagctcggaagggcagctacaaggccaagatggcccgaaggagcaagaggagccgcggcaaggatgggcaagaaagcagaaaaaggagctccctgttccgcaagatcaccaagcaagcatccctgctccacaccagccgcagcctttcttcccttaaccgctccttgtcatcaggggagagtgggccaggctctcccacacacagccacagcctttccccccgatctcccactcaaggctaccgggtgacccccgatgctgtgcattcagaactctcacggcccaagagtgcggagccaccccgttcaccactactcaagagggtgcagtcggctgagaaactggcagcagcacttgccgcctctgagaagaagctagccacttctcgcaagcacagccttgacctgccccactctgaactaaagaaggaactgccgcccagggaagtgagccctctggaggtagttggagccaggagtgtgctgtctggcaagggggccctgccagggaagggggtgctgcagcctgctccctcacgggccctaggcaccctccggcaggaccgagccgaacgacgggagtcgctgcagaagcaagaagccattcgtgaggtggactcctcagaggacgacaccgaggaagggcctgagaacagccagggtgcacaggagctgagcttggcacctcacccagaagtgagccagagtgtggcccctaaaggagcaggagagagtggggaagaggatcctttcccgtccagagaccctaggagcctgggcccaatggtcccaagcctattgacagggatcacactggggcctcccagaatggaaagtcccagtggtccccacaggaggctcgggagcccacaagccattgaggaggctgccagctcctcctcagcaggccccaacctaggtcagtctggagccacagaccccatccctcctgaaggttgctggaaggcccagcacctccacacccaggcactaacagcactttctcccagcacttcgggactcacccccaccagcagttgctctcctcccagctccacctctgggaagctgagcatgtggtcctggaaatcccttattgagggcccagacagggcatccccaagcagaaaggcaaccatggcaggtgggctagccaacctccaggatttggaaaacacaactccagcccagcctaagaacctgtctcccagggagcaggggaagacacagccacctagtgcccccagactggcccatccatcttatgaggatcccagccagggctggctatgggagtctgagtgtgcacaagcagtgaaagaggatccagccctgagcatcacccaagtgcctgatgcctcaggtgacagaaggcaggacgttccatgccgaggctgccccctcacccagaagtctgagcccagcctcaggaggggccaagaaccagggggccatcaaaagcatcgggatttggcattggttccagatgagcttttaaagcaaacatag

SEQ ID NO: 337472 - DNA, 2107 bp, Artificial Sequence
  derived and/or modified sequence
aatgatctagctcctgaagaaagaggctttcgttactgtccaagaagtgaagaccagtgagtctagcgataaagaaacaaaagagcccctgacagtatcgaaagaatctgacatttgctttgtctgtacaaaggatgaaaggaattttgccgacttagtcaaaacaataactggttttatatcattttgagtctaaaatacaggcatcagaatcgtatgtttttctttgtatttctgaagaattgtcatctttttaaaaacgtatgtggagtggttttgtttctggaaaggaaaacgtgacatggattttataagcttagtagctgtaggtggagactcttgttttgtttgctaaacctttttaataagcagcaaagtcaggatatcaaagattggaatttttcccccggaaccttttgttcttttcttagtacttcaaataatttcaaccaaaggggtatgcatggaaaatgaaaacaaatatgaagtctttccgctatttggcagtgcttcagatgagatgtatctatacttctgtgaagaaagacgtgattctgatatgaggcagtgattgtatacttacgctggacagagggataactggtttagtggaacagtgggttagtggtgtgctgaaaggattgtttgcctctttatccagcagtaagtaggcactagtagttgactgtctggggagtggcttttttttgtctgatatctattatggatgattccagtattctgagaaggagagggttacagaaggagttgagccttccaagaagaggcagcttttgtcggacaagtaaccgcaagagcttgattgtgacctctagcacatcacctacactaccacggccacactcaccactccatggccacacaggtaacagtcctttggacagcccccggaatttctctccaaatgcacctgctcacttttcttttgttcctgcccgtagccatagccacagagctgacaggactgatgggcggcgctggtctttggcctctttgccctcttcaggatatggaactaacactcctagctccactgtctcatcatcatgctcctcacaggaaaagctgcatcagttgcctttccagcctacagctgatgagctgcactttttgacgaagcatttcagcacagagagcgtaccagatgaggaaggacggcagtccccagccatgcggcctgctccctcacgggccctaggcaccctccggcaggaccgagccgaacgacgggagtcgctgcagaagcaagaagccattcgtgaggtggactcctcagaggacgacaccgaggaagggcctgagaacagccagggtgcacaggagctgagcttggcacctcacccagaagtgagccagagtgtggcccctaaaggagcaggagagagtggggaagaggatcctttcccgtccagagaccctaggagcctgggcccaatggtcccaagcctattgacagggatcacactggggcctcccagaatggaaagtcccagtggtccccacaggaggctcgggagcccacaagccattgaggaggctgccagctcctcctcagcaggccccaacctaggtcagtctggagccacagaccccatccctcctgaaggttgctggaaggcccagcacctccacacccaggcactaacagcactttctcccagcacttcgggactggcccatcttatgaggatcccagccagggctggctatgggagtctgagtgtgcacaagcagtgaaagaggatccagccctgagcatcacccaagtgcctgatgcctcaggtgacagaaggcaggacgttccatgccgaggctgccccctcacccagaagtctgagcccagcctcaggaggggccaagaaccagggggccatcaaaagcatcgggatttggcattggttccagatgagcttttaaagcaaacatagcagttgtttgccatttcttgcactcagacctgtgtaatatatgctcctggaaaccatctttatgtcttttgcttgcttgttttccttcggtcaacccacatgtaactaggtcctgtgttgctgctgggaatatagtggtgaataaaacagtttccacc

SEQ ID NO: 337473 - DNA, 4827 bp, Artificial Sequence
  derived and/or modified sequence
atgaagcggagccggtgccgggaccggccccagccccccccccccgaccgacgggaggacggcgtgcagcgtgctgccgagctcagtcagagcctacccccacgccgacgagccccaccaggaagacagcgcctggaagagcgcaccggcccagcagggccggaggggaaagagcaagacgtggtgaccggcgtatctcctctcctctttagaaagctgtctaaccccgacatattctcctcaacaggcaaggtgaagctccagcggcaactgagccaggatgattgcaagttatggcgaggcaatctggcgagctcgcttagcgggaagcagttgctgcccctgtctagctccgtgcattctagcgtgggacaggtgacctggcagtcctccggcgaggcttcaaacttggttcgcatgcgaaaccaatccctaggacagtcagcaccaagcttaaccgccggacttaaggaactgtctttaccccgtagggggtctttctgcaggacttccaacaggaaatcattaatcgtgaccagttctacttcccctacactgccccgaccccactctcccctgcacggtcacacgggaaattcccccctcgactcaccccgcaatttttcacctaacgcgcccgcccacttttcctttgttcctgcccggcggaccgatggccggcgttggtcactggcgagtctgccaagctccggctatggtacaaataccccgagctcaactgtatcaagcagctgctcttctcaggaaaagcttcaccagctgccattccagccaacagccgacgaattgcattttctgacaaagcactttagtacagagagtgtgccagacgaagagggaaggcagtcacctgctatgagaccccgctcccgatccttatctccaggcaggtctccagtctccttcgacagcgagattattatgatgaaccacgtttacaaggagcgcttcccaaaagcacatgagcgatcagagtcatcagaggtggcattcgtgatgcaacttgtgaagaagctgatgatcatcatagctcgccctgcccggttgttggaatgcttggaatttgatcctgaagagttttaccatctgttggaggcagcagaaggacacgcaaaagaaggccagggcatcaagtgcgacattccgaggtacatagtcagccagttgggcctgacaagggaccctttagaagagatggcccagctttcatcctgtgattcgccagataccccagaaactgacgactctatcgagggtcacggggcctcactgccatccaagaaaactccatccgaagaggatttcgagactattaaactgatctctaatggggcctacggagcagtgttcctggtccggcataagtccacccgccagcggttcgctatgaaaaaaatcaataagcagaacctcattctgcgcaatcagatccagcaggcttttgtggaacgggacatcctaacatttgccgaaaacccatttgtggtgtctatgttttgtagttttgacaccaaaagacacttgtgtatggttatggaatacgtcgagggaggcgattgcgccacacttttgaaaaacataggcgcacttcccgtcgacatggtgaggctgtacttcgcggaaaccgtactcgctttggagtacctccacaattacgggatagtacatcgcgatttgaaaccagacaacttgctgataactagcatgggacacatcaagttaactgattttgggctgtccaaaatcggcctgatgagcctgaccaccaatctctatgagggtcacatcgagaaagacgcccgagaatttctggacaaacaggtgtgcggaaccccggagtacatcgcacccgaagtcattcttcgacaggggtatggtaagcctgttgattggtgggcaatggggataattctgtacgaattcttggtgggctgtgtgccatttttcggagacacacccgaggaactgttcggccaggtgattagcgacgaaattgtttggcctgaaggcgacgaagctcttcccccagacgcacaggacctgacgagcaagctcctacaccagaacccgcttgagagactggggaccggcagtgcttacgaggtgaaacagcatccctttttcacaggtcttgactggacaggtctgttacggcagaaagccgaatttattccgcagctcgaaagtgaggacgacacatcttactttgacaccaggtctgaacggtatcaccatatggatagcgaggatgaggaggaggtgagcgaagacggatgcctggaaatccggcagtttagtagctgctctcctaggttcaataaagtctacagttccatggaacggctgagcttactcgaggagcggcgcaccccaccaccgaccaagaggagtctctctgaagaaaaggaggaccactcagacggactagcaggcttgaaggggcgagaccggagttgggtgatcggctcaccagaaatcctgcgcaagcgactctccgtttccgaaagtagccataccgagtctgactcaagcccaccgatgacagtccgccgtaggtgttccggcctactcgacgcgccacgatttccggaaggacccgaagaagcaagcagcactcttcgccggcaaccacaagaggggatatgggtattgactccgccttcaggagagggggtatctgggcctgtgacagaacacagcggagagcagcgtccgaagctggacgaggaagctgtgggcagatccagcggctcatctcctgctatggaaaccaggggacgaggcacttcgcagcttgccgaaggcgcaactgcaaaggccatcagtgacttggcggtccgccgggctcggcacagattactcagcggggattctactgaaaagcggaccgccaggcctgtgaacaaagtaataaagtcagcctccgccacagcactcagcctcctgattccgagtgagcaccacacctgctcgcccctggcaagtccaatgtcacctcactctcagtcaagcaatcctagttctcgggattccagtccctacggatttacactgagggctattcgcgtctatatgggcgactccgacgtatatactgtgcaccatatggtctggcatgtggaagacggaggaccagccagtgaggcaggcctccgccagggagacctgataactcacgtcaatggagaacccgtgcatggcctcgtgcacaccgaagtggttgaactgattttgaaatcaggaaacaaggtggctatctcaacaaccccacttgaaaacacaagcataaaggttggccctgcacgaaagggatcctataaagccaagatggcgaggcggtccaaacgctcacgcgggaaggacggtcaagagtcaaggaaaagatctagtctttttaggaagattacgaaacaggccagcctcctccacacctccaggagtttgtcctcccttaacaggagcctgagctcaggggagtcagggcccggttcgccgacgcacagtcactctttatcccctcgctctcctacacaaggatatagagtcacaccagatgccgtacactccgagttgtctcggcccaagtctgccgaacctccccggagcccactactgaagcgggtccagagcgcagaaaagctcgctgccgccctggccgcaagtgagaagaagctggctacgagtcgtaagcatagtctggatctgccgcacagcgagttgaagaaggaactgcctcctagagaagtatcacccctagaggtggtgggtgccaggtccgtgttgagtggaaaaggggccttaccaggcaaaggggtcctgcagcctgctccatcccgcgcactgggaaccctgagacaggaccgggctgagcgaagagagagcctccagaaacaggaggctatcagagaggttgactcgagcgaagatgacacagaggagggaccagaaaactctcagggggcacaggagttgtctttggccccacaccccgaagtttcgcagagtgtcgcccccaagggcgcaggagagtctggtgaggaggatcccttccctagccgagatccccgctccctgggccctatggtgcccagcttgttgactggtatcactctgggaccaccaagaatggagtcaccgagcgggcctcataggcggctggggtcacctcaggcgatcgaggaggctgcttcttcctccagtgctgggcccaacctgggccagagcggtgcaacagaccctattcctcccgaggggtgttggaaggcacagcacttgcacacacaagcccttacagccctgtcaccttctacctccggcctgactccgacgagctcctgctctccacctagctctacaagcggaaaactctccatgtggtcatggaaatctcttatcgagggtcccgacagggctagcccatcacgcaaggcgacaatggccgggggactggccaatctgcaggatctggagaacaccacgccagcacagcccaagaacctgtcacctcgagaacaggggaagacacagcctcctagtgctccccgcctggcccatcctagctatgaagatccgagccaaggatggctctgggagtccgagtgtgctcaggccgtgaaagaggacccagcattgtctattacacaggttccagatgcgtcgggagatcggcggcaagatgtgccctgcaggggatgccccctcacacaaaaatccgaaccaagcctgcggagaggccaggagcccggggggcaccagaaacatagggacctcgcactggtgcctgatgaattactgaagcagacttag

SEQ ID NO: 337474 - DNA, 1035 bp, Artificial Sequence
  derived and/or modified sequence
atggacgacagcagcatcctgcggcggcggggcctgcagaaggagctgagcctaccaaggcgcggctctttttgcaggacatctaatcggaagtctctcatagtgacatcctcaacttcacccaccctgcctcggccccattcaccgctacatggccacaccggaaattccccacttgacagtccaaggaacttctcccccaacgcccccgctcacttttcttttgtgccagctaggagccactctcatcgcgccgatcggacagacggcaggcgctggagtcttgcctctctgccctcgagcgggtacggaacaaatacaccgagttccaccgtgagttcaagctgctcctcacaggagaaactgcaccagctgccttttcagccaactgcagatgagctgcacttcttaacaaagcactttagtacagaaagtgttcctgatgaggagggccggcaaagtccagccatgagacccgcaccctctcgcgccctgggaactctgcgacaggaccgcgccgagcgaagagagagcttgcagaagcaggaagcaatccgagaagtcgatagctccgaggatgacaccgaggaaggacccgaaaactcccagggggctcaagaattatctctggctccccaccctgaggtttcacaatctgtcgcgccaaaaggtgcaggagagtccggcgaggaggatcctttcccaagccgtgaccctcgctccttgggacctatggtgccttctctgctgactgggatcacccttggcccacctcggatggaaagtccaagcggtccccatcgacggcttggatcacctcaagccatagaagaggctgcatcttcaagcagcgctgggccaaacctgggacagtccggtgcgacagaccctatcccccccgaggggtgctggaaggcccagcacctccatacacaagccctgaccgccttatcaccttctactagcggtctggcgcacctgatgcgaatcccagctagggccggctatggatccttgtccgtgcataagcaatag

SEQ ID NO: 337475 - DNA, 4827 bp, Artificial Sequence
  derived and/or modified sequence
atgaagcgaagcaggtgccgggatcggccacagccaccgccacccgatcggcgagaggacggagtgcaacgggctgccgaactcagccaaagcctcccaccaagaagaagagcccctcccggtcgacagagactcgaagagcgtacagggccagccggacccgaaggtaaggagcaggacgttgttaccggcgtgagcccactgctgtttaggaagctgtcgaatccagacatattttccagtacaggcaaggtaaagcttcagcgtcagctgtcccaggacgactgcaagctatggcgtggaaatctggccagctccctttccggcaaacagctgttgcctctatccagttctgtccactctagcgtggggcaggtgacatggcagtcctctggcgaagcttcgaatttggtgaggatgaggaatcagagtctcgggcagtctgccccatccctgactgcagggctgaaagagctatctctgccaaggcgtggcagtttctgcagaacatccaaccgcaagagtttgatcgtgacctcctctaccagcccgacattgcccagaccacactcacccctacacggacacacagggaattctccattagattcccctaggaatttcagccccaatgcccctgcccactttagttttgtccctgccagacgaactgacggacgacgttggagcctggcctctcttcccagctccggctatggcaccaacactcccagttccacagtcagcagctcttgttcaagtcaggaaaaacttcaccagctgcccttccagcccacagcagacgagcttcactttctcaccaagcacttttctaccgaaagtgtcccagacgaggaaggcaggcagtccccagccatgcgaccacgatcacggtctctgtcaccaggccgatcccctgtatccttcgattcagaaatcatcatgatgaaccacgtctacaaagaaagatttcctaaggcccatgagcggagcgagtcgtctgaggtggcgttcgtaatgcagctcgtcaagaagctgatgattatcatcgctcggcctgctagactattggagtgtttagaatttgatcccgaggagttttaccatctgttagaggcagccgaaggccacgccaaggaagggcagggtatcaaatgcgatatcccgaggtatatagtcagtcaactggggttgacacgcgatcccctggaggaaatggcccaactgtcgagttgcgatagtcctgatactccagaaaccgacgacagcattgaaggccatggagcttctttgccctcaaagaaaactccatcggaggaggacttcgaaactatcaaacttattagcaatggcgcttatggagctgtgttcttagtccggcacaagtctactcgacaacggttcgcgatgaaaaaaatcaataaacagaacctgatcctccgcaaccaaatccagcaggcattcgtggagcgcgacattctaacgttcgcagagaatccatttgtggtgagtatgttttgctcgttcgacactaaacgccacctgtgcatggtgatggagtacgtggagggtggagactgcgcaaccctgctgaagaatatcggtgcactccctgtggatatggtccggctgtacttcgctgagactgttcttgcacttgaatacttgcacaattatggaattgtgcaccgcgatctgaagcctgacaacctattaattactagcatgggtcacattaagcttaccgacttcggactgagtaaaatcggtctgatgagccttactacaaatctgtatgaaggccacattgaaaaggacgccagggagttcctggacaagcaggtgtgtggaactccagaatatatcgcgcctgaagtgatcctgcgacagggctatgggaagccagttgactggtgggctatgggcatcattttgtatgagtttctcgtaggctgcgtgccgtttttcggagacacaccggaagagctcttcggccaggtgatttctgatgagatcgtgtggccagaaggggacgaggccttgccgcctgatgcgcaagatctcaccagcaagctcctccaccagaaccccctggagcggttggggacagggagcgcctatgaagtgaaacagcaccctttttttactggactggattggactggattgctgcgccaaaaggctgaattcatccctcagttagaatccgaggacgatactagctacttcgatactcgatctgagagataccatcacatggactccgaggatgaggaggaagtctccgaagacgggtgtctagagatccgacaattctcctcctgcagcccaagattcaacaaggtgtattcaagcatggagcgtctcagtttgctggaagagaggcggacaccccctcccactaagagaagcctctctgaggagaaagaggatcattcggatggattagctggactgaaaggcagagatcggagttgggtgatcggcagccccgagatacttaggaaaagactcagcgttagcgagagtagccatacggagagtgactcctcaccacccatgaccgtcagacgacggtgctccggtctcttggacgcaccgcgtttcccagagggccctgaggaagccagctccactctccgcagacagccacaggagggaatctgggtcttgacgcccccttccggggagggcgtgtcaggtccagtgaccgaacattcgggcgagcaaaggccaaaattggatgaggaggctgtggggagaagtagcggcagcagcccagcaatggagactcgtgggagaggcacaagtcaactcgccgaaggcgcaacagcaaaagctatttcagacctggctgttaggagggctagacaccgtctgctgtccggcgactctacagagaagcgtaccgctcgacccgtgaacaaggtgataaagtcagctagcgcaactgcactgtccctgttaatcccctcagagcaccatacatgcagtcctctcgcaagcccgatgagtcctcattcccagtcctcgaatcctagcagtcgggacagctctccctacggattcactttacgcgctattagagtttacatgggtgattcagacgtctatactgtgcaccatatggtctggcatgttgaggacgggggacctgccagcgaggcagggctgagacaaggcgatctcatcacacacgtaaacggggagcctgtacatgggcttgtacacacggaggtggtcgaattgattcttaaaagtgggaataaagttgccatatccacgactccactagagaatacaagcatcaaagtgggtcctgccagaaagggctcctataaggcaaagatggcaaggagatcaaagaggagtaggggaaaggacggacaggagtcaagaaagcgctctagcctgttcagaaagattactaagcaggccagccttctccataccagcagatctctgtcctccctcaatcgttcactgtcctccggggagagcgggccaggcagccccactcactcccatagtctgtctcccagatcacccacccaggggtacagggttacacccgatgccgtgcacagcgagttatctcggccaaaatccgcagagccgccacggtctcccctgttgaaacgtgtgcagtccgcagaaaaattagccgctgctctagctgcaagcgaaaagaaactggctacatcccgcaaacacagtctggacctcccacactccgagctcaagaaggagctgcctccacgagaagtctcccccctggaagttgttggagccagatcagtcctcagtggtaagggcgctcttccaggcaagggcgtgttacaacccgcaccatctcgagccctcggcactctaaggcaggatagagcagaaaggcgagagagcttgcagaagcaagaagccattagggaagtggatagctctgaggatgacaccgaggagggccctgagaattctcagggcgcacaggaattgtcacttgctcctcacccagaggtgtcacagtctgtcgcacccaagggcgcaggcgagtctggagaggaggatccttttccctctagagatcccagatccctaggaccgatggtgccctccttgctgacagggattaccctcggtccacctcgaatggagagcccaagcggccctcataggaggcttgggagcccccaagctatcgaagaggcagcaagctcttccagcgccggtccgaacttaggccagtccggcgcaactgacccaattcccccagagggctgttggaaagcccagcacctccatacccaagcattgaccgcattatccccatcaactagtgggctcacacccacctcgtcttgctcaccgccttcctccacttcaggaaagctgtcgatgtggtcttggaaatcactaatcgagggtccagatagggcgtcaccttcccgtaaagccactatggccggtggcctcgccaaccttcaggacttggagaataccactcctgcccagccgaagaacctgagcccacgcgaacaaggcaagactcagcccccatctgcccctcggctggcccaccctagctatgaggatccatcacagggatggctgtgggaatctgagtgtgcacaggcagtcaaagaagatccagcactgtcaataactcaggtacccgacgcatccggcgacagacgccaggacgtgccctgtcgtggctgtcccctcactcagaagtccgagccatccctgcgtcggggtcaagagcctggaggccaccaaaagcatcgggacctcgcgctagtgcccgatgagctcctgaagcagacatag

SEQ ID NO: 337476 - DNA, 1035 bp, Artificial Sequence
  derived and/or modified sequence
atggatgacagctcaatcctcagacggaggggcttgcagaaggagctctcgctgcccagacgtggatccttttgtcgtacaagcaacaggaaatcactcatcgtgaccagttcgaccagccctaccctccctcggcctcattcacctctgcacggccacacagggaactcgccattagactcaccacgtaacttcagccccaacgccccagcccacttttccttcgtacccgcaaggtcccacagccaccgggctgaccggaccgacgggagacgttggtcactggcctcattgccctcatccggctatggcactaacaccccgagtagtactgtttcgagctcctgttcctcacaggagaaattgcatcagttaccatttcagcccactgcggacgagctgcatttcctcaccaaacatttcagtaccgaaagtgtacctgatgaggaaggaaggcagagcccagcgatgaggcctgctcctagcagagccctcggaacactgcgacaggaccgggcagaacggagggaatccttacagaagcaggaagccatccgtgaagtggatagttccgaagatgataccgaggaaggccctgaaaatagtcagggtgcccaagagctgagcttggcaccccaccccgaggttagccaatccgtcgctccaaaaggtgccggagagtccggcgaggaagatccctttccaagcagagaccctagaagcctggggcctatggttcctagcttactaacaggaattacactcggcccacctcggatggaaagcccaagcgggcctcatcgcaggttgggctcaccacaagccatcgaggaagccgctagttcatccagtgccggaccgaacttagggcagtcaggggcaaccgaccctatccctcctgaagggtgctggaaggcccagcacctgcatacacaggcccttaccgcattgtctccctccacctctggactggcacacctcatgaggatacccgcaagggccggatatggtagcctctcagtccacaagcagtag

SEQ ID NO: 337477 - DNA, 4827 bp, Artificial Sequence
  derived and/or modified sequence
atgaagagaagcagatgcagagacagaccccagccccccccccccgacagaagagaggacggcgtgcagagagccgccgagctgagccagagcctgccccccagaagaagagccccccccggcagacagagactggaggagagaaccggccccgccggccccgagggcaaggagcaggacgtggtgaccggcgtgagccccctgctgttcagaaagctgagcaaccccgacatcttcagcagcaccggcaaggtgaagctgcagagacagctgagccaggacgactgcaagctgtggagaggcaacctggccagcagcctgagcggcaagcagctgctgcccctgagcagcagcgtgcacagcagcgtgggccaggtgacctggcagagcagcggcgaggccagcaacctggtgagaatgagaaaccagagcctgggccagagcgcccccagcctgaccgccggcctgaaggagctgagcctgcccagaagaggcagcttctgcagaaccagcaacagaaagagcctgatcgtgaccagcagcaccagccccaccctgcccagaccccacagccccctgcacggccacaccggcaacagccccctggacagccccagaaacttcagccccaacgcccccgcccacttcagcttcgtgcccgccagaagaaccgacggcagaagatggagcctggccagcctgcccagcagcggctacggcaccaacacccccagcagcaccgtgagcagcagctgcagcagccaggagaagctgcaccagctgcccttccagcccaccgccgacgagctgcacttcctgaccaagcacttcagcaccgagagcgtgcccgacgaggagggcagacagagccccgccatgagacccagaagcagaagcctgagccccggcagaagccccgtgagcttcgacagcgagatcatcatgatgaaccacgtgtacaaggagagattccccaaggcccacgagagaagcgagagcagcgaggtggccttcgtgatgcagctggtgaagaagctgatgatcatcatcgccagacccgccagactgctggagtgcctggagttcgaccccgaggagttctaccacctgctggaggccgccgagggccacgccaaggagggccagggcatcaagtgcgacatccccagatacatcgtgagccagctgggcctgaccagagaccccctggaggagatggcccagctgagcagctgcgacagccccgacacccccgagaccgacgacagcatcgagggccacggcgccagcctgcccagcaagaagacccccagcgaggaggacttcgagaccatcaagctgatcagcaacggcgcctacggcgccgtgttcctggtgagacacaagagcaccagacagagattcgccatgaagaagatcaacaagcagaacctgatcctgagaaaccagatccagcaggccttcgtggagagagacatcctgaccttcgccgagaaccccttcgtggtgagcatgttctgcagcttcgacaccaagagacacctgtgcatggtgatggagtacgtggagggcggcgactgcgccaccctgctgaagaacatcggcgccctgcccgtggacatggtgagactgtacttcgccgagaccgtgctggccctggagtacctgcacaactacggcatcgtgcacagagacctgaagcccgacaacctgctgatcaccagcatgggccacatcaagctgaccgacttcggcctgagcaagatcggcctgatgagcctgaccaccaacctgtacgagggccacatcgagaaggacgccagagagttcctggacaagcaggtgtgcggcacccccgagtacatcgcccccgaggtgatcctgagacagggctacggcaagcccgtggactggtgggccatgggcatcatcctgtacgagttcctggtgggctgcgtgcccttcttcggcgacacccccgaggagctgttcggccaggtgatcagcgacgagatcgtgtggcccgagggcgacgaggccctgccccccgacgcccaggacctgaccagcaagctgctgcaccagaaccccctggagagactgggcaccggcagcgcctacgaggtgaagcagcaccccttcttcaccggcctggactggaccggcctgctgagacagaaggccgagttcatcccccagctggagagcgaggacgacaccagctacttcgacaccagaagcgagagataccaccacatggacagcgaggacgaggaggaggtgagcgaggacggctgcctggagatcagacagttcagcagctgcagccccagattcaacaaggtgtacagcagcatggagagactgagcctgctggaggagagaagaacccccccccccaccaagagaagcctgagcgaggagaaggaggaccacagcgacggcctggccggcctgaagggcagagacagaagctgggtgatcggcagccccgagatcctgagaaagagactgagcgtgagcgagagcagccacaccgagagcgacagcagcccccccatgaccgtgagaagaagatgcagcggcctgctggacgcccccagattccccgagggccccgaggaggccagcagcaccctgagaagacagccccaggagggcatctgggtgctgaccccccccagcggcgagggcgtgagcggccccgtgaccgagcacagcggcgagcagagacccaagctggacgaggaggccgtgggcagaagcagcggcagcagccccgccatggagaccagaggcagaggcaccagccagctggccgagggcgccaccgccaaggccatcagcgacctggccgtgagaagagccagacacagactgctgagcggcgacagcaccgagaagagaaccgccagacccgtgaacaaggtgatcaagagcgccagcgccaccgccctgagcctgctgatccccagcgagcaccacacctgcagccccctggccagccccatgagcccccacagccagagcagcaaccccagcagcagagacagcagcccctacggcttcaccctgagagccatcagagtgtacatgggcgacagcgacgtgtacaccgtgcaccacatggtgtggcacgtggaggacggcggccccgccagcgaggccggcctgagacagggcgacctgatcacccacgtgaacggcgagcccgtgcacggcctggtgcacaccgaggtggtggagctgatcctgaagagcggcaacaaggtggccatcagcaccacccccctggagaacaccagcatcaaggtgggccccgccagaaagggcagctacaaggccaagatggccagaagaagcaagagaagcagaggcaaggacggccaggagagcagaaagagaagcagcctgttcagaaagatcaccaagcaggccagcctgctgcacaccagcagaagcctgagcagcctgaacagaagcctgagcagcggcgagagcggccccggcagccccacccacagccacagcctgagccccagaagccccacccagggctacagagtgacccccgacgccgtgcacagcgagctgagcagacccaagagcgccgagccccccagaagccccctgctgaagagagtgcagagcgccgagaagctggccgccgccctggccgccagcgagaagaagctggccaccagcagaaagcacagcctggacctgccccacagcgagctgaagaaggagctgccccccagagaggtgagccccctggaggtggtgggcgccagaagcgtgctgagcggcaagggcgccctgcccggcaagggcgtgctgcagcccgcccccagcagagccctgggcaccctgagacaggacagagccgagagaagagagagcctgcagaagcaggaggccatcagagaggtggacagcagcgaggacgacaccgaggagggccccgagaacagccagggcgcccaggagctgagcctggccccccaccccgaggtgagccagagcgtggcccccaagggcgccggcgagagcggcgaggaggaccccttccccagcagagaccccagaagcctgggccccatggtgcccagcctgctgaccggcatcaccctgggcccccccagaatggagagccccagcggcccccacagaagactgggcagcccccaggccatcgaggaggccgccagcagcagcagcgccggccccaacctgggccagagcggcgccaccgaccccatcccccccgagggctgctggaaggcccagcacctgcacacccaggccctgaccgccctgagccccagcaccagcggcctgacccccaccagcagctgcagcccccccagcagcaccagcggcaagctgagcatgtggagctggaagagcctgatcgagggccccgacagagccagccccagcagaaaggccaccatggccggcggcctggccaacctgcaggacctggagaacaccacccccgcccagcccaagaacctgagccccagagagcagggcaagacccagccccccagcgcccccagactggcccaccccagctacgaggaccccagccagggctggctgtgggagagcgagtgcgcccaggccgtgaaggaggaccccgccctgagcatcacccaggtgcccgacgccagcggcgacagaagacaggacgtgccctgcagaggctgccccctgacccagaagagcgagcccagcctgagaagaggccaggagcccggcggccaccagaagcacagagacctggccctggtgcccgacgagctgctgaagcagacctag

SEQ ID NO: 337478 - DNA, 1035 bp, Artificial Sequence
  derived and/or modified sequence
atggacgacagcagcatcctgagaagaagaggcctgcagaaggagctgagcctgcccagaagaggcagcttctgcagaaccagcaacagaaagagcctgatcgtgaccagcagcaccagccccaccctgcccagaccccacagccccctgcacggccacaccggcaacagccccctggacagccccagaaacttcagccccaacgcccccgcccacttcagcttcgtgcccgccagaagccacagccacagagccgacagaaccgacggcagaagatggagcctggccagcctgcccagcagcggctacggcaccaacacccccagcagcaccgtgagcagcagctgcagcagccaggagaagctgcaccagctgcccttccagcccaccgccgacgagctgcacttcctgaccaagcacttcagcaccgagagcgtgcccgacgaggagggcagacagagccccgccatgagacccgcccccagcagagccctgggcaccctgagacaggacagagccgagagaagagagagcctgcagaagcaggaggccatcagagaggtggacagcagcgaggacgacaccgaggagggccccgagaacagccagggcgcccaggagctgagcctggccccccaccccgaggtgagccagagcgtggcccccaagggcgccggcgagagcggcgaggaggaccccttccccagcagagaccccagaagcctgggccccatggtgcccagcctgctgaccggcatcaccctgggcccccccagaatggagagccccagcggcccccacagaagactgggcagcccccaggccatcgaggaggccgccagcagcagcagcgccggccccaacctgggccagagcggcgccaccgaccccatcccccccgagggctgctggaaggcccagcacctgcacacccaggccctgaccgccctgagccccagcaccagcggcctggcccacctgatgagaatccccgccagagccggctacggcagcctgagcgtgcacaagcagtag

SEQ ID NO: 337479 - DNA, 375 bp, Artificial Sequence
  derived and/or modified sequence
atgaccctcaatgagcacgctgcttttaagcacttgttcaacaaggcacacctcgcacctccccttattcatctcacgctgagtggacattctacctgtttccgagaacacagggtcggaggaaaggtgaccgatcaacaggatcctaaggctgaagagttcttcctcgtacaaaataagatgaaatctctaccttgtctcctcctgtctactcagacccggcaaccctctgacttctctattttttcccccccctttcctcccgtctactctactaagcctcctctgagcagttggcccgtactgaatgagcttctcggaacgcctcccaggaggggcggtggccgtgctgagggcctgctgaccagtcaatag

SEQ ID NO: 337480 - DNA, 1893 bp, Artificial Sequence
  derived and/or modified sequence
atgagacccagatcacgtagtttgtcaccaggacggagtcccgtaagttttgatagcgaaatcatcatgatgaatcacgtgtataaagaaaggttcccgaaggctacagcccagatggaagaaagattggctgagttcatatccagtaatacccccgactctgtcctgcctctggccgatggcgccttgtcatttattcaccatcaagttatcgaaatggctcgggactgtctggataagagccgatcgggcctgatcacatctcagtacttttacgagcttcaggataacctggagaagctccttcaagatgaattcgatccggaggagttttaccatctcctggaggcagccgaagggcacgccaaggagggacagggcattaaatgtgacatcccgaggtatattgtgtcccaactcggcctgacacgagatcccctcgaagagatggcgcagctgtctagctgtgactccccggatactccagaaactgatgactcaattgaaggacatggtgctagtctgccttctaaaaaaaccccttccgaagaggacttcgaaaccatcaagttgatctctaacggagcctatggcgccgttttcctcgtgaggcataagagcactaggcaacgctttgccatgaaaaagatcaacaagcagaatctcatcctgcgaaatcagatacagcaggctttcgtggagcgggatattctcactttcgccgagaaccccttcgtcgtcagcatgttctgttcattcgacaccaaaagacatctgtgtatggtgatggagtacgtggaaggtggcgattgtgctactctcctgaaaaacatcggcgctctgcccgtcgacatggtgagactctacttcgcagaaaccgtgctagccctggagtatctgcacaattatggtattgtgcacagggacttaaagccagataacctcttgatcacaagcatgggccacatcaagctaacagacttcgggctctctaagatcggtctcatgagcctcactacaaatctgtacgaaggccacatcgaaaaggacgcccgcgaatttttggataagcaggtgtgcggcacaccagagtatatcgcacctgaggttattctgcgccagggctacggaaaacctgtggactggtgggccatgggcattatattgtatgagttcttggtcgggtgcgtaccattcttcggagacactcctgaggaactgttcggccaggtgatcagtgatgagattgtgtggcctgaaggtgatgaagctctaccccctgacgcccaagaccttacatcaaagctgttgcaccagaatccacttgagcgactgggcacgggatcagcctatgaggtcaaacagcatccgttcttcacgggtctagactggactggcctacttaggcagaaggcagaattcattccccagcttgaaagcgaagatgacacatcttactttgatactcgctccgagcgctaccaccatatggacagcgaggatgaggaagaagtttcggaggacgggtgcctcgagatccgtcagttcagcagctgctctccacggtttaataaggtctattccagcatggaaaggctgagtttgctagaagagcgaagaacaccgccccccaccaagagatctttatctgaggagaaagaagaccatagtgacggccttgcagggctgaagggccgtgatcgatcgtgggtcattgggagtccagaaatcctgcggaagagattatccgtatcagagtcaagcctcttgaaggtagcagggcggcccagcaccttcagtcagcatttcgggacacaccctcatcagcagctgctgagctctcagcttcatttgtgggaggctgagcatgtagtgttggaaataccgtactag

SEQ ID NO: 337481 - DNA, 1893 bp, Artificial Sequence
  derived and/or modified sequence
atgaggcccaggagccgcagcctgagccctggccgcagccctgtgtcctttgattctgagatcatcatgatgaaccacgtgtacaaggagcgcttccccaaggccacagcccagatggaggagcggctggccgagttcatcagcagcaacaccccagacagcgtgctgcccctggctgatggagccctgtccttcatccaccaccaggtgattgagatggcccgggactgcctggacaagagccgcagcggcctcatcaccagccagtacttctatgagctgcaggacaacctggagaagctgctgcaggatgaatttgatcctgaggagttctaccacctgctggaggccgctgagggccacgccaaggagggccagggcatcaagtgtgacatcccccgctacatcgtgtcccagctgggcctgacccgggaccccctggaggagatggcccagctgagcagctgtgacagcccagacaccccagagacagatgacagcattgagggccatggagccagcctgcccagcaagaagacccccagcgaggaggactttgagaccatcaagctgatcagcaatggagcctatggagctgtgttcctggtgcgccacaagagcacccggcagagatttgccatgaagaagatcaacaagcagaacctgatcctgaggaaccagatccagcaggcctttgtggagcgggacatcctgacctttgctgagaacccctttgtggtgtccatgttctgcagctttgacaccaagaggcacctgtgcatggtgatggagtatgtggagggcggggactgtgccaccctgctgaagaacatcggggccctgcctgtggacatggtgcggctgtactttgctgagaccgtgctggccctggagtacctgcacaactatggaattgtgcaccgggacctgaagccagacaacctgctgatcacctccatgggccacatcaagctgacagactttggcctgagcaagattggcctgatgagcctgaccaccaacctgtatgagggccacatcgagaaggatgcccgggagttcctggacaagcaggtgtgtggcaccccagagtacatcgcccctgaggtgatcctgcggcagggctacggcaagcctgtggactggtgggccatgggcatcatcctgtatgagttcctggtgggctgtgtgcccttcttcggggacaccccagaggagctgtttggccaggtgatcagtgatgagatcgtgtggccagaaggagatgaggccctgcccccagatgcccaggacctgaccagcaagctgctgcaccagaaccccctggagcggctgggcactggaagtgcctatgaggtgaagcagcaccccttcttcaccggcctggactggacaggcctgctgcggcagaaggccgagttcatcccccagctggagagtgaagatgacaccagctactttgacaccaggtctgagcgctaccaccacatggattctgaagatgaggaggaggtgtctgaagatggctgcctggagatccggcagttcagcagctgcagcccccgcttcaacaaggtgtacagctccatggagcggctgagcctgctggaggagaggaggaccccaccacccaccaagaggagcctgtctgaggagaaggaggaccacagtgatggcctggccggcctgaagggccgggaccgctcctgggtgattggcagccctgagatcctgaggaagaggctgtctgtgtctgagagcagcctgctgaaggtggccggccggcccagcaccttcagccagcacttcggcacccacccccaccagcagctgctgagcagccagctgcacctgtgggaggccgagcacgtggtgctggagatcccctactag

SEQ ID NO: 337482 - DNA, 1893 bp, Artificial Sequence
  derived and/or modified sequence
atgcggccccggagccggagcctgagccccggccggagccccgtgagttttgacagcgaaataattatgatgaatcacgtctacaaggaacggttccccaaagccactgctcagatggaagaacgccttgctgaatttatcagctctaacacccctgactccgttcttccgctcgccgatggtgctctgagttttattcatcaccaggtcattgagatggcaagggattgtcttgacaagagccgaagtgggctgatcacttcccagtacttctatgagctgcaggataatttagagaagctgcttcaggatgaattcgatcctgaggagttctaccatctgctggaagccgctgaagggcacgcaaaagagggccagggcatcaaatgcgatatcccccggtacatcgtgagccagcttggcttgaccagagacccactggaggaaatggctcagctgtctagttgtgattctcccgacacgcctgaaaccgatgacagcattgaagggcacggggcatccctgcccagcaagaaaactccttcagaggaggacttcgagaccatcaaacttatctcaaatggagcctacggagcagtgttcctagtgcgtcataagtcaacgagacagaggtttgcaatgaagaaaattaacaagcagaacttgatcttgaggaatcagattcagcaagcttttgtggagcgagatatactgacatttgctgagaacccatttgtggtgtcaatgttctgtagctttgacactaagaggcacttgtgcatggtcatggaatacgtggagggaggagactgtgccaccctacttaagaacatcggggcactacccgtcgatatggttcgcctctacttcgcagaaacagtgctcgctctggagtacctgcataattacggcatcgttcatagggatctaaagcctgacaacctcctgattactagcatgggccacattaagcttacagatttcggcctgtcaaagatcggactcatgagcctgactaccaatctgtacgagggtcacattgaaaaggatgcccgagagttccttgataagcaagtctgtggaaccccggagtacatagcacccgaagttatactgcgtcagggctacggcaagcccgtggactggtgggcaatgggcatcattttatacgaattcctggtgggttgcgtgccattttttggtgatacacccgaagagctcttcggccaggtcattagtgatgaaatcgtctggcccgaaggagatgaggccctccccccggacgcacaggacctaacatcgaagctacttcaccagaacccactggagaggctgggcaccggcagcgcatacgaggtaaaacagcacccattcttcacaggcctcgactggactggcctcttgagacaaaaagccgaatttatccctcaactggaaagcgaggatgatacctcatatttcgacacccgtagtgagcgttaccaccatatggatagtgaagatgaagaagaggtgagtgaagatgggtgtctggaaatcaggcagttctcaagttgtagcccaaggtttaacaaagtgtactccagcatggaacgcctgtcgctgctggaggagcgccgaacgcccccccccaccaagcgctcgctcagtgaggagaaagaagaccacagcgatgggctggccgggttgaaggggcgcgatcgctcgtgggtcatcggctccccagaaatactgcggaaacgcctatcagtttctgaaagctccctgctgaaagtggctggacggccttctacattttcacagcactttggtacacaccctcatcagcagctattgagcagtcagttacatttatgggaggcagagcacgtggttctggagattccctattag

SEQ ID NO: 337483 - DNA, 1893 bp, Artificial Sequence
  derived and/or modified sequence
atgaggccccgatctcggagtctgtccccgggtaggtctcctgtgtccttcgattccgagattatcatgatgaaccacgtctacaaggagcggttccctaaggccaccgcacaaatggaggaaagactcgccgagttcataagcagtaacacgccagattcagtgcttccactggccgatggcgctcttagtttcattcaccaccaggtgatcgagatggccagggactgtctcgacaagagcagaagtggattgataaccagccagtacttctacgagctgcaggataaccttgagaagctccttcaggacgaatttgaccctgaggaattctaccacctgcttgaagccgctgaaggccacgcaaaggagggccaagggattaagtgcgacatccccagatacattgtgagtcagcttggcctgacgagggaccctttggaggagatggcacagctgagtagctgcgatagtccagatacgcctgaaaccgacgattcgatcgaaggccacggggcttcactgccctcaaagaaaactccctcagaagaggacttcgagaccattaagctgattagcaacggagcctacggtgcagtgtttctggtgaggcacaagagcactcggcagagattcgccatgaaaaaaatcaacaagcagaatcttatactgcggaaccagatccaacaggcatttgttgagcgggatattctgacatttgcggagaaccctttcgtcgtgtccatgttttgttcatttgatacaaagcgccacctgtgtatggtaatggaatacgtagaaggtggcgattgcgcaaccctcttgaagaacatcggcgcactgcctgtggatatggttaggctgtatttcgcggagacggtgttggctctggagtatttgcataactacggcattgtgcacagggacctgaagcctgataacttacttattaccagtatggggcacatcaagctcactgactttggtctgagcaagatagggctgatgagcttaactacaaacctgtatgaagggcatatcgaaaaagatgctcgagaattcctggacaaacaggtgtgtggaactcccgagtacattgcccctgaggtcatactgagacaaggatatgggaagccggtggactggtgggctatgggcatcattctttatgaatttctggtgggatgtgttccgtttttcggagacacccctgaagaattattcggccaggtcatttcagacgagattgtctggcctgagggcgatgaagcgcttcctcccgatgcccaggacctgactagtaaactgctgcatcagaacccattagaaaggctcggtacaggctccgcctacgaagtgaagcaacatccttttttcacgggactggactggactggacttctgcgccagaaggcagagtttatcccccagttggagtcggaggatgacactagctatttcgatacgcggtccgagcgctatcaccatatggacagtgaggacgaggaagaggtctccgaggacggatgtctcgagattcgacagttttcaagttgttcaccgagattcaacaaagtgtacagctcaatggagcggttatctttgcttgaggagagaaggactccgcctcctaccaagcggtctttgtctgaagaaaaagaagatcactctgacggccttgctgggttgaaggggcgtgaccggtcttgggttatcggttctcccgagattctcagaaagcgactcagcgtgagtgagtcgtccctgctgaaggtggctgggcgaccgtctaccttttcgcagcacttcggcacgcatccccaccaacaactgctgtcatctcagttgcatctgtgggaggcagaacacgtggtactagagatcccttactag

SEQ ID NO: 337484 - DNA, 1893 bp, Artificial Sequence
  derived and/or modified sequence
atgagacccagaagcagaagcctgagccccggcagaagccccgtgagcttcgacagcgagatcatcatgatgaaccacgtgtacaaggagagattccccaaggccaccgcccagatggaggagagactggccgagttcatcagcagcaacacccccgacagcgtgctgcccctggccgacggcgccctgagcttcatccaccaccaggtgatcgagatggccagagactgcctggacaagagcagaagcggcctgatcaccagccagtacttctacgagctgcaggacaacctggagaagctgctgcaggacgagttcgaccccgaggagttctaccacctgctggaggccgccgagggccacgccaaggagggccagggcatcaagtgcgacatccccagatacatcgtgagccagctgggcctgaccagagaccccctggaggagatggcccagctgagcagctgcgacagccccgacacccccgagaccgacgacagcatcgagggccacggcgccagcctgcccagcaagaagacccccagcgaggaggacttcgagaccatcaagctgatcagcaacggcgcctacggcgccgtgttcctggtgagacacaagagcaccagacagagattcgccatgaagaagatcaacaagcagaacctgatcctgagaaaccagatccagcaggccttcgtggagagagacatcctgaccttcgccgagaaccccttcgtggtgagcatgttctgcagcttcgacaccaagagacacctgtgcatggtgatggagtacgtggagggcggcgactgcgccaccctgctgaagaacatcggcgccctgcccgtggacatggtgagactgtacttcgccgagaccgtgctggccctggagtacctgcacaactacggcatcgtgcacagagacctgaagcccgacaacctgctgatcaccagcatgggccacatcaagctgaccgacttcggcctgagcaagatcggcctgatgagcctgaccaccaacctgtacgagggccacatcgagaaggacgccagagagttcctggacaagcaggtgtgcggcacccccgagtacatcgcccccgaggtgatcctgagacagggctacggcaagcccgtggactggtgggccatgggcatcatcctgtacgagttcctggtgggctgcgtgcccttcttcggcgacacccccgaggagctgttcggccaggtgatcagcgacgagatcgtgtggcccgagggcgacgaggccctgccccccgacgcccaggacctgaccagcaagctgctgcaccagaaccccctggagagactgggcaccggcagcgcctacgaggtgaagcagcaccccttcttcaccggcctggactggaccggcctgctgagacagaaggccgagttcatcccccagctggagagcgaggacgacaccagctacttcgacaccagaagcgagagataccaccacatggacagcgaggacgaggaggaggtgagcgaggacggctgcctggagatcagacagttcagcagctgcagccccagattcaacaaggtgtacagcagcatggagagactgagcctgctggaggagagaagaacccccccccccaccaagagaagcctgagcgaggagaaggaggaccacagcgacggcctggccggcctgaagggcagagacagaagctgggtgatcggcagccccgagatcctgagaaagagactgagcgtgagcgagagcagcctgctgaaggtggccggcagacccagcaccttcagccagcacttcggcacccacccccaccagcagctgctgagcagccagctgcacctgtgggaggccgagcacgtggtgctggagatcccctactag

SEQ ID NO: 337485 - protein, 166 aa, Artificial Sequence
  derived and/or modified sequence
MKEMLAKDLEESQGGKSSEVLSATELRVQLAQKEQELARAKEALQAMKADRKRLKGEKTDLVSQMQQLYATLESREEQLRDFIRNYEQHRKESEDAVKALAKEKDLLEREKWELRRQAKEATDHATALRSQLDLKDNRMKELEAELAMAKQSLATLTKDVPKRHSL

SEQ ID NO: 337486 - protein, 93 aa, Artificial Sequence
  derived and/or modified sequence
MTNTKDPKRAMESTLATSNSATGPVTFSHVFGQQCQLMQAAVQSLHTLNDQISHFIVTKSKALEEDKDPFLPTEKETLKSSMILMRHLLMDAQ

SEQ ID NO: 337487 - DNA, 282 bp, Artificial Sequence
  derived and/or modified sequence
atgaccaacaccaaggaccccaagagagccatggagagcaccctggccaccagcaacagcgccaccggccccgtgaccttcagccacgtgttcggccagcagtgccagctgatgcaggccgccgtgcagagcctgcacaccctgaacgaccagatcagccacttcatcgtgaccaagagcaaggccctggaggaggacaaggaccccttcctgcccaccgagaaggagaccctgaagagcagcatgatcctgatgagacacctgctgatggacgcccagtag

SEQ ID NO: 337488 - DNA, 282 bp, Artificial Sequence
  derived and/or modified sequence
atgactaacacaaaagacccgaaaagagctatggaatccactctcgctacaagtaattctgcgaccgggcctgtgacattcagccacgtttttggacagcagtgccaactgatgcaggcagctgtgcagagtcttcacacactcaacgaccaaatatcccatttcatagtcacaaagtcaaaggctctggaagaggataaagatccattcctgcctacggagaaagaaacactgaagtcctccatgattctcatgaggcaccttctgatggacgcccagtag

SEQ ID NO: 337489 - DNA, 282 bp, Artificial Sequence
  derived and/or modified sequence
atgaccaacaccaaggaccccaagagggccatggagagcaccctggccaccagcaacagcgccaccggccctgtgaccttcagccacgtgtttggccagcagtgccagctgatgcaggccgctgtgcagagcctgcacaccctgaatgaccagatcagccacttcatcgtgaccaagagcaaggccctggaggaggacaaggaccccttcctgcccacagagaaggagaccctgaagagctccatgatcctgatgaggcacctgctgatggatgcccagtag

SEQ ID NO: 337490 - DNA, 282 bp, Artificial Sequence
  derived and/or modified sequence
atgaccaacaccaaggaccccaagcgggccatggagagcaccctggccacttcaaactctgccactggacctgtcaccttcagtcatgtgtttggtcagcagtgccagctgatgcaggctgcggtccaatccctgcacaccctaaatgatcagatttcacattttattgtgaccaagtcaaaagctctggaggaagacaaagatccctttttgccgaccgaaaaggagaccttgaagtcttccatgatactcatgcggcacctgcttatggacgcccaatag

SEQ ID NO: 337491 - DNA, 282 bp, Artificial Sequence
  derived and/or modified sequence
atgacaaataccaaggaccccaaacgcgcaatggaatctaccctcgccacttctaattccgctactggcccagtgacctttagtcatgtattcggccaacagtgtcagctgatgcaggcggcagtacagagcttacatacgctgaatgaccagattagccacttcatcgttactaaatccaaagcgttggaggaggacaaagatccttttctgcccaccgagaaggaaactttgaagtcctccatgatacttatgcggcatttgttgatggatgcccagtag

SEQ ID NO: 337492 - DNA, 1358 bp, Artificial Sequence
  derived and/or modified sequence
agagaagcggccccttttggtttggagcaggggacagatccttcatacacagtagggttgggtcggctaagatgaagtactcagatctctgtatcaccggagcgccctaggggatgtgtggcattttctccttttctcttcttggtctctggattttatcgcaggcagtcgggtctcccgtgcctggcacttccttggctgtgggcaggaagaggttacagcagccctggagcctgctgggctgagttagcacttccctccgcatccagaatatctcccaggaactgccccctttgcatcgccgcaccggggtggcggcgcgggctgggggccgctgcagcaggtctcagtccctccctgctgccacgcgaggagtggggagcggcagggcctaggcgtcccgagtggaggatgagccggagacgcctgcgggtccggagctgcaccgcgcccgtgcggcccgcgccgcccgcctcccgcgctctccctttggcagcagccggacgcctggcgcgtgcaggacctggggccgcggcgctcgcgcggggacgcgggagcccagggtcggcgctgcaggcagcggggcggcgccagcaaggccagctccccggggaccctggggcagcctcgcgccctgcctgcctccctggactgagacgccgcggggcctgggcagcgctctgccggcagctggtgctggaacacagccggggctgagctgctcccggggaccctgccccttccaggtgaccccaggagaagcagccccgggccggggggcaagttccagccacccttccgggtcaagaagccacgactcctggttagggggaaacttagatttttcttttgcatggaactgctgctgtgcaagatttgccaaggcttatagggtttcattttttacttgactggtgtttgagaaaaactgcaaggaaagggtggcgaaaggaagaaacactataaactttgggggcggggacattttcttggaagtgacaagtagcctcagatctgcagttcctgggccagcgacggcatcctttgctctgacactccaagggtctggacgctgccacatgaccaacaccaaagaccccaaaagagccatggaatccacgctggcgacatccaattctgccacaggccccgtcaccttctcccacgtctttggtcagcagtgccaacttatgcaagcagctgtgcaatcattgcacaccctcaatgaccagatttcccattttattgtcaccaagtcgaaggcactggaggaggacaaagacccttttctacccactgagaaggagactctgaagagttccatgatattgatgaggcacctcttaatggatgctcag

SEQ ID NO: 337493 - protein, 716 aa, Artificial Sequence
  derived and/or modified sequence
MACPVSPDHKQEGAHDTGLVTLQVAFNNQIISNSVVFEYKARALPTLPSSQHDWLSLDDNQFRMSILERLEQMERRMAEMTGSQQHKQASGGGSSGGGSGSGNGGSQAQCASGTGALGSCFESRVVVVCEKMMSRACWAKSKHLIHSKTFRGMTLLHLAAAQGYATLIQTLIKWRTKHADSIDLELEVDPLNVDHFSCTPLMWACALGHLEAAVVLYKWDRRAISIPDSLGRLPLGIARSRGHVKLAECLEHLQRDEQAQLGQNPRIHCPASEEPSTESWMAQWHSEAISSPEIPKGVTVIASTNPELRRPRSEPSNYYSSESHKDYPAPKKHKLNPEYFQTRQEKLLPTALSLEEPNIRKQSPSSKQSVPETLSPSEGVRDFSRELSPPTPETAAFQASGSQPVGKWNSKDLYIGVSTVQVTGNPKGTSVGKEAAPSQVRPREPMSVLMMANREVVNTELGSYRDSAENEECGQPMDDIQVNMMTLAEHIIEATLSSTMSWLASYLADADCLPSAAQIRSAYNEPLTPSSNTSLSPVGSPVSEIAFEKVENEFAQLTLSDHEQRELYEAARLVQTAFRKYKGRPLREQQEVAAAVIQRCYRKYKQYALYKKMTQAAILIQSKFRSYYEQKKFQQSRRAAVLIQKYYRSYKKCGKRRQARRTAVIVQQKLRSSLLTKKQDQAARKIMRFLRRCRHRVKELKKAKELEDIQQHPLAM

SEQ ID NO: 337494 - protein, 1659 aa, Artificial Sequence
  derived and/or modified sequence
MWRAEGKWLPKTSRKSVSQSVFCGTSTYCVLNTVPPIEDDHGNSNSSHVKIFLPKKLLECLPKCSSLPKERHRWNTNEEIAAYLITFEKHEEWLTTSPKTRPQNGSMILYNRKKVKYRKDGYCWKKRKDGKTTREDHMKLKVQGVECLYGCYVHSSIIPTFHRRCYWLLQNPDIVLVHYLNVPAIEDCGKPCGPILCSINTDKKEWAKWTKEELIGQLKPMFHGIKWTCSNGNSSSGFSVEQLVQQILDSHQTKPQPRTHNCLCTGSLGAGGSVHHKCNSAKHRIISPKVEPRTGGYGSHSEVQHNDVSEGKHEHSHSKGSSREKRNGKVAKPVLLHQSSTEVSSTNQVEVPDTTQSSPVSISSGLNSDPDMVDSPVVTGVSGMAVASVMGSLSQSATVFMSEVTNEAVYTMSPTAGPNHHLLSPDASQGLVLAVSSDGHKFAFPTTGSSESLSMLPTNVSEELVLSTTLDGGRKIPETTMNFDPDCFLNNPKQGQTYGGGGLKAEMVSSNIRHSPPGERSFSFTTVLTKEIKTEDTSFEQQMAKEAYSSSAAAVAASSLTLTAGSSLLPSGGGLSPSTTLEQMDFSAIDSNKDYTSSFSQTGHSPHIHQTPSPSFFLQDASKPLPVEQNTHSSLSDSGGTFVMPTVKTEASSQTSSCSGHVETRIESTSSLHLMQFQANFQAMTAEGEVTMETSQAAEGSEVLLKSGELQACSSEHYLQPETNGVIRSAGGVPILPGNVVQGLYPVAQPSLGNASNMELSLDHFDISFSNQFSDLINDFISVEGGSSTIYGHQLVSGDSTALSQSEDGARAPFTQAEMCLPCCSPQQGSLQLSSSEGGASTMAYMHVAEVVSAASAQGTLGMLQQSGRVFMVTDYSPEWSYPEGGVKVLITGPWQEASNNYSCLFDQISVPASLIQPGVLRCYCPAHDTGLVTLQVAFNNQIISNSVVFEYKARALPTLPSSQHDWLSLDDNQFRMSILERLEQMERRMAEMTGSQQHKQASGGGSSGGGSGSGNGGSQAQCASGTGALGSCFESRVVVVCEKMMSRACWAKSKHLIHSKTFRGMTLLHLAAAQGYATLIQTLIKWRTKHADSIDLELEVDPLNVDHFSCTPLMWACALGHLEAAVVLYKWDRRAISIPDSLGRLPLGIARSRGHVKLAECLEHLQRDEQAQLGQNPRIHCPASEEPSTESWMAQWHSEAISSPEIPKGVTVIASTNPELRRPRSEPSNYYSSESHKDYPAPKKHKLNPEYFQTRQEKLLPTALSLEEPNIRKQSPSSKQSVPETLSPSEGVRDFSRELSPPTPETAAFQASGSQPVGKWNSKDLYIGVSTVQVTGNPKGTSVGKEAAPSQVRPREPMSVLMMANREVVNTELGSYRDSAENEECGQPMDDIQVNMMTLAEHIIEATPDRIKQENFVPMESSGLERTDPATISSTMSWLASYLADADCLPSAAQIRLSPVGSPVSEIAFEKPNLPSAADWSEFLSASTSEKVENEFAQLTLSDHEQRELYEAARLVQTAFRKYKGRPLREQQEVAAAVIQRCYRKYKQYALYKKMTQAAILIQSKFRSYYEQKKFQQSRRAAVLIQKYYRSYKKCGKRRQARRTAVIVQQKLRSSLLTKKQDQAARKIMRFLRRCRHRVKELKKAKELEDIQQHPLAM

SEQ ID NO: 337495 - DNA, 2151 bp, Artificial Sequence
  derived and/or modified sequence
atggcctgtccggtaagccctgaccataaacaagagggcgcacacgataccggcttagtgaccttacaggtggcttttaataatcagatcatttccaactctgtggtgttcgagtataaagctcgtgccctccccacactaccttcctcccagcacgattggttgtcattagatgacaatcagttcagaatgtcaatcctcgagcgccttgagcaaatggaacggaggatggccgagatgaccggctctcagcagcacaaacaggcatctggaggaggcagtagtggaggaggctccggctctggcaacggcgggtctcaggctcagtgcgcgtccggtacaggcgccctggggtcttgtttcgagagccgcgtggtcgtggtgtgcgaaaagatgatgagtagagcctgttgggccaagagcaagcacttaattcatagcaagacctttaggggcatgaccctgctgcatcttgccgccgcgcagggctacgcgaccctgatccagactctgatcaagtggcgcacgaagcacgccgattctattgacttagagctcgaggtcgatccgctcaatgtggaccattttagttgcacaccgttaatgtgggcctgtgctctcggccatttggaggcagcagtggtgttgtataaatgggataggagagctatcagcatcccagacagcctcggtaggctgcccctcggaatcgcccggtccaggggccatgtgaaactcgctgagtgtctagagcacctccagcgggatgaacaagcccaactgggacagaacccccgaattcattgtcccgcctctgaggaaccttccacagagagctggatggcccagtggcatagtgaagccatcagttcccccgaaatcccaaaaggcgtcactgtgatcgccagcacaaatcccgagttgcggcgccccaggagtgaacccagcaactactactctagcgagtcgcataaagactacccagctccgaagaagcataaactgaatccggagtacttccaaacacgacaggagaaactgttacctacggcactgagcctcgaggagccgaacatccgcaaacagtcaccctcaagcaagcagtccgtgcctgaaacactatcgccaagcgagggagtcagggatttctctagagaactgagccctcccactcccgaaacagccgccttccaggcttctggatcccagccagtgggcaagtggaatagcaaggacctctatattggcgtgtcaaccgttcaggtaactggcaatccaaagggcacgtctgttgggaaggaagcagctccctcacaagtccgcccccgggaacctatgagcgttcttatgatggccaaccgcgaggttgtgaatactgaacttggaagctatcgcgactcggctgagaacgaggagtgcggacagcccatggacgatatccaggtcaatatgatgacgctcgcagagcacattattgaggccaccctctccagtactatgtcatggctggcctcatatctggcagacgccgactgcctgccctccgctgcccaaatacggtctgcatacaacgagccattgactccctcttctaacacgtctttaagtcctgttggctcacccgtgagtgaaattgctttcgagaaggtggagaacgagttcgcccagctaaccctctccgaccacgaacagagagagctgtatgaggcggccagattagtccaaactgcgttccggaaatataagggacgccccctgcgggagcagcaggaagtggccgcagcggtcatccaacgctgctataggaagtataagcagtatgccctctataagaagatgacacaggctgcaattttaattcaaagcaaattcagaagctattacgaacagaagaaatttcagcaaagtcggcgcgctgcagtgcttatccagaagtactatcgctcttacaaaaagtgtggtaagaggaggcaggccaggcgaaccgctgtgatcgtgcagcagaaacttcgttcatctctgctgacaaagaaacaggaccaggccgcacggaagattatgcgtttcctgcggagatgccggcacagagtcaaggagctgaaaaaagcgaaggagctggaggacatccagcagcatcccctcgccatgtag

SEQ ID NO: 337496 - DNA, 4980 bp, Artificial Sequence
  derived and/or modified sequence
atgtggcgcgccgagggcaagtggctccctaaaactagcagaaagtcagtgtcgcagtctgtgttttgcggtacttccacttactgtgtgctcaacactgtgcctcccattgaggacgaccacggtaacagtaatagcagtcacgtaaagatcttcctgccaaaaaaactcctagagtgcctgcccaagtgctccagcctaccaaaggagcggcacagatggaacacgaatgaggagatcgcagcgtacctgatcacgttcgagaagcacgaggagtggctcacaaccagccccaagacccgtccgcagaatggctctatgatactatataacagaaagaaagttaaatatcgaaaagacggctattgttggaaaaaacggaaggacgggaagacaacacgcgaggaccacatgaagctgaaggttcagggtgtggaatgcctctatggttgctacgttcactcatcaattatacccacgttccaccgccgctgttactggctcctgcaaaatccggatatagttctggtccactacctgaatgtccctgcaatagaagattgtggaaaaccctgtggcccaattctgtgcagcatcaacacggataagaaggagtgggcgaaatggaccaaggaggaactcatcgggcaattgaagccgatgttccacgggattaagtggacttgctcaaatggcaactcctcttctggttttagcgtggagcaactggtgcaacagatactggattctcaccaaacgaagccccagccccgcacacataactgcttgtgtaccgggtctctcggagctggaggtagcgttcatcacaagtgcaattccgctaagcatcgtattatttctcctaaagtcgagccacgaaccggcggatatggttcacattctgaagtgcagcataatgatgtgtctgagggcaaacacgagcactcccattccaagggctctagtcgcgaaaaacggaacggaaaggttgcaaaaccggtactgctgcaccagagcagcactgaagtttcctccacgaatcaggttgaggtgccggatacaacacagagtagccccgtgtctatatccagcggccttaattctgacccagacatggtggattccccggtcgtgacgggcgtttctggtatggccgtcgctagcgtgatgggctctctgtcacagtcagcaacagtgttcatgagcgaagtgaccaacgaggctgtgtataccatgagccccactgctggaccaaatcaccacctcctgagcccagacgcttctcagggcctggtcttagctgtgagtagtgacggtcacaaatttgcctttcccactacgggatcgagcgaatcgctttctatgctgcccacaaatgtatccgaggaacttgtcctctctaccacactggacggtggtcgcaaaatccctgaaacgacaatgaatttcgaccccgactgtttcctcaacaatcctaaacagggccaaacatatggaggcggcggtctgaaggcagagatggtgtctagcaatattcgtcactcgccaccaggagagaggtcttttagcttcactacagtcctgactaaagaaattaagacagaggacacaagctttgagcagcagatggcgaaggaagcatattctagtagtgctgctgccgttgccgcaagttccctgaccctgaccgcaggtagctcattgcttccaagcggcgggggcctgtcaccatcaacaacactggagcagatggacttctcggccatcgattctaataaagattatacatcctctttctcccagacaggacattctccccacatccaccagaccccctcaccctcattcttcctgcaggacgcatctaagccacttcccgtggagcagaacacacattcctccttgtccgactcggggggcactttcgtgatgcctacggtgaagacagaggcctcctcacagacaagctcatgctccggacatgtggaaacccgcatcgagagcaccagtagtctgcacctgatgcaatttcaagccaacttccaggcgatgaccgccgagggcgaggtgacgatggagactagtcaggcggcagaaggaagcgaggtgctgctgaaatcaggcgaattacaggcatgctctagcgagcactaccttcagcccgagacgaatggggtgatacgttccgccggcggggtcccaatccttccaggtaacgttgtgcagggcctgtatcccgtggcgcagccatctctgggcaatgccagtaacatggaactctcactggatcatttcgacataagtttctcaaaccaattttctgatttgattaacgacttcatctctgtggagggtggatcctctaccatctacggacatcagctagtgtcgggcgattccaccgcactctcccagtccgaggacggggcacgagccccctttacacaggccgaaatgtgcttgccgtgttgctcaccccaacaaggaagcctgcagctaagttccagcgaaggcggtgcctcaaccatggcatacatgcacgtggccgaggtagtaagcgcggcttccgcccagggcacactgggaatgctgcagcagagcgggagggtcttcatggttaccgattactcccctgaatggtcttatcctgaaggcggggtgaaagtcctcatcactggaccttggcaggaagcttccaacaactactcgtgcctattcgatcagattagtgtgcccgcctcactcattcagcccggcgtactgcggtgctattgccccgcccatgataccggactggtaaccctgcaggtcgccttcaacaaccagatcatatccaactcggtcgtgttcgagtacaaggcgagggcactacctactctgccatcttctcagcacgactggctgagtctggacgacaatcaattccgcatgagtattctcgagagacttgagcaaatggagagaagaatggctgagatgaccgggtcccagcagcacaagcaggccagcgggggtggctccagcggcggaggcagcggcagtggcaatggaggcagccaggcccagtgcgcttctggaactggggccctcggaagctgcttcgaaagccgggtggtcgtcgtctgcgagaagatgatgagccgtgcttgctgggcaaaatctaaacacctgatccatagtaagacatttagggggatgaccctcctgcacttagcagccgcccaggggtacgctaccctgattcaaacattgataaagtggcggaccaagcacgcagatagcatcgacctagagctcgaggtcgacccactcaacgtcgatcacttctcatgtaccccactgatgtgggcctgtgctctgggccacctcgaagccgcggtcgtgctctataaatgggaccggcgagcgatttcaatcccagactcactgggcagactgcctctaggaatcgccagatcacgaggccatgtgaagctagcagaatgcctggagcacctccaacgcgacgagcaggcccagctgggacagaaccctagaatccattgtcctgccagtgaagagccgagcaccgaaagttggatggcacagtggcactctgaggccatctcaagtccggagattcctaaaggagtgactgtcatagcgtctaccaatcctgagcttaggcggccccgtagtgaaccttccaactattattcatccgaatcccataaggattaccccgccccgaaaaagcacaaattaaatcccgagtatttccaaacaagacaggaaaaactcctgcctactgcgctctcgctagaggaacctaacatacgtaagcagtctcccagtagtaagcaaagcgtccccgagaccctgtcccctagcgaaggggtacgggatttttctagagagctaagcccacctactcctgaaacggcagcgtttcaagctagcgggtcacagcctgtgggaaaatggaattcaaaagacttgtacatcggcgtctccactgtgcaagtgaccggcaaccctaaaggcacatccgttgggaaggaagcagccccttcacaggtcagacctcgggaacccatgagtgtactaatgatggccaatcgggaggtagttaatacagaactgggatcatatagggactctgccgagaatgaggagtgcgggcagccgatggacgatatacaggtgaacatgatgactctggcagagcacataatcgaagcgaccccagacaggatcaaacaagaaaactttgtgccgatggaatccagcggtctcgagaggaccgatcctgccacaatcagctctactatgagttggctggcctcttacctggcagatgcagattgcctcccaagcgccgcccagattcgcctgtcacctgtgggatcccctgtgtcagaaatagcctttgagaaacctaacctgccttcggccgcagattggtcagaattcctctcggcctctacatctgagaaagtcgagaacgaattcgcacagctaactctatccgatcacgagcagagggaactctatgaggccgcccggctggtgcaaaccgcattccgcaaatacaaggggcgtcctctgagagaacagcaggaggtagcagctgcagtgatccaacggtgttaccggaagtataagcaatacgctctgtataaaaagatgacccaagccgctatcctgattcagtcaaagtttcggagttactatgaacagaagaaatttcagcaatcccgaagagcggccgtgcttatacagaaatactacagaagctacaagaagtgcggcaagagacgacaagctagacgcacagccgtaattgtgcagcagaagctgcgctcatctttgttgacgaaaaaacaagatcaggccgctaggaaaatcatgcgctttctccggcgctgcagacacagggttaaagagctgaagaaggccaaagagctggaggatattcagcagcatccactggccatgtag

SEQ ID NO: 337497 - DNA, 2151 bp, Artificial Sequence
  derived and/or modified sequence
atggcctgccctgtgtccccagaccacaagcaggagggcgcccatgacaccggcctggtgaccctgcaggtggccttcaacaaccagatcatcagcaacagcgtggtgtttgagtacaaggcccgggccctgcccaccctgcccagcagccagcacgactggctgagcctggatgacaaccagttcaggatgagcatcctggagcggctggagcagatggagaggaggatggccgagatgacaggcagccagcagcacaagcaggccagcggcggcggcagcagcggcggcggcagcggcagcggaaatggaggcagccaggcccagtgtgccagcggcaccggggccctgggcagctgctttgagagccgggtggtggtggtgtgtgagaagatgatgagccgggcctgctgggccaagagcaagcacctgatccacagcaagaccttccggggcatgaccctgctgcacctggccgccgcccagggctacgccaccctcatccagaccctcatcaagtggaggaccaagcatgctgacagcattgacctggagctggaggtggaccccctgaatgtggaccacttcagctgcacccccctgatgtgggcctgtgccctgggccacctggaggccgctgtggtgctgtacaagtgggacagaagagccatcagcatcccagacagcctgggccgcctgcccctgggcatcgcccggagccggggccacgtgaagctggccgagtgcctggagcacctgcagagagatgagcaggcccagctgggccagaacccccgcatccactgcccagccagcgaggagcccagcacagagagctggatggcccagtggcacagcgaggccatcagcagccctgagatccccaagggcgtgacagtgattgccagcaccaaccctgagctgcggcggcccaggtctgagcccagcaactactacagcagcgagagccacaaggactacccagcccccaagaagcacaagctgaaccctgagtacttccagacccggcaggagaagctgctgcccacagccctgagcctggaggagcccaacatcaggaagcagagccccagcagcaagcagagcgtgcctgagaccctgagccccagcgagggcgtgcgggacttcagccgggagctgagcccccccaccccagagacagctgccttccaggccagcggcagccagcctgtgggcaagtggaacagcaaggacctgtacatcggcgtgtccacagtgcaggtgactggaaaccccaagggcacctctgtgggcaaggaggccgcccccagccaggtgcggccccgggagcccatgtctgtgctgatgatggccaaccgggaggtggtgaacacagagctgggcagctacagagattctgcagaaaatgaggagtgtggccagcccatggatgacatccaggtgaacatgatgaccctggccgagcacatcatcgaggccaccctgagcagcaccatgtcctggctggccagctacctggctgatgctgactgcctgcccagcgctgcccagatccgcagcgcctacaatgagcccctgacccccagcagcaacaccagcctgagccctgtgggcagccctgtgtctgaaattgcctttgagaaggtggagaatgaatttgcccagctgaccctgagtgaccacgagcagcgggagctgtatgaggccgcccggctggtgcagacagccttcaggaagtacaagggccggcccctgcgggagcagcaggaggtggccgctgctgtgatccagcgctgctacaggaagtacaagcagtatgccctgtacaagaagatgacccaggccgccatcctgatccagagcaagttccgcagctactatgagcagaagaagttccagcagagcagaagagctgctgtgctgatccagaagtactaccgcagctacaagaagtgtgggaagaggcggcaggcccggaggacagctgtgattgtgcagcagaagctgcggagcagcctgctgaccaagaagcaggaccaggccgccaggaagatcatgaggttcctgcggcgctgccgccaccgggtgaaggagctgaagaaggccaaggagctggaggacatccagcagcaccccctggccatgtag

SEQ ID NO: 337498 - DNA, 4980 bp, Artificial Sequence
  derived and/or modified sequence
atgtggagggctgagggcaagtggctgcccaagaccagcaggaagtctgtgtcccagagcgtcttctgtggcaccagcacctactgtgtgctgaacacagtgccccccattgaagatgaccacggcaacagcaacagcagccacgtgaagatcttcctgcccaagaagctgctggagtgcctgcccaagtgcagcagcctgcccaaggagcggcaccgctggaacaccaatgaggagattgctgcctacctgatcacctttgagaagcatgaggagtggctgaccaccagccccaagacccggccccagaatggctccatgatcctgtacaacaggaagaaggtgaagtacaggaaggatggctactgctggaagaagaggaaggatggcaagaccacccgggaggaccacatgaagctgaaggtgcagggcgtggagtgcctgtatggctgctacgtgcacagcagcatcatccccaccttccaccggcgctgctactggctgctgcagaacccagacatcgtgctggtgcactacctgaatgtgcctgccatcgaggactgtgggaagccctgtggccccatcctgtgcagcatcaacacagacaagaaggagtgggccaagtggaccaaggaggagctgattggccagctgaagcccatgtttcatggcatcaagtggacctgcagcaatggaaacagcagcagcggcttctctgtggagcagctggtgcagcagatcctggacagccaccagaccaagccccagcccaggacccacaactgcctgtgcaccggcagcctgggcgctgggggctctgtgcaccacaagtgcaacagcgccaagcaccgcatcatcagccccaaggtggagcccaggactggaggctacggcagccacagcgaggtgcagcacaatgatgtgtctgagggcaagcatgagcacagccacagcaagggcagcagccgggagaagagaaatggcaaggtggccaagcctgtgctgctgcaccagagcagcacagaggtgagcagcaccaaccaggtggaggtgcctgacaccacccagagcagccctgtgtccatcagcagcggcctgaacagcgaccctgacatggtggacagccctgtggtgactggagtgtctggcatggctgtggcctctgtgatgggcagcctgagccagagcgccaccgtcttcatgtctgaggtgaccaatgaggccgtgtacaccatgagccccacagctggccccaaccaccacctgctgagcccagatgccagccagggcctggtgctggccgtgtccagtgatggccacaagtttgccttccccaccaccggcagcagcgagagcctgtccatgctgcccaccaacgtgtctgaggagctggtgctgagcaccaccctggatggcggcaggaagatccctgagaccaccatgaactttgatcctgactgcttcctgaacaaccccaagcagggccagacctacggcggcggcggcctgaaggccgagatggtgagcagcaacatccgccacagccccccaggagagaggagcttctccttcaccaccgtgctgaccaaggagatcaagacagaggacaccagctttgagcagcagatggccaaggaggcctacagcagcagcgctgctgctgtggccgccagcagcctgaccctgacagctggcagcagcctgctgcccagcggcggcggcctgagccccagcaccaccctggagcagatggacttcagcgccatcgacagcaacaaggactacaccagcagcttcagccagacaggccacagcccccacatccaccagacccccagccccagcttcttcctgcaggatgccagcaagcccctgcctgtggagcagaacacccacagcagcctgagtgacagcggcggcacctttgtgatgcccaccgtgaagacagaggccagcagccagaccagcagctgcagcggccacgtggagacccgcatcgagagcaccagcagcctgcacctgatgcagttccaggccaacttccaggccatgacagctgagggggaggtgaccatggagaccagccaggccgctgagggcagcgaggtgctgctgaagtctggagagctgcaggcctgcagcagcgagcactacctgcagcctgagaccaacggggtcatccgctctgctgggggcgtgcccatcctgcctggaaatgtggtgcagggcctgtaccctgtggcccagcccagcctgggcaatgccagcaacatggagctgagcctggaccactttgacatctccttcagcaaccagttcagtgacctgatcaatgacttcatctctgtggagggcggcagcagcaccatctacggccaccagctggtgtctggggacagcacagccctgagccagagtgaagatggagcccgggcccccttcacccaggccgagatgtgcctgccctgctgcagcccccagcagggcagcctgcagctgagcagcagcgagggcggggccagcaccatggcctacatgcacgtggccgaggtggtgtctgctgccagcgcccagggcaccctgggcatgctgcagcagagcggccgggtcttcatggtgacagactacagccctgagtggagctacccagagggcggcgtgaaggtgctgatcaccggcccctggcaggaggccagcaacaactacagctgcctgtttgaccagatctctgtgcctgccagcctcatccagcccggggtgctgcgctgctactgcccagcccatgacaccggcctggtgaccctgcaggtggccttcaacaaccagatcatcagcaacagcgtggtgtttgagtacaaggcccgggccctgcccaccctgcccagcagccagcacgactggctgagcctggatgacaaccagttcaggatgagcatcctggagcggctggagcagatggagaggaggatggccgagatgacaggcagccagcagcacaagcaggccagcggcggcggcagcagcggcggcggcagcggcagcggaaatggaggcagccaggcccagtgtgccagcggcactggagccctgggcagctgctttgagagccgggtggtggtggtgtgtgagaagatgatgagccgggcctgctgggccaagagcaagcacctgatccacagcaagaccttccggggcatgaccctgctgcacctggccgccgcccagggctacgccaccctcatccagaccctcatcaagtggaggaccaagcacgccgacagcattgacctggagctggaggtggaccccctgaatgtggaccacttcagctgcacccccctgatgtgggcctgtgccctgggccacctggaggccgctgtggtgctgtacaagtgggaccggcgggccatcagcatcccagacagcctgggccgcctgcccctgggcatcgcccggagccggggccacgtgaagctggctgaatgtctggagcacctgcagagagatgagcaggcccagctgggccagaacccccgcatccactgcccagccagcgaggagcccagcacagagagctggatggcccagtggcacagcgaggccatcagcagccctgagatccccaagggcgtgaccgtcatcgccagcaccaaccctgagctgcggcggcccaggtctgagcccagcaactactacagcagcgagagccacaaggactacccagcccccaagaagcacaagctgaaccctgagtacttccagacccggcaggagaagctgctgcccacagccctgagcctggaggagcccaacatcaggaagcagagccccagcagcaagcagagcgtgcctgagaccctgagccccagcgagggcgtgcgggacttcagccgggagctgagcccccccaccccagagacagctgccttccaggccagcggcagccagcctgtgggcaagtggaacagcaaggacctgtacatcggcgtgtccacagtgcaggtgacaggcaaccccaagggcacctctgtgggcaaggaggccgcccccagccaggtgcggccccgggagcccatgtctgtgctgatgatggccaaccgggaggtggtgaacacagagctgggcagctacagagacagcgcagaaaatgaagaatgtggccagcccatggatgacatccaggtgaacatgatgaccctggccgagcacatcatcgaggccaccccagaccgcatcaagcaggagaactttgtgcccatggagagcagcggcctggagaggacagatcctgccaccatcagcagcaccatgtcctggctggccagctacctggctgatgctgactgcctgcccagcgctgcccagatccggctgagccctgtgggcagccctgtgtctgagatcgcctttgagaagcccaacctgcccagcgctgctgactggagcgagttcctgagcgccagcaccagcgagaaggtggagaatgaatttgcccagctgaccctgagtgaccacgagcagcgggagctgtatgaagctgcccggctggtgcagacagccttcaggaagtacaagggccggcccctgcgggagcagcaggaggtggccgccgccgtcatccagcgctgctacaggaagtacaagcagtatgccctgtacaagaagatgacccaggccgccatcctgatccagagcaagttccgcagctactatgagcagaagaagttccagcagagccggcgggctgctgtgctgatccagaagtactaccgcagctacaagaagtgtgggaagaggcggcaggccaggagaacagctgtgattgtgcagcagaagctgcggagcagcctgctgaccaagaagcaggaccaggccgccaggaagatcatgaggttcctgcggcgctgccgccaccgggtgaaggagctgaagaaggccaaggagctggaggacatccagcagcaccccctggccatgtag

SEQ ID NO: 337499 - DNA, 2151 bp, Artificial Sequence
  derived and/or modified sequence
atggcctgccccgtgagccccgaccacaagcaggagggcgcccacgacaccggtcttgtgacactgcaggttgctttcaacaatcagataatttccaactcagtggttttcgaatacaaagcgagggcgctccctacactcccatcgtctcagcacgattggctgagtttggatgataatcagtttcgcatgagtatcctggagaggttggaacagatggagcgacgaatggccgagatgactggctctcagcagcacaaacaggccagtgggggggggtccagcggcggtgggagtggcagcgggaatggaggaagccaggcccaatgcgcaagtggcaccggagcattagggtcctgctttgaaagtcgggttgtcgtggtgtgtgagaaaatgatgagccgcgcttgttgggccaagtctaagcatctcatacattccaagaccttccggggcatgaccctacttcatctggccgccgctcagggatacgcaactcttattcagaccctgataaaatggcggacaaagcacgccgacagcatcgacctcgagctggaggttgaccccctgaacgttgatcatttttcttgtactcctcttatgtgggcctgtgccctgggacacctcgaagccgcagtggtgctgtacaagtgggaccgaagggctatttctatccccgactccttaggaagactgccacttggcattgccagaagcagagggcacgtgaagttagccgagtgccttgagcacttacagcgcgatgagcaggcccagttaggccaaaatcctcggatccattgcccggcctcagaggagccatccactgaatcctggatggcccagtggcattcagaggccatttccagtccagagattcctaaaggcgtaacggtaatcgcctccacgaaccccgaactgcgccgtccccggagcgaaccgtcaaactactacagctccgagagtcataaagattacccagccccgaaaaagcacaaattgaacccagaatactttcagacccggcaggaaaagctcctgcccacagcgctgtctctggaagagcctaatatccgaaaacagtctccttcctccaagcaaagcgtacctgaaaccctctcacccagtgaaggggtacgcgatttctccagagagctatcaccacctacgcctgagacagccgcttttcaggcatctggctcccaaccagtgggcaagtggaatagtaaggatctctacatcggcgtcagcacagtgcaagttacgggcaacccgaagggaactagcgtcgggaaagaagccgccccctcccaggtgaggccgcgggagcccatgtctgttctgatgatggccaaccgggaggtggtgaatacagagctcggttcctatcgggacagcgcggaaaacgaagagtgcgggcagcccatggacgacattcaggtaaacatgatgacactcgccgagcatatcatcgaagcaacgctttcaagcactatgtcctggctggctagctacctcgctgatgctgactgcctgccatctgccgcccagatcaggagcgcatataacgagccacttaccccatcttccaacacaagcctcagccctgttggaagcccagtgtctgaaatcgcctttgaaaaggttgaaaatgagtttgcccaactgaccttgtctgaccatgagcaacgggagctgtacgaggccgctcgcctagtgcagaccgccttcagaaagtacaagggcaggcccctgcgcgagcaacaggaagtagcagccgccgtgattcagcgttgctaccgaaagtacaagcagtacgcattgtataaaaagatgactcaggctgcaatcctgatccagagcaaattccgctcatactatgaacagaagaagttccagcaatctcgcagggctgccgtgttgatccagaagtactacaggtcctacaaaaaatgcggtaagcggcgacaggccaggcgtactgccgtcattgtgcagcagaagttacgttccagcctactgactaagaagcaggatcaggcggcgcgcaagattatgcgctttctcaggcgttgcagacaccgggtaaaggaactcaagaaagccaaagaattggaggatatccagcagcatcccctggccatgtag

SEQ ID NO: 337500 - DNA, 4980 bp, Artificial Sequence
  derived and/or modified sequence
atgtggcgggccgagggcaagtggctgcccaagaccagccggaagtctgtgtcccagagcgtgttttgcggtacatcaacatactgtgtcctgaacactgtcccaccgatagaggacgatcatggcaactcgaactcttcacacgtgaaaatctttctgccgaagaagctcctggaatgcttgcccaaatgcagcagcctacctaaggaacgccatcgctggaacaccaacgaggagatcgctgcatacctcatcaccttcgaaaagcacgaagagtggcttactacttccccgaagaccagacctcaaaatggctcaatgatcctttacaacaggaaaaaggttaaatatcgcaaggatggctactgttggaagaagagaaaagatggcaaaacaacacgggaggaccatatgaagctgaaggtgcaaggggtcgaatgcctctatggatgttatgtacactcatcaattattccaacttttcaccgtagatgttactggctacttcagaaccccgacatcgttctggtccattatctgaatgtgcccgccattgaggattgcggaaagccgtgcggcccaatcctttgtagtattaatacagataagaaggaatgggcaaagtggacaaaagaagaattaatcggccaactaaaacctatgttccacggaatcaagtggacttgctctaacggaaatagctcttccgggtttagtgtggagcagctggtccagcagattctggactcccatcagaccaaacctcagcccaggactcacaattgtctgtgcaccgggagcctcggagcaggaggttcagtacatcataagtgcaactccgccaagcacaggattatcagcccaaaggttgaacctcggaccggtggatacggttcccactcagaggtgcagcacaacgatgttagtgaaggcaaacacgagcattcccattctaaagggagtagtagggagaagagaaacgggaaggtggcaaagccagtgctactgcatcagtcgtctacggaagtgtcctccaccaatcaagtcgaggtacctgatactacacagagctctcctgtctcaattagtagcggcttgaactctgacccagatatggtagactcacccgtagtgacaggcgtttctggaatggctgtggctagcgtcatgggatccctgagccagtcagcaacagtattcatgtctgaggtgaccaacgaggcagtatatacaatgtcccccactgccggacccaaccatcatctgttgagcccagatgcctctcagggtcttgtccttgcagtgagcagcgacggccacaaatttgctttccctactacagggtccagtgagtctctgtcaatgctgccaacaaatgtgtctgaagagctggtactttccacaaccttggatggaggtcgtaaaatccctgaaactaccatgaacttcgaccctgactgttttctgaacaacccgaaacagggccaaacctatggcggcggcgggcttaaagccgagatggtctctagcaatattagacattcacctcctggcgaaaggtccttcagctttaccaccgtcctgaccaaagaaatcaaaacggaggatacgagtttcgaacagcaaatggccaaagaagcttattccagtagtgccgcggcagtggcggcatcttcattgacactgacagccggctcctccctgttaccgagcggcggcgggctcagtccctcaactaccctggaacagatggacttctccgctatagactccaacaaagattacacctccagcttttctcagacaggtcattcacctcatattcatcaaactcctagtccctcgttttttctccaggatgcctctaagcctctgccagtggagcaaaatactcactcctcccttagcgattcagggggcaccttcgtgatgcccacagttaagaccgaagcgtcaagtcagacctcctcatgctctggccatgtggagactcgaattgagagcaccagctccctgcacctcatgcagtttcaagctaacttccaagccatgactgcagaaggggaggtcaccatggagacaagtcaggccgccgaggggtccgaggtgctgcttaagagcggcgagctgcaggcttgctccagtgaacactacctgcagccagaaaccaatggagtgataaggtcagctggaggcgtaccaatcctgccaggaaacgttgtccagggcctgtaccccgtggctcagccatccctgggtaacgcctccaacatggagctgtctctggaccattttgatatttcattctccaatcagttctccgacctgatcaatgattttatcagtgttgaaggcgggtcttcaacaatctacggacatcagcttgtgtctggtgattccaccgcactgagtcagtcagaagatggtgctagagcccctttcactcaagcggagatgtgcctcccatgctgctccccacaacagggcagtcttcagctgtctagcagtgaggggggtgcctctactatggcctacatgcacgtcgcggaggttgtcagtgccgctagtgcgcaaggtactctgggaatgctgcagcagtccggccgggtgttcatggtcaccgactattcccccgagtggtcataccccgagggtggcgtgaaggtactaatcaccggaccctggcaggaagcctccaacaattatagctgtctgtttgaccaaatctctgtgcccgcgagcctgattcaacccggggtgctccgctgttattgtcccgcacacgacacaggcctggtgactctacaggttgcattcaataatcagattattagtaatagcgtcgtgtttgagtacaaggcccgagcactccccactctgccatcatcccagcatgattggctgtcactggacgacaatcagttccgcatgagtatcttggagagactggagcagatggaaaggagaatggccgaaatgacaggctcacaacagcacaagcaggcctccggcgggggtagttctggtggcggctctggttccggaaacggagggtcacaggcccagtgcgcatcgggcacaggagcactcgggtcctgctttgagtctagggtcgttgtggtgtgcgagaaaatgatgagtcgggcgtgttgggctaagagtaagcatctgattcactctaagacattcaggggtatgactttgctccacctggccgcagcacaggggtacgccacactgatccaaactcttattaaatggcgcactaagcacgctgactccatcgatctcgagctagaggtggaccccctgaatgtggaccactttagttgtactcctctgatgtgggcctgcgccctgggacacctggaagctgcagtagtgctgtataaatgggatcggagagccatatcaataccggactccttgggacgcttgcctttaggaattgcccgtagtcgtggacacgtgaaactcgccgagtgcctagaacatttacaaagagatgagcaggctcaactcggacagaacccacgcattcactgtccagcctctgaagagccttccaccgagagttggatggcccagtggcatagcgaggccattagcagtccagaaataccgaagggtgttacagtcatcgcctcaactaatcctgagctgaggagacctagatccgaaccctccaactattatagcagcgagagccataaggactaccccgccccaaaaaaacacaaactcaaccctgaatactttcagacacgacaggaaaagctcctgcctacagcccttagcctggaggagcccaatatcaggaagcaaagcccatccagcaaacaatcagtgcctgaaaccctgtcccctagcgagggagtgcgtgacttcagtagagaactcagcccgcccactcctgaaacggctgccttccaggccagtgggtcccaaccggtgggcaagtggaacagcaaagacctttacattggagtttccactgttcaagtgacaggcaaccctaagggaacatccgttggtaaagaagctgcccccagccaggtgagacctagagaaccaatgtctgtgctgatgatggctaaccgcgaggtggtgaacaccgagctcggctcatatcgggatagcgcggagaatgaagagtgtggccagcctatggacgacatccaggtgaacatgatgacactggccgagcacatcatcgaggccacacccgaccgcatcaagcaggaaaattttgtccccatggaatctagcggcttggagcgcacagaccccgcaactatctcttccacaatgagctggctcgcctcctacttagcagatgccgactgcctcccgtcagcggcacaaattagactgtcgccggtgggcagtccagtctcagagatagcttttgagaaacctaacctgcctagcgctgctgattggtccgaatttctgagtgcatccacctccgagaaggtggagaatgagttcgcacagctgactctgtcggaccacgagcaaagagagctctatgaagctgcccggctggtgcagactgcatttcgtaaatataagggtcgtcctcttcgcgagcaacaggaggtggccgctgccgttatccagcggtgctatcggaagtataagcaatatgcgctgtacaaaaaaatgacccaggctgcaattctcatacagtcaaaatttcggagctattacgaacagaagaagtttcagcagtcaagacgggcagcagtactaatccagaaatattacagatcctacaaaaaatgtgggaaaaggcggcaggctagacgaaccgcagtgattgtccagcagaagctccggagctccctgttaacgaagaagcaggaccaggcagcgaggaagatcatgcgcttcttgaggcgctgccgacatcgagtgaaagaactgaaaaaggcgaaagaactggaggacatccagcagcaccctctggcaatgtag

SEQ ID NO: 337501 - DNA, 2151 bp, Artificial Sequence
  derived and/or modified sequence
atggcttgtccagtctccccagaccacaagcaggaaggagcgcacgatacggggcttgtcacgctgcaggtggcctttaataaccaaatcatttccaattccgttgtttttgagtacaaggctagagctcttcccaccctgccatccagccagcatgattggctctctctcgacgacaatcagtttagaatgagcatattggagaggctggagcagatggagcggaggatggcagaaatgacagggagccagcagcataagcaggccagtgggggtgggtcaagcgggggtggatccggcagcggtaacggcggtagccaggctcaatgcgcgtccgggacaggggctctcggatcctgtttcgagtcgcgtgtggtcgtcgtgtgcgaaaaaatgatgagccgcgcttgctgggcaaagtccaagcacctgatccactcaaagacattcaggggcatgactctcctacacctggcagctgcacagggatatgctactctcattcagactctgattaagtggaggaccaaacatgccgattccatagacttggagcttgaggtggacccactgaacgtggaccacttctcctgtaccccattgatgtgggcctgcgcattagggcatctcgaagcagctgtcgtactctataaatgggataggcgagctatttccataccggattcactggggagacttcctctgggcatcgcacggtcgaggggccacgtgaaattagccgaatgtctcgagcacctccaacgcgacgagcaggcccagttgggacagaatcccagaattcactgccccgctagtgaagaaccttctactgagtcctggatggcccagtggcacagtgaggctatctcttctcccgaaataccaaagggcgttaccgtgatagcatctacaaaccctgagctgagaagacctagatcagagccgtccaattactacagctcagagtcacataaggattatccggctcctaaaaagcacaagctgaatcccgaatattttcaaacgcggcaggaaaaattactcccgactgcactttccttggaggagccaaacatccggaagcaatcaccaagctcgaagcagagtgtaccggagacactatcaccgtctgaaggtgtgagagatttctcccgtgagctgagccctccaacccctgagaccgctgctttccaggcaagtggctcacagcctgtggggaagtggaattcgaaggacctgtacattggcgtgtcaaccgtgcaggtgactggtaaccccaagggaactagtgtggggaaagaggccgcaccaagccaggtgcgaccgagggagccaatgagtgtgctgatgatggctaaccgggaagtagtgaacacagaactcggatcatacagagactcagccgagaacgaggagtgtgggcaacccatggatgacatccaggttaatatgatgaccctcgccgagcacattatagaagccacattatcctccactatgtcctggctggccagttatctggctgatgccgactgcctaccctcggcagcccagataagatcagcctacaacgaacctcttaccccgagctctaacacaagcctgagccccgtcggctcacccgtctcggagattgcctttgagaaagttgaaaacgaattcgcccagctgaccctgtctgatcacgagcaaagagaactatacgaagctgccagattagtgcagaccgctttccggaagtataaggggagacctttacgagaacaacaggaggtagccgctgctgtcatacagaggtgctaccgcaaatataagcagtatgcactgtacaagaaaatgacacaggccgcaattcttatccagagcaagttcaggagttactatgagcagaagaaatttcagcagtctcgacgggctgcagtccttatccagaagtactaccgcagctataaaaaatgcggaaagcgccgacaagccagacggactgccgtgattgtgcaacaaaaactgcgcagctccctcttaacaaagaaacaggatcaagctgctcgtaaaatcatgagatttctccgcagatgtaggcaccgagtcaaggaactcaaaaaggcaaaagaattagaagatatccagcaacacccgcttgctatgtag

SEQ ID NO: 337502 - DNA, 4980 bp, Artificial Sequence
  derived and/or modified sequence
atgtggcgggcagaagggaaatggctccctaagacttcacgtaagtcagttagtcagtcggtgttttgtggcacttccacttattgcgtgctgaacacagtgccacctatcgaagacgaccacgggaatagtaactcttcccacgtcaaaatcttcctgccaaaaaagctgcttgagtgcctcccaaagtgttcatctcttccaaaagaacgccaccggtggaatacgaacgaggagatcgcagcctatttaatcacctttgaaaaacacgaagagtggttaactaccagcccaaaaaccagaccccaaaacggaagcatgatactgtacaaccgaaaaaaggttaagtatagaaaagacggttactgctggaaaaaaaggaaagatggtaaaacaacaagggaagatcacatgaagctgaaggtccagggggtcgagtgcctctacggctgttacgtgcacagcagcatcattccaaccttccacagacgctgctactggctgctgcaaaacccagatatcgtgctcgttcattacttgaacgttcccgcaattgaagactgtggcaagccctgtggacctatcctctgctcaataaataccgacaaaaaggagtgggccaaatggactaaagaggagctcatcggacaattgaagccaatgttccacgggattaagtggacatgttccaacggaaattcctcctcaggcttctcggttgagcaactggttcagcaaatcttggactcgcatcaaactaagcctcaaccaaggacgcacaactgcctttgcactggatccctgggagcaggaggttctgtgcaccacaagtgtaactctgccaagcaccgaatcatatctccaaaggtggagccgagaaccgggggatatgggagtcacagcgaagttcagcacaacgacgtaagcgagggcaagcacgagcatagccactccaaaggaagttcaagggaaaaaagaaacggtaaggtggcaaaacctgtccttcttcaccagtcctccacagaagtgagctccacgaatcaagtggaagtgcccgatacaacccaaagctccccagtgagtatctctagcggactcaacagcgatccagacatggtagatagccctgttgttactggagtgtcaggtatggcggtagcgagcgtgatgggtagcctaagccagagtgccacagtatttatgagtgaagttacgaacgaagccgtgtacaccatgtcccctactgcagggccaaatcatcatctgctctcccctgatgcctcccagggtctggtgctggctgtgagctccgacggccataaatttgcttttcccacgaccgggtccagcgaaagcttgagcatgctccccacaaatgtgtccgaggagcttgtgctgtcaaccacactggacggagggaggaagatccctgagaccactatgaatttcgaccctgactgcttcctgaacaatcctaaacagggtcagacatacggtggcggtggtctgaaagctgaaatggtatcgagtaacatccgtcattcaccaccaggagagcggagtttttccttcactaccgtgctcacgaaagaaatcaagactgaggatacaagctttgagcaacagatggccaaagaggcatactcaagcagcgctgccgctgtggccgcttctagtctgactctcaccgccggatcgtctttgctaccctcgggaggagggctttctccgtcaactacactagaacagatggacttctctgcgattgatagtaataaggactacacaagcagcttttctcagactggacactctccccatatccaccagacccctagcccctcctttttcctgcaggatgcaagcaagcccctgcccgttgagcagaacacacactccagtctgagcgactcaggtgggaccttcgttatgcccacagtgaaaaccgaggcttcatctcaaacttccagttgtagcggccatgtcgaaacccgtattgaatctacgtcatccctacacctaatgcagttccaggccaatttccaagctatgactgcggagggcgaggttacaatggagacctcacaagcggctgagggatctgaagttctgttaaagtcaggcgaactgcaggcctgcagttctgagcactacctgcagcctgaaacgaatggtgtaatcaggtcagctgggggtgtccctattctgccaggaaacgtcgttcagggcttataccccgtcgcacagccatccctgggcaatgcatctaatatggagctgagccttgaccattttgacattagtttctctaatcagttctccgatttaattaacgacttcatcagtgtggagggtgggagtagtactatttacggccatcagcttgttagcggagattctaccgcactctcacagagcgaagatggcgcaagagccccattcactcaggccgagatgtgtctgccctgctgcagcccgcaacaggggtcacttcaactgtcttctagcgaagggggagccagcacaatggcatatatgcacgttgccgaggtcgttagcgccgcttctgcccaagggactctcgggatgctgcagcagagcggacgggtgttcatggtcactgattacagccctgaatggagctacccagaaggtggagtcaaggtcctaatcaccggcccatggcaggaagccagcaacaactacagctgccttttcgaccagatttcagttccagcttcactcatacagcctggagtactgcgctgctactgtcctgcacacgacacaggactggtgacccttcaggtggcatttaacaatcagatcatttccaattcagtagtttttgaatacaaagctagagccctgcccaccctgccgagctcgcaacacgattggttaagcctcgacgataatcagttcaggatgagcatcctcgaacgtcttgagcagatggagagacggatggctgagatgactggctcacaacagcacaagcaggcaagtggtggaggttcctccgggggtgggtcaggatcaggtaacggcggttctcaggcccagtgtgcctccggtaccggggcactcgggtcatgttttgaatctcgggtagtagtcgtctgcgagaagatgatgtcccgagcttgctgggctaagtccaaacaccttattcacagcaagacattccggggtatgacactgctgcacctggctgctgctcaagggtatgcaacactaattcagacgctgattaagtggaggaccaaacacgccgactcaatcgatcttgaattggaggtggaccctcttaatgttgaccacttcagttgcactcccctgatgtgggcctgcgcgctcggacatctggaagctgctgtggtcttgtacaagtgggatcgacgagctattagcatccccgatagcttgggacggctgccactaggaattgcccgttctcgaggtcacgtcaagttagcagagtgcctcgagcatcttcagcgcgatgagcaggcccagctcggccagaaccctcggatccattgccctgctagtgaggagccttctacagagagttggatggcacagtggcacagcgaagccatcagctctccagagattccaaagggtgtgacagtgatcgccagtacgaatcccgaattacgacggccacgctctgaaccaagcaattactatagctctgagtcccataaggattatcccgcacctaagaaacataaactaaaccctgaatatttccagacccgccaagagaagcttctccctactgcgctgtctttggaggaacccaatatcaggaagcagtctccatcatctaagcagtcagtgcccgaaacactgtccccgtcagaaggagtccgcgacttctcgagggagctctcccccccaactcctgagacagccgcattccaggcgtctgggagccagcctgtgggcaaatggaactcaaaggacctgtatatcggagtgagcactgtgcaagtaacaggcaatcccaaaggaacaagtgtgggcaaggaagctgctccttcccaggtacggcctagagagcccatgagcgttctcatgatggccaacagagaagttgtcaacacagagctcggttcttatcgagactctgccgaaaacgaggagtgtggccaaccaatggatgatattcaggtgaacatgatgaccttggcagagcatatcatcgaggctaccccagacagaattaaacaggagaatttcgtacccatggaatcttcaggacttgagagaactgatccagcaacaattagctctactatgtcatggctggcttcctaccttgctgatgctgattgcctaccgagcgccgctcagatacggcttagcccggtgggatctcctgtttccgagatcgctttcgagaagcctaacctgcctagcgcggctgattggtctgaatttctgagcgcatccacctcggaaaaggtggaaaatgagttcgctcagctcacactcagcgatcatgagcagagggaactgtatgaggctgcccgactggtccagactgctttcagaaaatataaaggacgacctctgcgagaacagcaggaggtggccgctgcagtgatccagagatgttacaggaaatacaaacagtacgccctgtacaagaagatgactcaggcagctattctaatacagtccaagttcaggagttattatgagcagaaaaagtttcagcaaagccggcgtgctgctgtcctgatccagaaatattatcggagctacaaaaagtgcgggaaaaggagacaagcacgacggaccgccgtaatcgttcagcagaaattgagaagctctctgctgacaaaaaagcaagaccaggcagctagaaaaatcatgcgcttcctcaggcgttgcagacaccgcgttaaggagctcaagaaagcaaaggaactggaagacattcagcagcatcctctggctatgtag

SEQ ID NO: 337503 - DNA, 2320 bp, Artificial Sequence
  derived and/or modified sequence
gtcttctgctcctgggctgttgctggcaggactcccttggctgccccatctcatcaccaccagccctcaggatggcctgtccagtgagccctgaccataaacaggagggggcccatgacactggtcttgtgaccctacaagttgccttcaacaaccagatcatctccaactcggtggtgtttgagtacaaagcccgggctctgcccacgctcccttcctcccagcacgactggctgtcgttggacgataaccagttcaggatgtccatcctggaacgactggagcagatggagaggaggatggccgagatgacggggtcccagcagcacaaacaggcgagcggaggcggcagcagtggaggcggcagcgggagcgggaatggagggagccaggcacagtgtgcttctgggactggggccttggggagctgctttgagagccgtgtggtcgtggtatgcgagaagatgatgagccgagcctgctgggcgaagtccaagcacttgatccactcaaagactttccgcggaatgaccctactccacctggccgctgcccagggctatgccaccctaatccagaccctcatcaaatggcgtacaaagcacgcggatagcattgacctggaactggaagttgaccccttgaatgtggaccacttctcctgtactcctctgatgtgggcgtgtgccctagggcacttggaagctgccgtcgtgctgtacaagtgggaccgtcgggccatctcgattcccgactctctaggaaggctgcctttgggaattgccaggtcacggggtcatgtgaaattagcagagtgtctggagcacctgcagagagatgagcaggctcagctgggacagaaccccagaatccactgtcctgcaagcgaagagcccagcacagagagctggatggcccagtggcacagcgaagccatcagctctccagaaatacccaagggagtcactgttattgcaagcaccaacccagagctgagaagacctcgttctgaaccctctaattactacagcagtgagagccacaaagattatccggctcccaaaaagcataaattgaaccctgagtacttccagacaaggcaggagaagctgcttcccactgcactgagtctggaagagccaaatatcaggaagcaaagccctagttctaagcagtctgtccccgagacactcagccccagtgaaggagtgagggacttcagccgggaactctcccctcccactccagagactgcagcatttcaagcctctggatctcagcctgtaggaaagtggaattccaaagatctttacattggtgtgtctacagtacaggtgactggaaatccgaaggggaccagtgtaggaaaggaggcagcaccttcacaggtgcgtccacgggaaccaatgagtgtcctgatgatggctaacagagaggtggtgaatacagagctggggtcctaccgtgatagtgcagaaaatgaagaatgcggccagcccatggatgacatacaggtgaacatgatgaccttggcagaacacattattgaagccacacttagcagtacaatgagctggctggccagttatctagcggatgctgactgccttcccagtgctgcccagatccgaagtgcatataacgagcctctaaccccttcttctaataccagcttgagccctgttggctctcccgtcagtgaaatcgctttcgagaaggtagagaatgagtttgctcagctcactctgtctgatcatgaacagagagaactctatgaggctgccaggcttgtccagacagctttccggaaatacaagggccgacccttgcgggaacagcaagaagtagctgctgctgttattcagcgttgttacagaaaatataaacagtacgcactttataaaaagatgacacaggctgccatccttatccagagcaaattccgaagttactatgaacaaaaaaaattccagcagagccgacgggctgctgtgctcatccaaaagtactaccgaagttataagaaatgtggcaaaagacggcaggctcgccggacggctgtgattgtacaacagaaactcaggagcagtttgctaaccaaaaagcaggatcaagctgctcgaaaaataatgaggtttcttcgccgctgtcgccacagagtgaaagaattgaaaaaggccaaggaacttgaagacatacagcagcatcccttagcaatgtgacattgcttttcagactgttttcatttctgtttttagcagagacatgcaacaacaacacacacgcacacacgcacacacacacacgtacacacacatac

SEQ ID NO: 337504 - DNA, 4980 bp, Artificial Sequence
  derived and/or modified sequence
atgtggcgcgcggaggggaaatggctgccgaaaacaagccggaagagcgtttcccaaagtgtattctgcggaactagcacctactgtgttctcaacaccgtgccacctatagaagatgatcatgggaacagcaatagtagtcatgtaaaaatctttttaccgaaaaagctgcttgaatgtctgccgaaatgttcaagtttaccaaaagagaggcaccgctggaacactaatgaggaaattgcagcttatttaataacatttgagaaacacgaagaatggctaaccacctcccctaagacaagaccacagaatggctcaatgatactctacaacaggaagaaagtgaaatacaggaaagatgggtattgctggaaaaagaggaaagatgggaaaacgaccagagaggaccacatgaaactcaaggtccagggagtggagtgcttgtacggctgctatgtccattcctccatcatccccaccttccaccggaggtgctactggctccttcagaaccccgacatcgtcctggtgcactacctgaacgtgccggccatcgaggactgcggcaagccttgcggccccatcctctgctccatcaacaccgacaagaaggagtgggcgaaatggacgaaagaagagctcatcgggcagctgaaacccatgttccatggcatcaagtggacctgcagcaatgggaacagcagctcaggcttctcggtggaacagctggtgcagcagatcctcgacagccaccagaccaagccccagccgcggacccacaactgcctctgcaccggcagcctgggagctggcggcagcgtgcatcacaagtgtaacagcgccaaacaccgcatcatctcgcccaaggtggagccacggacaggggggtacgggagccactcggaggtgcagcacaatgacgtgtcggagggcaagcacgagcacagccacagcaagggctccagccgtgagaagaggaacggcaaggtggccaagcccgtgctcctgcaccagagcagcaccgaggtctcctccaccaaccaggtggaagtccccgacaccacccagagctcccctgtgtccatcagcagcgggctcaacagcgacccggacatggtggacagcccggtggtcacaggtgtgtccggtatggcggtggcctctgtgatggggagcttgtcccagagcgccacggtgttcatgtcagaggtcaccaatgaggccgtgtacaccatgtcccccaccgctggccccaaccaccacctcctctcacctgacgcctctcagggcctcgtcctggccgtgagctctgatggccacaagttcgcctttcccaccacgggcagctcggagagcctgtccatgctgcccaccaacgtgtccgaagagctggtcctctccaccaccctcgacggtggccggaagattccagaaaccaccatgaactttgaccccgactgtttccttaataacccaaagcagggccagacgtacgggggtggaggcctgaaagccgagatggtcagctccaacatccggcactcgccacccggggagcggagcttcagctttaccaccgtcctcaccaaggagatcaagaccgaggacacctccttcgagcagcagatggccaaagaagcgtactcctcctccgcggcggctgtggcagccagctccctcaccctgaccgccggctccagcctcctgccgtcgggcggcggcctgagtcccagcaccaccctggagcagatggacttcagcgccatcgactccaacaaggactacacgtccagcttcagccagacgggccacagcccccacatccaccagaccccctccccgagcttcttcctgcaggacgccagcaaacccctccccgtcgagcagaacacccacagcagcctgagtgactctgggggcaccttcgtgatgcccacggtgaaaacggaggcctcgtcccaaaccagctcctgcagcggtcacgtggagacgcggatcgagtccacttcctccctccacctcatgcagttccaggccaacttccaggccatgacggcagaaggggaggtcaccatggagacctcgcaggcggcggaagggagcgaggtcctgctcaagtctggggagctgcaggcttgcagctctgagcactacctgcagccggagaccaacggggtaatccgaagcgccggcggcgtccccatcctcccgggcaacgtggtgcagggactctaccccgtggcccagcccagcctcggcaacgcctccaacatggagctcagcctggaccactttgacatctccttcagcaaccagttctccgacctgatcaacgacttcatctccgtggaggggggcagcagcaccatctatgggcaccagctggtgtcgggggacagcacggcgctctcacagtcagaggacggggcgcgggcccccttcacccaggcagagatgtgcctcccctgctgtagcccccagcagggtagcctgcagctgagcagctcggagggcggggccagcaccatggcctacatgcacgtcgccgaggtggtctcggccgcctcggcccagggcaccctaggcatgctgcagcagagcggacgggtgttcatggtgaccgactactccccagagtggtcttacccagagggaggagtgaaggtcctcatcacaggcccgtggcaagaagccagcaataactacagctgcctgtttgaccagatctcagtgcctgcatccctgattcagcctggggtgctgcgctgctactgcccagcccatgacactggtcttgtgaccctacaagttgccttcaacaaccagatcatctccaactcggtggtgtttgagtacaaagcccgggctctgcccacgctcccttcctcccagcacgactggctgtcgttggacgataaccagttcaggatgtccatcctggaacgactggagcagatggagaggaggatggccgagatgacggggtcccagcagcacaaacaggcgagcggaggcggcagcagtggaggcggcagcgggagcgggaatggagggagccaggcacagtgtgcttctgggactggggccttggggagctgctttgagagccgtgtggtcgtggtatgcgagaagatgatgagccgagcctgctgggcgaagtccaagcacttgatccactcaaagactttccgcggaatgaccctactccacctggccgctgcccagggctatgccaccctaatccagaccctcatcaaatggcgtacaaagcacgcggatagcattgacctggaactggaagttgaccccttgaatgtggaccacttctcctgtactcctctgatgtgggcgtgtgccctagggcacttggaagctgccgtcgtgctgtacaagtgggaccgtcgggccatctcgattcccgactctctaggaaggctgcctttgggaattgccaggtcacggggtcatgtgaaattagcagagtgtctggagcacctgcagagagatgagcaggctcagctgggacagaaccccagaatccactgtcctgcaagcgaagagcccagcacagagagctggatggcccagtggcacagcgaagccatcagctctccagaaatacccaagggagtcactgttattgcaagcaccaacccagagctgagaagacctcgttctgaaccctctaattactacagcagtgagagccacaaagattatccggctcccaaaaagcataaattgaaccctgagtacttccagacaaggcaggagaagctgcttcccactgcactgagtctggaagagccaaatatcaggaagcaaagccctagttctaagcagtctgtccccgagacactcagccccagtgaaggagtgagggacttcagccgggaactctcccctcccactccagagactgcagcatttcaagcctctggatctcagcctgtaggaaagtggaattccaaagatctttacattggtgtgtctacagtacaggtgactggaaatccgaaggggaccagtgtaggaaaggaggcagcaccttcacaggtgcgtccacgggaaccaatgagtgtcctgatgatggctaacagagaggtggtgaatacagagctggggtcctaccgtgatagtgcagaaaatgaagaatgcggccagcccatggatgacatacaggtgaacatgatgaccttggcagaacacattattgaagccacacctgaccgaatcaagcaggagaattttgtgcccatggagtcctcaggattggaaagaacagaccctgccaccattagcagtacaatgagctggctggccagttatctagcggatgctgactgccttcccagtgctgcccagatccgcttgagccctgttggctctcccgtcagtgaaatcgctttcgagaaacctaaccttccctccgccgcggattggtcagaattcctgagtgcatctaccagtgagaaggtagagaatgagtttgctcagctcactctgtctgatcatgaacagagagaactctatgaggctgccaggcttgtccagacagctttccggaaatacaagggccgacccttgcgggaacagcaagaagtagctgctgctgttattcagcgttgttacagaaaatataaacagtacgcactttataaaaagatgacacaggctgccatccttatccagagcaaattccgaagttactatgaacaaaaaaaattccagcagagccgacgggctgctgtgctcatccaaaagtactaccgaagttataagaaatgtggcaaaagacggcaggctcgccggacggctgtgattgtacaacagaaactcaggagcagtttgctaaccaaaaagcaggatcaagctgctcgaaaaataatgaggtttcttcgccgctgtcgccacagagtgaaagaattgaaaaaggccaaggaacttgaagacatacagcagcatcccttagcaatgtga

SEQ ID NO: 337505 - DNA, 2151 bp, Artificial Sequence
  derived and/or modified sequence
atggcctgccccgtgagccccgaccacaagcaggagggcgcccacgacaccggcctggtgaccctgcaggtggccttcaacaaccagatcatcagcaacagcgtggtgttcgagtacaaggccagagccctgcccaccctgcccagcagccagcacgactggctgagcctggacgacaaccagttcagaatgagcatcctggagagactggagcagatggagagaagaatggccgagatgaccggcagccagcagcacaagcaggccagcggcggcggcagcagcggcggcggcagcggcagcggcaacggcggcagccaggcccagtgcgccagcggcaccggcgccctgggcagctgcttcgagagcagagtggtggtggtgtgcgagaagatgatgagcagagcctgctgggccaagagcaagcacctgatccacagcaagaccttcagaggcatgaccctgctgcacctggccgccgcccagggctacgccaccctgatccagaccctgatcaagtggagaaccaagcacgccgacagcatcgacctggagctggaggtggaccccctgaacgtggaccacttcagctgcacccccctgatgtgggcctgcgccctgggccacctggaggccgccgtggtgctgtacaagtgggacagaagagccatcagcatccccgacagcctgggcagactgcccctgggcatcgccagaagcagaggccacgtgaagctggccgagtgcctggagcacctgcagagagacgagcaggcccagctgggccagaaccccagaatccactgccccgccagcgaggagcccagcaccgagagctggatggcccagtggcacagcgaggccatcagcagccccgagatccccaagggcgtgaccgtgatcgccagcaccaaccccgagctgagaagacccagaagcgagcccagcaactactacagcagcgagagccacaaggactaccccgcccccaagaagcacaagctgaaccccgagtacttccagaccagacaggagaagctgctgcccaccgccctgagcctggaggagcccaacatcagaaagcagagccccagcagcaagcagagcgtgcccgagaccctgagccccagcgagggcgtgagagacttcagcagagagctgagcccccccacccccgagaccgccgccttccaggccagcggcagccagcccgtgggcaagtggaacagcaaggacctgtacatcggcgtgagcaccgtgcaggtgaccggcaaccccaagggcaccagcgtgggcaaggaggccgcccccagccaggtgagacccagagagcccatgagcgtgctgatgatggccaacagagaggtggtgaacaccgagctgggcagctacagagacagcgccgagaacgaggagtgcggccagcccatggacgacatccaggtgaacatgatgaccctggccgagcacatcatcgaggccaccctgagcagcaccatgagctggctggccagctacctggccgacgccgactgcctgcccagcgccgcccagatcagaagcgcctacaacgagcccctgacccccagcagcaacaccagcctgagccccgtgggcagccccgtgagcgagatcgccttcgagaaggtggagaacgagttcgcccagctgaccctgagcgaccacgagcagagagagctgtacgaggccgccagactggtgcagaccgccttcagaaagtacaagggcagacccctgagagagcagcaggaggtggccgccgccgtgatccagagatgctacagaaagtacaagcagtacgccctgtacaagaagatgacccaggccgccatcctgatccagagcaagttcagaagctactacgagcagaagaagttccagcagagcagaagagccgccgtgctgatccagaagtactacagaagctacaagaagtgcggcaagagaagacaggccagaagaaccgccgtgatcgtgcagcagaagctgagaagcagcctgctgaccaagaagcaggaccaggccgccagaaagatcatgagattcctgagaagatgcagacacagagtgaaggagctgaagaaggccaaggagctggaggacatccagcagcaccccctggccatgtag

SEQ ID NO: 337506 - DNA, 4980 bp, Artificial Sequence
  derived and/or modified sequence
atgtggagagccgagggcaagtggctgcccaagaccagcagaaagagcgtgagccagagcgtgttctgcggcaccagcacctactgcgtgctgaacaccgtgccccccatcgaggacgaccacggcaacagcaacagcagccacgtgaagatcttcctgcccaagaagctgctggagtgcctgcccaagtgcagcagcctgcccaaggagagacacagatggaacaccaacgaggagatcgccgcctacctgatcaccttcgagaagcacgaggagtggctgaccaccagccccaagaccagaccccagaacggcagcatgatcctgtacaacagaaagaaggtgaagtacagaaaggacggctactgctggaagaagagaaaggacggcaagaccaccagagaggaccacatgaagctgaaggtgcagggcgtggagtgcctgtacggctgctacgtgcacagcagcatcatccccaccttccacagaagatgctactggctgctgcagaaccccgacatcgtgctggtgcactacctgaacgtgcccgccatcgaggactgcggcaagccctgcggccccatcctgtgcagcatcaacaccgacaagaaggagtgggccaagtggaccaaggaggagctgatcggccagctgaagcccatgttccacggcatcaagtggacctgcagcaacggcaacagcagcagcggcttcagcgtggagcagctggtgcagcagatcctggacagccaccagaccaagccccagcccagaacccacaactgcctgtgcaccggcagcctgggcgccggcggcagcgtgcaccacaagtgcaacagcgccaagcacagaatcatcagccccaaggtggagcccagaaccggcggctacggcagccacagcgaggtgcagcacaacgacgtgagcgagggcaagcacgagcacagccacagcaagggcagcagcagagagaagagaaacggcaaggtggccaagcccgtgctgctgcaccagagcagcaccgaggtgagcagcaccaaccaggtggaggtgcccgacaccacccagagcagccccgtgagcatcagcagcggcctgaacagcgaccccgacatggtggacagccccgtggtgaccggcgtgagcggcatggccgtggccagcgtgatgggcagcctgagccagagcgccaccgtgttcatgagcgaggtgaccaacgaggccgtgtacaccatgagccccaccgccggccccaaccaccacctgctgagccccgacgccagccagggcctggtgctggccgtgagcagcgacggccacaagttcgccttccccaccaccggcagcagcgagagcctgagcatgctgcccaccaacgtgagcgaggagctggtgctgagcaccaccctggacggcggcagaaagatccccgagaccaccatgaacttcgaccccgactgcttcctgaacaaccccaagcagggccagacctacggcggcggcggcctgaaggccgagatggtgagcagcaacatcagacacagcccccccggcgagagaagcttcagcttcaccaccgtgctgaccaaggagatcaagaccgaggacaccagcttcgagcagcagatggccaaggaggcctacagcagcagcgccgccgccgtggccgccagcagcctgaccctgaccgccggcagcagcctgctgcccagcggcggcggcctgagccccagcaccaccctggagcagatggacttcagcgccatcgacagcaacaaggactacaccagcagcttcagccagaccggccacagcccccacatccaccagacccccagccccagcttcttcctgcaggacgccagcaagcccctgcccgtggagcagaacacccacagcagcctgagcgacagcggcggcaccttcgtgatgcccaccgtgaagaccgaggccagcagccagaccagcagctgcagcggccacgtggagaccagaatcgagagcaccagcagcctgcacctgatgcagttccaggccaacttccaggccatgaccgccgagggcgaggtgaccatggagaccagccaggccgccgagggcagcgaggtgctgctgaagagcggcgagctgcaggcctgcagcagcgagcactacctgcagcccgagaccaacggcgtgatcagaagcgccggcggcgtgcccatcctgcccggcaacgtggtgcagggcctgtaccccgtggcccagcccagcctgggcaacgccagcaacatggagctgagcctggaccacttcgacatcagcttcagcaaccagttcagcgacctgatcaacgacttcatcagcgtggagggcggcagcagcaccatctacggccaccagctggtgagcggcgacagcaccgccctgagccagagcgaggacggcgccagagcccccttcacccaggccgagatgtgcctgccctgctgcagcccccagcagggcagcctgcagctgagcagcagcgagggcggcgccagcaccatggcctacatgcacgtggccgaggtggtgagcgccgccagcgcccagggcaccctgggcatgctgcagcagagcggcagagtgttcatggtgaccgactacagccccgagtggagctaccccgagggcggcgtgaaggtgctgatcaccggcccctggcaggaggccagcaacaactacagctgcctgttcgaccagatcagcgtgcccgccagcctgatccagcccggcgtgctgagatgctactgccccgcccacgacaccggcctggtgaccctgcaggtggccttcaacaaccagatcatcagcaacagcgtggtgttcgagtacaaggccagagccctgcccaccctgcccagcagccagcacgactggctgagcctggacgacaaccagttcagaatgagcatcctggagagactggagcagatggagagaagaatggccgagatgaccggcagccagcagcacaagcaggccagcggcggcggcagcagcggcggcggcagcggcagcggcaacggcggcagccaggcccagtgcgccagcggcaccggcgccctgggcagctgcttcgagagcagagtggtggtggtgtgcgagaagatgatgagcagagcctgctgggccaagagcaagcacctgatccacagcaagaccttcagaggcatgaccctgctgcacctggccgccgcccagggctacgccaccctgatccagaccctgatcaagtggagaaccaagcacgccgacagcatcgacctggagctggaggtggaccccctgaacgtggaccacttcagctgcacccccctgatgtgggcctgcgccctgggccacctggaggccgccgtggtgctgtacaagtgggacagaagagccatcagcatccccgacagcctgggcagactgcccctgggcatcgccagaagcagaggccacgtgaagctggccgagtgcctggagcacctgcagagagacgagcaggcccagctgggccagaaccccagaatccactgccccgccagcgaggagcccagcaccgagagctggatggcccagtggcacagcgaggccatcagcagccccgagatccccaagggcgtgaccgtgatcgccagcaccaaccccgagctgagaagacccagaagcgagcccagcaactactacagcagcgagagccacaaggactaccccgcccccaagaagcacaagctgaaccccgagtacttccagaccagacaggagaagctgctgcccaccgccctgagcctggaggagcccaacatcagaaagcagagccccagcagcaagcagagcgtgcccgagaccctgagccccagcgagggcgtgagagacttcagcagagagctgagcccccccacccccgagaccgccgccttccaggccagcggcagccagcccgtgggcaagtggaacagcaaggacctgtacatcggcgtgagcaccgtgcaggtgaccggcaaccccaagggcaccagcgtgggcaaggaggccgcccccagccaggtgagacccagagagcccatgagcgtgctgatgatggccaacagagaggtggtgaacaccgagctgggcagctacagagacagcgccgagaacgaggagtgcggccagcccatggacgacatccaggtgaacatgatgaccctggccgagcacatcatcgaggccacccccgacagaatcaagcaggagaacttcgtgcccatggagagcagcggcctggagagaaccgaccccgccaccatcagcagcaccatgagctggctggccagctacctggccgacgccgactgcctgcccagcgccgcccagatcagactgagccccgtgggcagccccgtgagcgagatcgccttcgagaagcccaacctgcccagcgccgccgactggagcgagttcctgagcgccagcaccagcgagaaggtggagaacgagttcgcccagctgaccctgagcgaccacgagcagagagagctgtacgaggccgccagactggtgcagaccgccttcagaaagtacaagggcagacccctgagagagcagcaggaggtggccgccgccgtgatccagagatgctacagaaagtacaagcagtacgccctgtacaagaagatgacccaggccgccatcctgatccagagcaagttcagaagctactacgagcagaagaagttccagcagagcagaagagccgccgtgctgatccagaagtactacagaagctacaagaagtgcggcaagagaagacaggccagaagaaccgccgtgatcgtgcagcagaagctgagaagcagcctgctgaccaagaagcaggaccaggccgccagaaagatcatgagattcctgagaagatgcagacacagagtgaaggagctgaagaaggccaaggagctggaggacatccagcagcaccccctggccatgtag

SEQ ID NO: 337507 - protein, 636 aa, Artificial Sequence
  derived and/or modified sequence
MMSRACWAKSKHLIHSKTFRGMTLLHLAAAQGYATLIQTLIKWRTKHADSIDLELEVDPLNVDHFSCTPLMWACALGHLEAAVVLYKWDRRAISIPDSLGRLPLGIARSRGHVKLAECLEHLQRDEQAQLGQNPRIHCPASEEPSTESWMAQWHSEAISSPEIPKGVTVIASTNPELRRPRSEPSNYYSSESHKDYPAPKKHKLNPEYFQTRQEKLLPTALSLEEPNIRKQSPSSKQSVPETLSPSEGVRDFSRELSPPTPETAAFQASGSQPVGKWNSKDLYIGVSTVQVTGNPKGTSVGKEAAPSQVRPREPMSVLMMANREVVNTELGSYRDSAENEECGQPMDDIQVNMMTLAEHIIEATPDRIKQENFVPMESSGLERTDPATISSTMSWLASYLADADCLPSAAQIRSAYNEPLTPSSNTSLSPVGSPVSEIAFEKPNLPSAADWSEFLSASTSEKVENEFAQLTLSDHEQRELYEAARLVQTAFRKYKGRPLREQQEVAAAVIQRCYRKYKQGKNICLKYALYKKMTQAAILIQSKFRSYYEQKKFQQSRRAAVLIQKYYRSYKKCGKRRQARRTAVIVQQKLRSSLLTKKQDQAARKIMRFLRRCRHRVKELKKAKELEDIQQHPLAM

SEQ ID NO: 337508 - protein, 80 aa, Artificial Sequence
  derived and/or modified sequence
MWRAEGKWLPKTSRKSVSQSVFCGTSTYCVLNTVPPIEDDHGNSNSSHVKIFLPKKLLECLPKCSSLPKERHRWNTNERS

SEQ ID NO: 337509 - DNA, 1911 bp, Artificial Sequence
  derived and/or modified sequence
atgatgagccgcgcttgttgggccaagtctaagcatctgatacacagcaagacattcaggggcatgactcttctgcacctggccgctgcccagggatacgcaacccttatccagaccctcatcaagtggcggaccaaacatgctgattctatcgaccttgagctcgaggtcgacccactgaatgttgaccacttttcgtgcactccgctcatgtgggcttgcgcattagggcacctagaagccgctgtggttctctataaatgggacagacgggccataagcattccagattctctggggagactcccactgggtatcgccaggtcccgggggcacgtgaagctggccgagtgtctggaacatcttcaaagggacgagcaggcgcaactcgggcagaacccacggattcactgccccgcgtcggaggaaccttctaccgaatcctggatggcccagtggcatagcgaagcaatcagcagccctgagatcccaaagggggttaccgtgatcgcctcaacaaacccagaactgcgtagaccgaggtccgagcccagcaattactactcatcggagtctcacaaggactaccccgcccccaaaaaacataagcttaaccctgagtacttccaaacgcgccaggagaaattgctgccaacagcgctcagccttgaagagcccaatattaggaagcagtctccaagcagcaaacagagcgtgccagaaactctgtcaccctcagaaggggttcgcgatttctcccgcgagctgtcaccacccacacctgagaccgcggccttccaggcctctggaagccagcccgttggcaagtggaactcaaaggatctctacatcggcgtgtccactgtgcaggtgacaggtaaccctaaagggacaagcgtgggaaaagaagcagccccgtcccaggtccgcccgagagagccaatgtcagttctgatgatggccaacagagaagtggtcaacactgagctgggcagttaccgtgatagcgccgaaaacgaggagtgtggtcagcccatggatgatatccaggtgaatatgatgaccttagcagaacacataatcgaagcaacccccgacagaattaagcaagagaatttcgtgccaatggaatcctccggactggaacgcacagaccctgcaacaatttccagcaccatgagctggctcgcatcatacctagctgatgctgattgtctccccagcgcagctcaaatccggagcgcctacaacgaacctctgaccccctcatccaacacatcacttagccctgttgggtctccagtgtccgagatcgccttcgagaagcccaacctgcctagcgctgccgactggtccgagttcctgagtgcttcgacgtctgaaaaagtcgaaaatgagtttgcccagctgactcttagtgaccacgagcaacgcgagctctacgaagccgcccgtctggtccagacagccttcaggaaatataaaggccgtcccctgagagagcagcaggaagtggcagcagctgtgatccaaaggtgctatcggaagtacaaacaaggcaagaacatctgtctgaagtacgcgttgtataagaagatgactcaggcagcaatccttatccaaagcaagttcaggtcctactatgaacagaaaaaattccagcagagccggagggccgcggtgttaatccagaagtattacagatcctacaaaaaatgtggtaaacggaggcaagctcggaggactgccgtcatcgtgcagcagaaattgcgcagtagtctgcttaccaaaaagcaggaccaagctgctcggaaaattatgcgatttctgcgtaggtgtaggcaccgggtgaaggagctcaaaaaggccaaagagcttgaggatatccaacagcaccccctggccatgtag

SEQ ID NO: 337510 - DNA, 1911 bp, Artificial Sequence
  derived and/or modified sequence
atgatgagccgggcctgctgggccaagagcaagcacctgatccacagcaagaccttccggggcatgaccctgctgcacctggccgccgcccagggctacgccaccctcatccagaccctcatcaagtggaggaccaagcacgccgacagcattgacctggagctggaggtggaccccctgaatgtggaccacttcagctgcacccccctgatgtgggcctgtgccctgggccacctggaggccgctgtggtgctgtacaagtgggaccggcgggccatcagcatcccagacagcctgggccgcctgcccctgggcatcgcccggagccggggccacgtgaagctggctgaatgtctggagcacctgcagagagatgagcaggcccagctgggccagaacccccgcatccactgcccagccagcgaggagcccagcacagagagctggatggcccagtggcacagcgaggccatcagcagccctgagatccccaagggcgtgaccgtcatcgccagcaccaaccctgagctgcggcggcccaggtctgagcccagcaactactacagcagcgagagccacaaggactacccagcccccaagaagcacaagctgaaccctgagtacttccagacccggcaggagaagctgctgcccacagccctgagcctggaggagcccaacatcaggaagcagagccccagcagcaagcagagcgtgcctgagaccctgagccccagcgagggcgtgcgggacttcagccgggagctgagcccccccaccccagagacagctgccttccaggccagcggcagccagcctgtgggcaagtggaacagcaaggacctgtacatcggcgtgtccacagtgcaggtgacaggcaaccccaagggcacctctgtgggcaaggaggccgcccccagccaggtgcggccccgggagcccatgtctgtgctgatgatggccaaccgggaggtggtgaacacagagctgggcagctacagagacagcgcagaaaatgaagaatgtggccagcccatggatgacatccaggtgaacatgatgaccctggccgagcacatcatcgaggccaccccagaccgcatcaagcaggagaactttgtgcccatggagagcagcggcctggagaggacagatcctgccaccatcagcagcaccatgtcctggctggccagctacctggctgatgctgactgcctgcccagcgctgcccagatccgcagcgcctacaatgagcccctgacccccagcagcaacaccagcctgagccctgtgggcagccctgtgtctgagatcgcctttgagaagcccaacctgcccagcgctgctgactggagcgagttcctgagcgccagcaccagcgagaaggtggagaatgaatttgcccagctgaccctgagtgaccacgagcagcgggagctgtatgaagctgcccggctggtgcagacagccttcaggaagtacaagggccggcccctgcgggagcagcaggaggtggccgccgccgtcatccagcgctgctacaggaagtacaagcagggcaagaacatctgcctgaagtatgccctgtacaagaagatgacccaggccgccatcctgatccagagcaagttccgcagctactatgagcagaagaagttccagcagagcagaagagctgctgtgctgatccagaagtactaccgcagctacaagaagtgtgggaagaggcggcaggcccggaggacagctgtgattgtgcagcagaagctgcggagcagcctgctgaccaagaagcaggaccaggccgccaggaagatcatgaggttcctgcggcgctgccgccaccgggtgaaggagctgaagaaggccaaggagctggaggacatccagcagcaccccctggccatgtag

SEQ ID NO: 337511 - DNA, 1911 bp, Artificial Sequence
  derived and/or modified sequence
atgatgagccgggcctgctgggccaagagcaagcacctgatccactccaagacttttcgcggtatgacccttctccatcttgccgcagctcaaggctatgccacactaatacagacactcatcaaatggcgtaccaaacacgcagactcgatcgacttagagttagaggtagatcctctgaacgtggaccatttttcttgcactccactgatgtgggcctgcgccctaggacacctcgaggctgcggttgtactgtacaagtgggaccggagggctataagtatcccagattccctggggaggctgccattgggcatagccaggtcccgtggacatgtcaagctagccgagtgcttggagcacctccagagggacgagcaggcccagctcgggcagaatccccgaatccattgccccgcgtccgaagagccctccaccgaatcttggatggcgcaatggcattccgaagccattagcagtcctgaaatcccaaagggtgtaaccgtgattgcttccactaaccccgagcttcgtaggccccggagcgagccttcaaattattacagcagtgagtcacacaaggattatcctgccccaaagaaacacaaactgaaccctgagtactttcaaactcggcaggaaaagctactccctactgcattgagtctcgaggaacctaatattcgcaagcaaagtccatccagtaaacagtcggtccctgaaactctctccccttctgagggcgttcgggattttagtcgtgagctcagtccccctacccccgaaaccgctgcgttccaagcctcaggcagtcagcctgtgggaaaatggaactccaaagacctctatataggcgtttcaactgtccaggttacaggcaacccgaaggggaccagcgtcggcaaggaagccgccccctcacaggttcgacctagagagcccatgagcgtcctgatgatggcaaatcgggaggtggtaaacactgaactgggttcctatagggacagtgccgagaacgaagaatgcggacaaccgatggacgacattcaggtgaacatgatgactctcgccgaacatatcatcgaagccactcccgatcggatcaagcaggagaacttcgtcccaatggaaagcagcggactcgagagaaccgatccagccaccatcagtagtaccatgtcttggcttgcttcctacctcgcggacgcagactgtctccccagcgccgctcagataaggagtgcttacaacgaacctctgacaccgtcctcaaatacttcactgtcgccagtcgggagcccagtctcagagatcgcatttgagaaacctaatctgccgtcagccgctgactggtctgagtttctaagtgcaagcacctccgaaaaagtcgagaatgaattcgctcaactaacgctctctgatcatgaacagcgtgaattgtacgaggccgcccggctggttcagaccgcattccgcaagtacaaagggagacccctgagagaacaacaggaggtagccgcagcagtgattcaacgatgttaccgtaagtataaacaagggaaaaacatttgtctgaagtacgccttgtacaagaagatgacacaggctgccatactcatccaatctaaattcagatcttactatgagcagaagaaattccagcaaagtcgccgtgctgcggtactgattcaaaagtactataggtcctataagaagtgcggaaaaagacgacaggcacgacggaccgctgtgatcgtgcagcagaagctccgaagtagcctcctgaccaagaagcaggaccaagccgccagaaaaataatgaggtttctaaggaggtgcaggcacagagtgaaggaactaaagaaggctaaggagctggaggacatccagcagcaccccctcgccatgtag

SEQ ID NO: 337512 - DNA, 1911 bp, Artificial Sequence
  derived and/or modified sequence
atgatgtcccgcgcatgctgggctaaatccaaacaccttatccactccaagaccttccggggaatgacgctcctacaccttgccgcagcccaggggtacgccaccctgattcagactctgataaagtggagaacgaaacatgccgattcaatcgacctcgaacttgaagtggatccgctcaatgtggaccatttcagttgtacacccttgatgtgggcttgcgcactgggtcacttggaggccgcagttgtgctgtataaatgggaccgacgtgctatctctattcctgatagtcttggacgattgcccctgggcatcgctcgctccaggggacacgtgaaactcgcagaatgtctcgaacatctgcagcgcgacgagcaagcccagttgggacagaatccaagaatccactgccctgcttcagaagaacctagtacagaaagctggatggcgcagtggcacagcgaagcaatctcctcaccggaaattccaaaaggcgtaaccgtgattgcttcaaccaatccagagctccggaggcccaggagcgagccatccaattactactctagcgaaagccacaaggactatcccgcaccaaagaagcataagctaaatcccgaatactttcagacacgtcaggaaaaactgctccctacagctctgtccctcgaggagccaaatatccggaaacaatcccccagctccaaacagagcgtgcccgagactctgagtccctctgaaggcgtgagggatttcagtcgcgaactgagccctcccacacccgagactgcagcctttcaagcttccggatcccagcccgtgggcaagtggaatagcaaagatctgtatatcggcgtgtcaacagtacaggtgaccggaaacccaaaagggacttcagtgggcaaggaagcggcacctagccaggtgcggcctagagaaccaatgagtgtgctgatgatggccaatagagaggtagtaaataccgagttgggaagctaccgcgatagcgcagaaaacgaagaatgtgggcaacctatggacgacatccaagtcaacatgatgacattggcagaacatatcattgaggctaccccagaccgcatcaagcaggagaacttcgttcctatggaaagctcagggctggaacgaactgacccagccacaattagctcaactatgagctggcttgcttcctatctggcggacgcagattgtctccctagtgccgctcaaataaggtccgcttacaatgaaccgctcacccctagtagcaatacaagcctgagtcccgtgggcagtcccgtcagtgagatcgcttttgagaagcccaatcttccaagcgctgccgattggagcgagtttctgtctgcttctacctccgaaaaagtggagaacgagtttgcgcagctcacgctgtcagatcacgaacagcgggagctgtacgaggctgctcgcttggtccagactgccttcaggaaatataagggaaggcctctgcgcgagcaacaggaagtagccgcagccgtaatacaacgatgttatagaaaatacaagcaggggaaaaacatttgcctgaaatatgccctgtataaaaagatgacacaggccgctatcctgattcagtccaaattccgtagctattacgagcaaaagaagttccagcagtccagacgcgctgccgtccttatccagaagtattataggagctataagaaatgtggcaagagacgccaagcacgacgcaccgccgtgatcgttcagcagaagctgcgaagtagcctgttaacaaagaaacaggatcaggctgcccgtaagattatgaggttccttcggagatgtcgccatcgtgttaaagagctcaaaaaagcaaaagaactcgaagatatccagcagcacccccttgccatgtag

SEQ ID NO: 337513 - DNA, 2467 bp, Artificial Sequence
  derived and/or modified sequence
gcagtcgcagcgcaaagggggccgcgggaacagctagtcgggagcgcgggggtcccgggcctctggccagccacggggcctggccatgaactttgcgtccgggccaatgctgcagtggccgggcggtgataaccagttcaggatgtccatcctggaacgactggagcagatggagaggaggatggccgagatgacggggtcccagcagcacaaacaggcgagcggaggcggcagcagtggaggcggcagcgggagcgggaatggagggagccaggcacagtgtgcttctgggactggggccttggggagctgctttgagagccgtgtggtcgtggtatgcgagaagatgatgagccgagcctgctgggcgaagtccaagcacttgatccactcaaagactttccgcggaatgaccctactccacctggccgctgcccagggctatgccaccctaatccagaccctcatcaaatggcgtacaaagcacgcggatagcattgacctggaactggaagttgaccccttgaatgtggaccacttctcctgtactcctctgatgtgggcgtgtgccctagggcacttggaagctgccgtcgtgctgtacaagtgggaccgtcgggccatctcgattcccgactctctaggaaggctgcctttgggaattgccaggtcacggggtcatgtgaaattagcagagtgtctggagcacctgcagagagatgagcaggctcagctgggacagaaccccagaatccactgtcctgcaagcgaagagcccagcacagagagctggatggcccagtggcacagcgaagccatcagctctccagaaatacccaagggagtcactgttattgcaagcaccaacccagagctgagaagacctcgttctgaaccctctaattactacagcagtgagagccacaaagattatccggctcccaaaaagcataaattgaaccctgagtacttccagacaaggcaggagaagctgcttcccactgcactgagtctggaagagccaaatatcaggaagcaaagccctagttctaagcagtctgtccccgagacactcagccccagtgaaggagtgagggacttcagccgggaactctcccctcccactccagagactgcagcatttcaagcctctggatctcagcctgtaggaaagtggaattccaaagatctttacattggtgtgtctacagtacaggtgactggaaatccgaaggggaccagtgtaggaaaggaggcagcaccttcacaggtgcgtccacgggaaccaatgagtgtcctgatgatggctaacagagaggtggtgaatacagagctggggtcctaccgtgatagtgcagaaaatgaagaatgcggccagcccatggatgacatacaggtgaacatgatgaccttggcagaacacattattgaagccacacctgaccgaatcaagcaggagaattttgtgcccatggagtcctcaggattggaaagaacagaccctgccaccattagcagtacaatgagctggctggccagttatctagcggatgctgactgccttcccagtgctgcccagatccgaagtgcatataacgagcctctaaccccttcttctaataccagcttgagccctgttggctctcccgtcagtgaaatcgctttcgagaaacctaaccttccctccgccgcggattggtcagaattcctgagtgcatctaccagtgagaaggtagagaatgagtttgctcagctcactctgtctgatcatgaacagagagaactctatgaggctgccaggcttgtccagacagctttccggaaatacaagggccgacccttgcgggaacagcaagaagtagctgctgctgttattcagcgttgttacagaaaatataaacagggaaaaaatatatgtctgaagtacgcactttataaaaagatgacacaggctgccatccttatccagagcaaattccgaagttactatgaacaaaaaaaattccagcagagccgacgggctgctgtgctcatccaaaagtactaccgaagttataagaaatgtggcaaaagacggcaggctcgccggacggctgtgattgtacaacagaaactcaggagcagtttgctaaccaaaaagcaggatcaagctgctcgaaaaataatgaggtttcttcgccgctgtcgccacagagtgaaagaattgaaaaaggccaaggaacttgaagacatacagcagcatcccttagcaatgtgacattgcttttcagactgttttcatttctgtttttagcagagacatgcaacaacaacacacacgcacacacgcacacacacacacgtacacacacatacaaaatccctctgcagttttggggagatcagctgcaggattttaacaggaatgttttggtcattgcatttgcactttcatggacaacttttaatttgatcagcaagacatctt

SEQ ID NO: 337514 - DNA, 1911 bp, Artificial Sequence
  derived and/or modified sequence
atgatgagcagagcctgctgggccaagagcaagcacctgatccacagcaagaccttcagaggcatgaccctgctgcacctggccgccgcccagggctacgccaccctgatccagaccctgatcaagtggagaaccaagcacgccgacagcatcgacctggagctggaggtggaccccctgaacgtggaccacttcagctgcacccccctgatgtgggcctgcgccctgggccacctggaggccgccgtggtgctgtacaagtgggacagaagagccatcagcatccccgacagcctgggcagactgcccctgggcatcgccagaagcagaggccacgtgaagctggccgagtgcctggagcacctgcagagagacgagcaggcccagctgggccagaaccccagaatccactgccccgccagcgaggagcccagcaccgagagctggatggcccagtggcacagcgaggccatcagcagccccgagatccccaagggcgtgaccgtgatcgccagcaccaaccccgagctgagaagacccagaagcgagcccagcaactactacagcagcgagagccacaaggactaccccgcccccaagaagcacaagctgaaccccgagtacttccagaccagacaggagaagctgctgcccaccgccctgagcctggaggagcccaacatcagaaagcagagccccagcagcaagcagagcgtgcccgagaccctgagccccagcgagggcgtgagagacttcagcagagagctgagcccccccacccccgagaccgccgccttccaggccagcggcagccagcccgtgggcaagtggaacagcaaggacctgtacatcggcgtgagcaccgtgcaggtgaccggcaaccccaagggcaccagcgtgggcaaggaggccgcccccagccaggtgagacccagagagcccatgagcgtgctgatgatggccaacagagaggtggtgaacaccgagctgggcagctacagagacagcgccgagaacgaggagtgcggccagcccatggacgacatccaggtgaacatgatgaccctggccgagcacatcatcgaggccacccccgacagaatcaagcaggagaacttcgtgcccatggagagcagcggcctggagagaaccgaccccgccaccatcagcagcaccatgagctggctggccagctacctggccgacgccgactgcctgcccagcgccgcccagatcagaagcgcctacaacgagcccctgacccccagcagcaacaccagcctgagccccgtgggcagccccgtgagcgagatcgccttcgagaagcccaacctgcccagcgccgccgactggagcgagttcctgagcgccagcaccagcgagaaggtggagaacgagttcgcccagctgaccctgagcgaccacgagcagagagagctgtacgaggccgccagactggtgcagaccgccttcagaaagtacaagggcagacccctgagagagcagcaggaggtggccgccgccgtgatccagagatgctacagaaagtacaagcagggcaagaacatctgcctgaagtacgccctgtacaagaagatgacccaggccgccatcctgatccagagcaagttcagaagctactacgagcagaagaagttccagcagagcagaagagccgccgtgctgatccagaagtactacagaagctacaagaagtgcggcaagagaagacaggccagaagaaccgccgtgatcgtgcagcagaagctgagaagcagcctgctgaccaagaagcaggaccaggccgccagaaagatcatgagattcctgagaagatgcagacacagagtgaaggagctgaagaaggccaaggagctggaggacatccagcagcaccccctggccatgtag

SEQ ID NO: 337515 - protein, 87 aa, Artificial Sequence
  derived and/or modified sequence
MEESKTLKSENHEPKKNVICEESKAVQVIGNQTLKARNDKSVKEIENSSPNRNSSKKNKQNDICIEKTEVKSCKVNAANLPGPKDLG

SEQ ID NO: 337516 - DNA, 264 bp, Artificial Sequence
  derived and/or modified sequence
atggaggagagcaagaccctgaagagcgagaaccacgagcccaagaagaacgtgatctgcgaggagagcaaggccgtgcaggtgatcggcaaccagaccctgaaggccagaaacgacaagagcgtgaaggagatcgagaacagcagccccaacagaaacagcagcaagaagaacaagcagaacgacatctgcatcgagaagaccgaggtgaagagctgcaaggtgaacgccgccaacctgcccggccccaaggacctgggctag

SEQ ID NO: 337517 - DNA, 234 bp, Artificial Sequence
  derived and/or modified sequence
atggaggagagcaagaccctgaagagcgagaaccacgagcccaagaagaacgtgatctgcgaggagagcaaggccgtgcaggtgatcggcaaccagaccctgaaggccagaaacgacaagagcgtgaaggagatcgagaacagcagccccaacagaaacagcagcaagaagaacaagcagaacgacatctgcatcgagaagaccgaggtgaagagctgcaaggtgaacgcctag

SEQ ID NO: 337518 - DNA, 264 bp, Artificial Sequence
  derived and/or modified sequence
atggaggaatccaaaactctcaagtccgagaaccacgaaccaaagaagaacgtgatttgcgaagaaagtaaagcggtgcaggtgataggcaatcagacccttaaggccaggaatgataagagtgtgaaagagatagagaactcctcccccaatcgcaactcaagcaagaagaataagcagaatgacatctgtatcgaaaaaaccgaagtgaagagctgtaaagtaaacgcggctaacctgccaggccctaaggacctgggctag

SEQ ID NO: 337519 - DNA, 234 bp, Artificial Sequence
  derived and/or modified sequence
atggaggagtctaagaccctcaagtccgaaaatcatgagcccaaaaaaaatgtgatttgcgaggaatccaaggctgttcaagtcattgggaatcaaacactcaaagcgaggaacgacaagtccgtgaaggagattgagaactcttctccaaacagaaacagtagtaagaaaaacaagcagaacgatatttgcattgaaaagaccgaggtgaagtcatgcaaagtgaatgcatag

SEQ ID NO: 337520 - DNA, 264 bp, Artificial Sequence
  derived and/or modified sequence
atggaggagagcaagaccctgaagtctgagaaccacgagcccaagaagaatgtcatctgtgaggagagcaaggctgtgcaggtgattggcaaccagaccctgaaggccagaaatgacaagtctgtgaaggagattgagaacagcagccccaacagaaacagcagcaagaagaacaagcagaatgacatctgcatcgagaagacagaggtgaagagctgcaaggtgaatgctgccaacctgcccggccccaaggacctgggctag

SEQ ID NO: 337521 - DNA, 234 bp, Artificial Sequence
  derived and/or modified sequence
atggaggagagcaagaccctgaagtctgagaaccacgagcccaagaagaatgtcatctgtgaggagagcaaggctgtgcaggtgattggcaaccagaccctgaaggccagaaatgacaagtctgtgaaggagattgagaacagcagccccaacagaaacagcagcaagaagaacaagcagaatgacatctgcatcgagaagacagaggtgaagagctgcaaggtgaatgcctag

SEQ ID NO: 337522 - DNA, 264 bp, Artificial Sequence
  derived and/or modified sequence
atggaggagagcaagaccctgaagagcgagaaccacgagcccaagaaaaacgtgatctgcgaagaaagtaaggcagtccaggttattgggaatcaaacgttgaaagccagaaacgataagtctgtcaaggagatcgagaatagcagtcccaataggaacagttccaagaaaaacaaacagaacgatatatgcatcgagaagacagaggtcaagtcctgtaaggtaaatgccgctaatcttcctggacctaaagaccttgggtag

SEQ ID NO: 337523 - DNA, 234 bp, Artificial Sequence
  derived and/or modified sequence
atggaggagagcaagaccctgaagagcgagaaccacgagcccaagaaaaatgtaatttgtgaggagagcaaggcggttcaggtgatcgggaaccagacgctgaaagcacgtaacgataagtcggtgaaggagattgagaactcaagccccaacagaaatagctcgaagaaaaataagcaaaacgacatttgcatagagaaaactgaggtgaaaagttgcaaagtgaacgcatag

SEQ ID NO: 337524 - DNA, 264 bp, Artificial Sequence
  derived and/or modified sequence
atggaagagtctaaaaccctcaaatctgaaaaccacgagccaaagaagaatgtcatctgcgaagagagtaaggccgtccaagttatcgggaatcaaaccttgaaggcaaggaacgacaaatctgtgaaggaaattgaaaattcttccccaaacaggaactcctccaaaaagaataaacaaaacgatatttgcatcgagaagaccgaagtaaagtcttgcaaggtgaacgctgctaacctgcctgggcctaaggaccttgggtag

SEQ ID NO: 337525 - DNA, 234 bp, Artificial Sequence
  derived and/or modified sequence
atggaagagtccaagaccctgaaatctgagaaccacgagcccaaaaagaacgtgatttgtgaagagtctaaggccgttcaggtcattggtaaccagactctcaaggcacggaacgacaagagtgtcaaagaaatagagaatagctcccccaatcggaactctagtaaaaagaacaagcagaacgatatatgcatcgaaaaaacagaggtcaagtcctgtaaagtcaacgcctag

SEQ ID NO: 337526 - DNA, 883 bp, Artificial Sequence
  derived and/or modified sequence
ggcgcggcggacatggcggtggagtcctgagctagtcgtgtcccggcctccagcggcggcagcggcgacggcggcggcagcaggaggcggagggagagcaggagccactgagatgaggaggcgtcgcgcgcgcctgtagctcgcgggcctcgcagacagagtcttgctctgttgcctaggctggagtgcagtggcatgattgcagctcactgtagccttcacctcccaagtgcaagtgatcctcccacttcagcctcctgagactgggactacagagccagctgactatgcaacaagatgactatgcaacaagatgaatgaggagatatctacagcaggcttattgcttggaaatttcagaataccaaagcaaagagatcatcctagaagttttcttagagaaaaaaacagcctgaacgacagagcaagaccatgtctcaagaaagaagaagaagaaaaagattactcaaaatgaaaacctgtcaattttctgagcctgggactctccgggtacattgatctatattagtttgcttgcctaaactggacttgaagcaatttaaactactggagatctgccattttataatatcacaattggaaagaaacagattttcaaataatggaagagtctaaaaccttaaaaagtgaaaatcatgaaccaaagaagaatgttatttgtgaagaaagcaaagcagttcaagttataggtaatcaaacattgaaagctagaaatgataaatccgtaaaagaaattgagaacagctctccaaataggaatagtagtaaaaaaaataagcaaaatgatatttgtatagaaaaaacagaagttaaatcatgtaaagtaaatgctgccaaccttccaggtcctaaagatttgggg

SEQ ID NO: 337527 - DNA, 539 bp, Artificial Sequence
  derived and/or modified sequence
ccctcctcgcgagctaacgagtgtctctcgcgcgctcccttccctccgcgtgggtttcgcggcgcggcggacatggcggtggagtcctgagctagtcgtgtcccggcctccagcggcggcagcggcgacggcggcggcagcaggaggcggagggagagcaggagccactgagatgaggaggcgtcgcgcgcgcctgtagctcgcgggcctcgcagtttgcttgcctaaactggacttgaagcaatttaaactactggagatctgccattttataatatcacaattggaaagaaacagattttcaaataatggaagagtctaaaaccttaaaaagtgaaaatcatgaaccaaagaagaatgttatttgtgaagaaagcaaagcagttcaagttataggtaatcaaacattgaaagctagaaatgataaatccgtaaaagaaattgagaacagctctccaaataggaatagtagtaaaaaaaataagcaaaatgatatttgtatagaaaaaacagaagttaaatcatgtaaagtaaatgct

SEQ ID NO: 337528 - DNA, 639 bp, Artificial Sequence
  derived and/or modified sequence
atggtgagaaccatcaacctgtactacaacaacagaaccgtgcaggccatcgtggagctgaagaacaagcccgccagatggcacaaggccaagaaggtgcagctgacccccggccagaccgaggtgaagatcgacctgcccctgcccatcgtggccagcaacctgatgatcgagttcgccgacttctacgagaactaccaggccagcaccgagaccctgcagtgccccagatgcagcgccagcgtgcccgccaaccccggcgtgtgcggcaactgcggcgagaacgtgtaccagtgccacaagtgcagaagcatcaactacgacgagaaggaccccttcctgtgcaacgcctgcggcttctgcaagtacgccagattcgacttcatgctgtacgccaagccctgctgcgccgtggaccccatcgagaacgaggaggacagaaagaaggccgtgagcaacatcaacaccctgctggacaaggccgacagagtgtaccaccagctgatgggccacagaccccagctggagaacctgctgtgcaaggtgaacgaggccgcccccgagaagccccaggtggtgcccagatgcaagggccacctggacaagggcctgggcctggaccagaagaccgccagctag

SEQ ID NO: 337529 - DNA, 777 bp, Artificial Sequence
  derived and/or modified sequence
atgggccccggcaagaagggcagatgcagagaggagggccccggcagaggcagaagagcctggatcatcagaggcagcggcagcagcagacagggctgggtgggcagcgtggagagcagcaagagaagcgccaacgtgaccagacagagacagatcgagcagatcctgcccgccctggccgccggcagctgcttccaccccgccttcatcctgagctgcagattcagcagcagaaccagagccaccagcagagaggagaagaacctgcagggcttcctggagcagcccaaggagaagtgggtggagagcgccttcgaggtggacggcccctactacttcaccgtgctggccctgcacatcctgccccccgagcagtggagagccaccagagtggagatcctgagaagactgctggtgaccagccaggccagagccgtggcccccggcggcgccaccagactgaccgacaaggccgtgaaggactacagcgcctacagaagcagcctgctgttctgggccctggtggacctgatctacaacatgttcaagaaggtgcccaccagcaacaccgagggcggctggagctgcagcctggccgagtacatcagacacaacgacatgcccatctacgaggccgccgacaaggccctgaagaccttccaggaggagttcatgcccgtggagaccttcagcgagttcctggacgtggccggcctgctgagcgagatcaccgaccccgagagcttcctgaaggacctgctgaacagcgtgccctag

SEQ ID NO: 337530 - DNA, 639 bp, Artificial Sequence
  derived and/or modified sequence
atggtgaggacaatcaacctctattataacaatagaacggtccaggccatcgtcgagctgaagaacaagccagccagatggcataaagcgaagaaggtgcagttaacacccgggcagactgaagtgaaaatagatctgccgctcccgattgtggcaagtaatctcatgattgagttcgcagatttctatgagaactatcaggcatccaccgaaacactccagtgtcctaggtgctccgccagcgtaccagccaatccaggcgtttgcgggaattgcggggagaatgtgtatcagtgtcacaagtgccgaagcataaattacgatgagaaggacccttttctgtgcaatgcctgtgggttttgcaaatatgccaggtttgactttatgctctacgcaaaaccttgttgcgctgtggatcctattgagaatgaggaagaccgtaagaaggccgtgtccaacataaacacactgctggataaggccgacagggtgtaccaccagctgatgggacaccgtccacagctggagaatctactctgtaaggtgaatgaggctgccccagagaaaccccaggttgttcccaggtgcaaaggacacctggataaaggtctaggactcgatcagaagaccgcaagctag

SEQ ID NO: 337531 - DNA, 777 bp, Artificial Sequence
  derived and/or modified sequence
atgggcccaggcaagaagggtcgatgtagggaggaaggtcctggccgtggcagaagggcgtggatcataagaggctctggatccagccgccaaggatgggttggctccgtagagtccagcaagaggtctgccaacgtcacccgacagagacagatcgaacagatattaccagccctggccgctggatcttgctttcacccagcttttatattatcctgcagattctcttcaaggacccgcgctaccagccgggaagaaaaaaatctacaaggcttcttggaacagccaaaggagaagtgggtggagtcggctttcgaggtggatggcccctattattttactgtgttagctcttcatatcctgcctccggagcagtggcgcgctacaagagtggagatattacgccggctgctggtaacatcgcaggccagagccgtagcaccgggcggtgccacaaggttaacagacaaagccgtgaaggattactctgcatatcgttctagcttgcttttttgggctctggtggacctcatctacaatatgtttaagaaggtacccacatcaaataccgaggggggatggagctgttctctggcggaatacatacgccacaacgacatgcctatttatgaagcagccgataaagctctgaaaacctttcaggaggagtttatgccagtggaaacgttctcagagttcttagatgtcgctggccttctatccgagattacggatccggaaagcttcctgaaggatcttctgaacagcgtcccttag

SEQ ID NO: 337532 - DNA, 639 bp, Artificial Sequence
  derived and/or modified sequence
atggtgaggaccatcaacctgtactacaacaacagaacagtgcaggccatcgtggagctgaagaacaagccagcccgctggcacaaggccaagaaggtgcagctgaccccaggccagacagaggtgaagattgacctgcccctgcccatcgtggccagcaacctgatgattgaatttgctgacttctatgagaactaccaggccagcacagagaccctgcagtgcccccgctgcagcgcctctgtgcctgccaaccctggggtgtgtggcaactgtggggagaatgtgtaccagtgccacaagtgccgcagcatcaactatgatgagaaggaccccttcctgtgcaatgcctgtggcttctgcaagtatgccaggtttgacttcatgctgtatgccaagccctgctgtgctgtggaccccattgaaaatgaggaggacaggaagaaggctgtgagcaacatcaacaccctgctggacaaggctgacagagtgtaccaccagctgatgggccaccggccccagctggagaacctgctgtgcaaggtgaatgaagctgcccctgagaagccccaggtggtgccccgctgcaagggccacctggacaagggcctgggcctggaccagaagacagccagctag

SEQ ID NO: 337533 - DNA, 777 bp, Artificial Sequence
  derived and/or modified sequence
atgggccctgggaagaagggccgctgccgggaggagggccctggccggggccggcgggcctggatcatccggggcagcggcagcagccggcagggctgggtgggctctgtggagagcagcaagaggtctgccaacgtgacccggcagaggcagatcgagcagatcctgcctgccctggccgccggcagctgcttccacccagccttcatcctgagctgccgcttcagcagcaggacccgggccaccagccgggaggagaagaacctgcagggcttcctggagcagcccaaggagaagtgggtggagagcgcctttgaggtggatggcccctactacttcaccgtgctggccctgcacatcctgcccccagagcagtggagggccaccagggtggagatcctgcggcggctgctggtgaccagccaggcccgggctgtggcccctgggggcgccacccggctgacagacaaggctgtgaaggactacagcgcctaccgcagcagcctgctcttctgggccctggtggacctgatctacaacatgttcaagaaggtgcccaccagcaacacagagggcggctggagctgcagcctggccgagtacatccgccacaatgacatgcccatctatgaggccgctgacaaggccctgaagaccttccaggaggagttcatgcctgtggagaccttcagcgagttcctggatgtggccggcctgctgtctgagatcacagatcctgagagcttcctgaaggacctgctgaacagcgtgccctag

SEQ ID NO: 337534 - DNA, 639 bp, Artificial Sequence
  derived and/or modified sequence
atggtgcggaccatcaacctgtactacaacaaccggaccgtgcaggccattgttgaactcaagaataaacccgctcggtggcataaagccaagaaggttcaactgaccccggggcagacagaggtcaagattgaccttcccctccccatagtagcctcaaatctcatgatagagttcgccgatttctatgagaattatcaggcctccactgaaactctgcagtgcccacgttgctccgcctcagtccccgccaacccgggcgtgtgtggcaattgcggcgaaaacgtttatcagtgccacaaatgcagaagtatcaactacgacgagaaggacccctttctgtgcaatgcctgtggcttttgcaagtacgcccgtttcgactttatgctctacgccaaaccttgctgcgcagtggatcccatcgagaacgaagaggataggaaaaaggccgtctccaacatcaacaccttgttagataaagcagacagggtctatcaccagcttatgggccatcggccccagctcgagaacctgctatgcaaagtgaatgaggccgctccagagaaaccgcaggttgtccctcgatgcaaaggtcatctagataaggggcttggcctggaccaaaaaacggcctcgtag

SEQ ID NO: 337535 - DNA, 777 bp, Artificial Sequence
  derived and/or modified sequence
atgggccccggcaagaagggccggtgccgggaggagggccccggccgcggtcgtcgtgcatggataatccgagggagtggctctagtcggcaagggtgggttggcagcgttgagagttccaaacgttctgcgaatgtcacaaggcagaggcagatcgagcagattttaccagcgctggctgcaggaagctgtttccatcccgcctttatcctgtcgtgcagatttagctctcgcactagagccacatcccgcgaggagaaaaacttgcagggctttcttgagcagcctaaagaaaagtgggtggaaagcgcttttgaggttgatggtccatattactttactgtgctggccctccatatcctgccccccgagcaatggcgtgccacgcgggtcgagatcttgcgacgtctgctagtcactagccaggctcgcgccgtagccccggggggggccactagacttaccgacaaagcggtgaaggattacagcgcctatcgctcatccctcttattctgggcactggtcgacctaatctacaacatgttcaagaaagtgccaacttccaataccgagggcggatggtcctgcagtctagccgaatatatccgccacaatgacatgcctatatacgaagctgcggataaagctctgaaaacctttcaggaggagttcatgccggtggaaaccttctccgagttcctcgacgttgccggcctgttgagtgaaattaccgaccccgagtccttcctcaaagacctcttaaatagcgttccatag

SEQ ID NO: 337536 - DNA, 639 bp, Artificial Sequence
  derived and/or modified sequence
atggtcaggaccattaacctgtattacaacaaccggaccgtgcaagccatagtggagctgaagaacaagcccgctcgatggcacaaggccaagaaagtgcagctcacccccggacaaactgaagtgaaaattgatctgcccctacctatagtggcatcgaacttaatgattgagttcgcagatttctacgaaaattatcaagcctcaactgagaccctgcagtgtcccagatgctccgcctctgtaccggctaaccctggggtttgcggtaactgtggtgagaacgtgtaccagtgccacaagtgtagatctattaactacgatgagaaagatccttttctgtgcaatgcctgtggattctgcaagtatgcgagattcgattttatgttgtatgcaaaaccctgttgtgctgtggaccccattgaaaatgaggaagaccgcaaaaaggcagtgtctaacatcaacacacttcttgacaaggccgatagagtataccaccagctcatgggtcatcggcctcagttggagaacctgctgtgcaaggtgaatgaagcagcgcctgaaaaaccccaagtggtaccacggtgcaaaggacacctggacaaagggctcggcctcgaccagaaaacggcgtcctag

SEQ ID NO: 337537 - DNA, 777 bp, Artificial Sequence
  derived and/or modified sequence
atgggtcccggaaagaagggcagatgtcgggaggagggcccaggtagggggcgaagagcatggatcataaggggctccggctcctctaggcaggggtgggtcggatctgtggaatcatcgaaaagatccgccaatgtgaccaggcaacgtcagatcgagcagattctgcccgcacttgctgctgggtcctgttttcaccctgcattcatcttgagctgtcgatttagtagccgcactcgtgctacctccagagaagaaaagaatctgcagggatttttagagcagcctaaagagaaatgggtggagtccgcctttgaggtagacggaccctactactttactgtcctcgcactccatattctccctcctgaacaatggagagctacccgggttgagattctgcggaggctcctggttacatcacaggctcgggctgttgcccctggaggggctacccgtcttaccgataaggcagttaaagactattcagcatacaggagctctctgctgttttgggccctggtggacttaatttacaatatgtttaagaaggtcccgacctcaaatacggaggggggttggtcctgctccttggccgaatatatcagacacaacgacatgccaatttacgaagccgctgacaaggctcttaagacatttcaagaggagtttatgcccgttgaaaccttctcggagtttctggatgttgccggtttattgtcagaaataaccgacccagaatcttttctgaaggacctattgaacagtgttccttag

SEQ ID NO: 337538 - DNA, 4031 bp, Artificial Sequence
  derived and/or modified sequence
cctgtgggaagctcagtcagcattctgaggagttatttgcatggtgataggctcttacataggaattgacaagcgcctgagagaagagcgaatctgcctagttgagattccaatcccctccatgtaggccagggtcttgcaaatagaaggtactcaaaatgtcattgctgagttcagggtttggtgagtagtaatgtagaaaggtctgtatagcctgggcaacatagtgagacttcatctcttaaaaaaaaatttaaaaaagttagccaggcgtggtggcgtgtacctgtggtcccagctgctggggaggctgaggcaggaggatggcttggggccagaagttcgagggtgcaatgaactgtgatccacgccactgcactccagcctgggtgacagagtgagaccctgtctcaaaaaaaaaaaaaaaaaaaggtctttagtttcaagggtttaagttaaataaggtgaaacaaatttaaagaaaatgtcttcctttttttaaaaaaacttctaaaagaggatattggttaaattgacagtttattatttctctggtttagtagtgactgttctttaaaaaaaatttaaaaaaactttattgagataatttatgtattaacctattttaaatgtacagttcaatgatttttagtaaatttaattgtgactcttgagtcaaattttactactttttagaattcctctgaaggatagatcaaagattaggaaacatctaaggtcagttagttgaaatttctttcctgtggcttcgtaaccctattgggatttctcctgtgtccttgagttctcactagggtggggctcactttgggctcactttggctcacattgagccatggctttgtcatgatttttttgtgaaactcagtgcttcctaagatgaaaatgtgttcatgctaagactggtttcttccttagcactttgtctggcttagtggagtttgatggctattacctggagagcgatccctgcctggtgtgtaataacccggaagtaccgttctgttatatcaagctgtcttccattaaagtggacacgcggtacaccaccacccagcaggttgtgaagctcattggcagtcacaccatcagcaaagtgacagtgaaaatcggggatctgaaacggaccaagatggtgcggaccatcaacctgtattataacaaccgaaccgtgcaggccatcgtggagttgaaaaacaagccagctcgctggcacaaagccaagaaggttcagctgacccctggacagacagaggtgaagattgacctgccgttgcccattgtggcctccaatctgatgattgagtttgcagacttctatgaaaactaccaggcctccacagagaccctgcagtgccctcgctgtagtgcctcggtccctgccaacccaggagtctgtggcaactgtggagagaatgtgtaccagtgtcacaaatgcagatccatcaactacgatgaaaaggatcccttcctctgcaatgcctgtggcttctgtaaatatgcccgcttcgacttcatgctctatgccaagccttgctgtgcagtggatcccattgagaatgaagaagaccggaagaaggctgtatccaacatcaatacacttttggacaaagctgatcgagtgtatcatcagctgatgggacaccggccacagctggagaacctgctctgcaaagtgaatgaggcagctccagaaaagccacaggtagtcccacgctgcaaagggcatttggataagggcttgggtcttgatcagaagactgcctcctaggtgagatcaccttaggtggggagcctgacagcttacctcttggggttgcaggatgactcaggaacagcagggggcatcagctccacttctgccagtgtgaatcgttacatcctgcagttggctcaggagtattgtggagactgcaagaactcttttgatgaactctccaaaatcatccaggtagagagcggggagcagcttttgggtgtgttttgtccaagtgttactggtgttgttttcacagcagtcctgctgctctctcatctagcagtccaggtcttggtgttgtccctgcccaatctagctgaaaaggcaggcagatggctgcaccaaacggcatctcccccaccgtgatttatggcgctggtcagaatgctgagttcatgctagataactgaacatactggtgatgggaaggtaacacagataagggttttttttagccattaacaacccatctcttagtagaggggttactggtcttaaaaaatttgatgccaagattctgttccctcttctgataacgccgtgtttgcaggctgtagggtaagggcataccaactgcaatcaaccagggtgggccttgtgtcagttgcaatgtcacagacctaatctccatgagatgggaggctggccatagacagaggtacctcatataaggagagcatccagtttaccttccccctcaaccccaaattgctggagtgccatctttgctacacgtgtattagcttctgacctttgtctttgttacatgggagttaagagcataagcctgccatctgagtctgagttctgactctgccacttatcttggtcaagccactttctccaagcttcagtttccttctctgtaaaatggagataaagcatctaaccagttgggttattgagaagattaagttatataatgcatgtaaagttttttctaaagcaaaactaattttctaattaacatcctcttcttattttaattgctaattcccattattgttgcctttttgttcttagaaagtctttgcttcgcgcaaagagttgttggaatatgacctacagcagagggaagcagccactaaatcatcccggacctccgtgcagcccacattcactgccagccagtaccgtgccttatccgtcctgggctgtggccacacatcctccaccaagtgctatggctgcgcctcggctgtcacagaacattgtatcacactacttcgggccctggccaccaacccagccttgaggcacatccttgtctcccagggccttatccgggagctctttgattataatcttcgccgaggggctgcggccatgcgggaggaggtccgccagctcatgtgcctcctaactcggtcagtacctacaccatggttatgggcctagtggttcctactgacactggcagccatgccaggagcgttagagagtgcacagaatagtgcttctgaccacccagcaagttaggtagcttataacaaaggaaagatggaaagagacacagggtgtaggtgagcgagcttggggagcattgaaacccaggtttccttgtaaatggcatgattggcttgtgcttttttggttccagtacagtgtcttgaggaaactctccctgaggccttgtgagggaagggaagggagacacttgaactcgagaaagactcacatgaaagaagcagagcagtggggcctggagattaagagcttggactctggattggaaaggctcagtttcagtatctgataccttgtactatacgccttggacagattccttaatttctctgagtctgtgttttcctcatctgaaaaatactgacagtaggctgggcacagtggctcttgcccgtaatcccagcactttggcacctgaggctggcagatcacttgaggtcaggagttcaagaccagcctggccaacatggtaaaacctcgtctccattaaaaatacaaaaatagggccaggtgctgtggctcatgcctgtaatcccagcactttggcaggccaaggcgggtggatcacctgaggtcgggagttcaagaccagcctgaccaacatggagaaaccccatctccactgaaaatacaaaattagacaggtgtagtggtgcatgcctgtaatctcagctacttgggaggctgagacaggagaatcgcttgaacctgggaggcggagattgtggtgagtcgaaatcgtgccattgcactccagcctgggcaacaagcgagactccgtctc

SEQ ID NO: 337539 - DNA, 1533 bp, Artificial Sequence
  derived and/or modified sequence
cactgagtctggtgtggtcatcatcatcatcatcattgcaacttaggacgcatgaggacaagaagcagcgctcatctggaagaggctgttctaacgaaggcgggaggatcctagatcagaagaagacaaaccggaagagggagcctaggaaaggaaccacatgcacatttagtgcaaaccatgtaaacataacataacaagactatgtggagcaagggggagtcaggctgtggacccaccagggaatcttgattcatgtttttggccccatcactcactagcttgctgactttgggcaagtcacttcacttttctgggcctctggagttactagcacagttccatgttggggagattgtgaacgtccctgatatatggtgctcaggaaccagtagttgcttggaattgtattagagctggggtaggagctagacatggggccagggaagaagggaagatgccgcgaagaagggcctggaaggggacgaagggcgtggattatcagaggaagtgggagtagtcggcaaggatgggtggggagtgttgagtcatccaagcgttcagcaaatgtcacaagacaacgacaaattgagcaaattcttcctgctcttgctgccgggtcctgcttccaccctgcttttattttatcatgccgcttttcttctagaacccgagcaacttcccgagaagagaagaacctccaaggctttctggaacagcccaaggagaagtgggtggagagtgcctttgaagtggacgggccctactatttcacagtcttggcccttcacatcctgccccctgagcagtggagagccacacgtgtggaaatcttgcggaggctgttggtgacctcgcaggctcgggcagtggctccaggtggagccaccaggctgacagataaggcagtgaaggactattccgcttaccgttcttcccttctcttttgggccctcgtcgatctcatttacaacatgtttaagaaggtgcctaccagtaacacagagggaggctggtcctgctctctcgctgagtacatccgccacaacgacatgcccatctacgaagctgccgacaaagccctgaaaaccttccaggaggagttcatgccagtggagaccttctcagagttcctcgatgtggccggtcttttatcagaaatcaccgatccagagagcttcctgaaggacctgttgaactcagtcccctgaccaccacacagcagctgcggcggcgaagacgaagctggcttgccttccaccctctgttctccctccttgtgcattaagttccctccgcgggatgctgcattgttaccccgccctcccctctctcatttttcttggtgtggcttggggtttttaggcttcctgttttatctcgtgtgtgtggtgcaccagctatgaggttgtctgtaacccaagccatcaaagggcctgtacatacctaggagccatgagttgtcccggccagcttcatacttgagtgtgcacatcttgagaaataaacaagtgacttaacacacattgaaaa

SEQ ID NO: 337540 - DNA, 84 bp, Artificial Sequence
  derived and/or modified sequence
gtgccccccctgcacagcagcctgggcgaccgggcccggttcctgcggccgtgcctgaagaaaaagactaagaaaaagcgctag

SEQ ID NO: 337541 - protein, 1672 aa, Artificial Sequence
  derived and/or modified sequence
RFLSTMKQNALQGVVPSETEDLNVEHLQMLLLIFHNFTETGRRAILSLFVQIIQELSVNMDAQMRFVPLILARLLLIFDYLLHQYSKAPVYLFEQVQHNLLSPPFGWASGSQDSNSRRATTPLYHGFKEVEENWSKHFSSDAVPHPRFYCVLSPEASEDDLNRLDSVACDVLFSKLVKYDELYAALTALLAAGSQLDTVRRKENKNVTALEACALQYYFLILWRILGILPPSKTYINQLSMNSPEMSECDILHTLRWSSRLRISSYVNWIKDHLIKQGMKAEHASSLLELASTTKCSSVKYDVEIVEEYFARQISSFCSIDCTTILQLHEIPSLQSIYTLDAAISKVQVSLDEHFSKMAAETDPHKSSEITKNLLPATLQLIDTYASFTRAYLLQNFNEEGTTEKPSKEKLQGFAAVLAIGSSRCKANTLGPTLVQNLPSSVQTVCESWNNINTNEFPNIGSWRNAFANDTIPSESYISAVQAAHLGTLCSQSLPLAASLKHTLLSLVRLTGDLIVWSDEMNPPQVIRTLLPLLLESSTESVAEISSNSLERILGPAESDEFLARVYEKLITGCYNILANHADPNSGLDESILEECLQYLEKQLESSQARKAMEEFFSDSGELVQIMMATANENLSAKFCNRVLKFFTKLFQLTEKSPNPSLLHLCGSLAQLACVEPVRLQAWLTRMTTSPPKDSDQLDVIQENRQLLQLLTTYIVRENSQVGEGVCAVLLGTLTPMATEMLANGDGTGFPELMVVMATLASAGQGAGHLQLHNAAVDWLSRCKKYLSQKNVVEKLNANVMHGKHVMILECTCHIMSYLADVTNALSQSNGQGPSHLSVDGEERAIEVDSDWVEELAVEEEDSQAEDSDEDSLCNKLCTFTITQKEFMNQHWYHCHTCKMVDGVGVCTVCAKVCHKDHEISYAKYGSFFCDCGAKEDGSCLALVKRTPSSGMSSTMKESAFQSEPRISESLVRHASTSSPADKAKVTISDGKVADEEKPKKSSLCRTVEGCREELQNQANFSFAPLVLDMLNFLMDAIQTNFQQASAVGSSSRAQQALSELHTVEKAVEMTDQLMVPTLGSQEGAFENVRMNYSGDQGQTIRQLISAHVLRRVAMCVLSSPHGRRQHLAVSHEKGKITVLQLSALLKQADSSKRKLTLTRLASAPVPFTVLSLTGNPCKEDYLAVCGLKDCHVLTFSSSGSVSDHLVLHPQLATGNFIIKAVWLPGSQTELAIVTADFVKIYDLCVDALSPTFYFLLPSSKIRDVTFLFNEEGKNIIVIMSSAGYIYTQLMEEASSAQQGPFYVTNVLEINHEDLKQDSNSQVAGGGVSVYYSHVLQMLFFSYCQGKSFAATISRTTLEVLQLFPINIKSSNGGSKTSPALCQWSEVMNHPGLVCCVQQTTGVPLVVMVKPDTFLIQEIKTLPAKAKIQDMVAIRHTACNEQQRTTMILLCEDGSLRIYMANVENTSYWLQPSLQPSSVISIMKPVRKRKTATITTRTSSQVTFPIDFFEHNQQLTDVEFGGNDLLQVYNAQQIKHRLNSTGMYVANTKPGGFTIEISNNNSTMVMTGMRIQIGTQAIERAPSYIEIFGRTMQLNLSRSRWFDFPFTREEALQADKKLNLFSESPTPGADSVLIVTAKLGATGLWLSNILGSLHSADFSVLSSGNFELHLMY

SEQ ID NO: 337542 - DNA, 5019 bp, Artificial Sequence
  derived and/or modified sequence
agattcctgagcaccatgaagcagaacgccctgcagggcgtggtgcccagcgagaccgaggacctgaacgtggagcacctgcagatgctgctgctgatcttccacaacttcaccgagaccggcagaagagccatcctgagcctgttcgtgcagatcatccaggagctgagcgtgaacatggacgcccagatgagattcgtgcccctgatcctggccagactgctgctgatcttcgactacctgctgcaccagtacagcaaggcccccgtgtacctgttcgagcaggtgcagcacaacctgctgagcccccccttcggctgggccagcggcagccaggacagcaacagcagaagagccaccacccccctgtaccacggcttcaaggaggtggaggagaactggagcaagcacttcagcagcgacgccgtgccccaccccagattctactgcgtgctgagccccgaggccagcgaggacgacctgaacagactggacagcgtggcctgcgacgtgctgttcagcaagctggtgaagtacgacgagctgtacgccgccctgaccgccctgctggccgccggcagccagctggacaccgtgagaagaaaggagaacaagaacgtgaccgccctggaggcctgcgccctgcagtactacttcctgatcctgtggagaatcctgggcatcctgccccccagcaagacctacatcaaccagctgagcatgaacagccccgagatgagcgagtgcgacatcctgcacaccctgagatggagcagcagactgagaatcagcagctacgtgaactggatcaaggaccacctgatcaagcagggcatgaaggccgagcacgccagcagcctgctggagctggccagcaccaccaagtgcagcagcgtgaagtacgacgtggagatcgtggaggagtacttcgccagacagatcagcagcttctgcagcatcgactgcaccaccatcctgcagctgcacgagatccccagcctgcagagcatctacaccctggacgccgccatcagcaaggtgcaggtgagcctggacgagcacttcagcaagatggccgccgagaccgacccccacaagagcagcgagatcaccaagaacctgctgcccgccaccctgcagctgatcgacacctacgccagcttcaccagagcctacctgctgcagaacttcaacgaggagggcaccaccgagaagcccagcaaggagaagctgcagggcttcgccgccgtgctggccatcggcagcagcagatgcaaggccaacaccctgggccccaccctggtgcagaacctgcccagcagcgtgcagaccgtgtgcgagagctggaacaacatcaacaccaacgagttccccaacatcggcagctggagaaacgccttcgccaacgacaccatccccagcgagagctacatcagcgccgtgcaggccgcccacctgggcaccctgtgcagccagagcctgcccctggccgccagcctgaagcacaccctgctgagcctggtgagactgaccggcgacctgatcgtgtggagcgacgagatgaaccccccccaggtgatcagaaccctgctgcccctgctgctggagagcagcaccgagagcgtggccgagatcagcagcaacagcctggagagaatcctgggccccgccgagagcgacgagttcctggccagagtgtacgagaagctgatcaccggctgctacaacatcctggccaaccacgccgaccccaacagcggcctggacgagagcatcctggaggagtgcctgcagtacctggagaagcagctggagagcagccaggccagaaaggccatggaggagttcttcagcgacagcggcgagctggtgcagatcatgatggccaccgccaacgagaacctgagcgccaagttctgcaacagagtgctgaagttcttcaccaagctgttccagctgaccgagaagagccccaaccccagcctgctgcacctgtgcggcagcctggcccagctggcctgcgtggagcccgtgagactgcaggcctggctgaccagaatgaccaccagcccccccaaggacagcgaccagctggacgtgatccaggagaacagacagctgctgcagctgctgaccacctacatcgtgagagagaacagccaggtgggcgagggcgtgtgcgccgtgctgctgggcaccctgacccccatggccaccgagatgctggccaacggcgacggcaccggcttccccgagctgatggtggtgatggccaccctggccagcgccggccagggcgccggccacctgcagctgcacaacgccgccgtggactggctgagcagatgcaagaagtacctgagccagaagaacgtggtggagaagctgaacgccaacgtgatgcacggcaagcacgtgatgatcctggagtgcacctgccacatcatgagctacctggccgacgtgaccaacgccctgagccagagcaacggccagggccccagccacctgagcgtggacggcgaggagagagccatcgaggtggacagcgactgggtggaggagctggccgtggaggaggaggacagccaggccgaggacagcgacgaggacagcctgtgcaacaagctgtgcaccttcaccatcacccagaaggagttcatgaaccagcactggtaccactgccacacctgcaagatggtggacggcgtgggcgtgtgcaccgtgtgcgccaaggtgtgccacaaggaccacgagatcagctacgccaagtacggcagcttcttctgcgactgcggcgccaaggaggacggcagctgcctggccctggtgaagagaacccccagcagcggcatgagcagcaccatgaaggagagcgccttccagagcgagcccagaatcagcgagagcctggtgagacacgccagcaccagcagccccgccgacaaggccaaggtgaccatcagcgacggcaaggtggccgacgaggagaagcccaagaagagcagcctgtgcagaaccgtggagggctgcagagaggagctgcagaaccaggccaacttcagcttcgcccccctggtgctggacatgctgaacttcctgatggacgccatccagaccaacttccagcaggccagcgccgtgggcagcagcagcagagcccagcaggccctgagcgagctgcacaccgtggagaaggccgtggagatgaccgaccagctgatggtgcccaccctgggcagccaggagggcgccttcgagaacgtgagaatgaactacagcggcgaccagggccagaccatcagacagctgatcagcgcccacgtgctgagaagagtggccatgtgcgtgctgagcagcccccacggcagaagacagcacctggccgtgagccacgagaagggcaagatcaccgtgctgcagctgagcgccctgctgaagcaggccgacagcagcaagagaaagctgaccctgaccagactggccagcgcccccgtgcccttcaccgtgctgagcctgaccggcaacccctgcaaggaggactacctggccgtgtgcggcctgaaggactgccacgtgctgaccttcagcagcagcggcagcgtgagcgaccacctggtgctgcacccccagctggccaccggcaacttcatcatcaaggccgtgtggctgcccggcagccagaccgagctggccatcgtgaccgccgacttcgtgaagatctacgacctgtgcgtggacgccctgagccccaccttctacttcctgctgcccagcagcaagatcagagacgtgaccttcctgttcaacgaggagggcaagaacatcatcgtgatcatgagcagcgccggctacatctacacccagctgatggaggaggccagcagcgcccagcagggccccttctacgtgaccaacgtgctggagatcaaccacgaggacctgaagcaggacagcaacagccaggtggccggcggcggcgtgagcgtgtactacagccacgtgctgcagatgctgttcttcagctactgccagggcaagagcttcgccgccaccatcagcagaaccaccctggaggtgctgcagctgttccccatcaacatcaagagcagcaacggcggcagcaagaccagccccgccctgtgccagtggagcgaggtgatgaaccaccccggcctggtgtgctgcgtgcagcagaccaccggcgtgcccctggtggtgatggtgaagcccgacaccttcctgatccaggagatcaagaccctgcccgccaaggccaagatccaggacatggtggccatcagacacaccgcctgcaacgagcagcagagaaccaccatgatcctgctgtgcgaggacggcagcctgagaatctacatggccaacgtggagaacaccagctactggctgcagcccagcctgcagcccagcagcgtgatcagcatcatgaagcccgtgagaaagagaaagaccgccaccatcaccaccagaaccagcagccaggtgaccttccccatcgacttcttcgagcacaaccagcagctgaccgacgtggagttcggcggcaacgacctgctgcaggtgtacaacgcccagcagatcaagcacagactgaacagcaccggcatgtacgtggccaacaccaagcccggcggcttcaccatcgagatcagcaacaacaacagcaccatggtgatgaccggcatgagaatccagatcggcacccaggccatcgagagagcccccagctacatcgagatcttcggcagaaccatgcagctgaacctgagcagaagcagatggttcgacttccccttcaccagagaggaggccctgcaggccgacaagaagctgaacctgttcagcgagagccccacccccggcgccgacagcgtgctgatcgtgaccgccaagctgggcgccaccggcctgtggctgagcaacatcctgggcagcctgcacagcgccgacttcagcgtgctgagcagcggcaacttcgagctgcacctgatgtactag

SEQ ID NO: 337543 - DNA, 5019 bp, Artificial Sequence
  derived and/or modified sequence
agattcctgagtactatgaagcagaatgccctacagggtgtggtgccaagtgagactgaggatctcaacgtggaacacctccaaatgctgcttctcatctttcacaacttcactgagaccggccggcgagctatcctaagcctcttcgtacaaatcatccaggagctcagcgtgaacatggacgctcagatgcgatttgtaccactgatccttgcacgcctcttgcttattttcgactacttgctccaccagtattctaaggctcccgtctacctattcgaacaggtccagcataaccttctttctcctcccttcggctgggcctccggttcccaggattcgaattctcgcagagctactaccccgctgtaccatggcttcaaagaggttgaggagaattggtctaagcacttctcttcagacgcggtccctcacccgaggttctattgtgtgttgtctccagaggccagtgaggatgatctgaaccgcctggacagcgtggcatgcgacgtgttgttctccaagctggtgaagtatgacgaactgtacgcagccctcacagccctgttagcagctgggtcccagcttgacacagtacggcgtaaggagaataagaatgtcacagcactggaggcttgcgccctccagtattactttctgatcctgtggcgaatcttaggcatccttccaccgtcaaagacatacattaaccagctaagtatgaatagtccagaaatgtctgagtgtgatatacttcacactttgcgctggtcaagccgcctgcggatctcatcctacgtgaactggattaaggaccaccttattaaacagggcatgaaagcagagcatgcgtcatccttactggagctggctagtactaccaagtgttcgagcgttaagtatgacgttgaaattgtggaggagtattttgccaggcaaatctccagcttttgctccatcgactgcactaccatcttgcaattgcatgagatccccagtctgcagtctatttacactctggacgcagcgatttctaaggtgcaggtgagtctagacgaacatttttccaagatggcagccgaaaccgatccgcataaaagttccgagattaccaaaaatctcctacccgcaactcttcagctgattgacacatacgcctcattcactcgggcatacctgctacagaattttaatgaggaaggtaccaccgaaaagccgagcaaggagaaactgcagggttttgccgccgtgctggcaatcgggtccagccgctgtaaagctaatacactcgggcccacacttgtgcagaatttaccatccagtgtgcaaaccgtgtgtgagtcatggaacaatataaacaccaacgagttccccaacatcggaagctggcgaaacgcttttgcaaacgatactatacctagtgaatcctacatctccgcggtgcaggccgcccacctcggcacgctttgttctcagtcattgccactcgctgcttctctaaaacataccttgttgtccctggtgcgcttaaccggcgatttaatcgtgtggtctgatgagatgaaccccccacaggtaattaggactctccttccactcttgcttgagtcttccacggagtcagtggcagaaatcagttcaaactccctggagagaatcctagggccagccgagtctgacgaatttctggctagggtatacgagaaactgatcacaggctgttacaacattcttgcaaatcatgccgaccctaactccggcctggacgaaagcatactggaagaatgcctccagtatttggagaaacagctcgagtcttcccaggcccgaaaggcgatggaagaattctttagcgacagcggcgaattagttcagataatgatggccactgcgaacgagaacctgtcggccaagttctgcaatagagtcctgaagttttttaccaagctcttccagcttactgagaagtctcccaatccctctctgctgcatttgtgtgggtcactggctcagttagcctgtgtcgagccagtcagactgcaggcttggttgaccagaatgacgacctcacccccaaaggattccgaccagctcgacgtcatacaggaaaataggcaacttttgcaactcctaacgacttacatcgtgagagaaaactctcaggttggtgaaggcgtatgcgcagtgttgctgggaacgcttactccaatggccactgagatgttagcaaacggagatggaacagggtttcccgagttgatggtagtcatggccactctggccagcgccggacagggcgccggccacctgcagctccacaacgcagccgtggactggctttctagatgcaagaagtacctgagccaaaaaaatgtagtggaaaaacttaacgccaacgtcatgcacggcaagcatgtcatgattttagagtgcacgtgtcacatcatgtcctacctagcagacgtgaccaatgccctgagccaaagtaatggccagggaccctcccacctctcagtggacggggaagagcgggccatcgaagtcgacagcgactgggttgaggaacttgctgtggaggaggaagactcacaggccgaagacagcgacgaggacagcttatgtaataaactttgcactttcaccatcactcaaaaggagttcatgaaccagcactggtaccactgccatacatgtaaaatggtggacggggttggagtatgcaccgtttgtgccaaagtatgtcacaaagatcatgagatcagctacgccaagtacggatcattcttctgtgattgcggggccaaggaagatggctcctgcctggcgctggtgaaacggacaccttccagcgggatgagctcgaccatgaaagaatcagcatttcagtctgaacccagaattagtgagtctttggttagacacgcatccacatcctcacccgctgataaggcaaaagtgacaatatcagatggaaaagtcgccgacgaggagaaaccgaagaaatcgagcctctgccgaaccgttgaaggatgtagggaggagctgcagaaccaggccaactttagtttcgcccccctcgtactagacatgttaaatttcttgatggacgccatccagactaacttccagcaggctagcgccgtgggatcaagctcccgagcacagcaggccttgagcgagcttcacacggtcgagaaagctgtagaaatgaccgatcagctaatggtccctaccctcgggtcccaggagggggcttttgagaatgtgcgcatgaattacagtggggaccagggacagaccattagacagcttatttctgcccacgtgctgagacgcgtggctatgtgtgtgctgtcctcccctcatggccggagacagcacctggccgtttcacacgagaagggaaagattaccgtgctgcaattgtctgcgctcctgaagcaagctgactcatccaaacgcaagctcactcttacacgtctagctagcgctcctgtgccatttaccgtgctgtctctgacaggaaatccatgtaaggaagactatctggctgtctgcgggttgaaggattgtcacgtcctgaccttttcctcatcagggtccgtgtccgatcaccttgttctgcatccacaacttgctacaggcaattttatcattaaagcggtctggctgcctgggagtcagactgagctggccattgttaccgccgactttgttaagatctacgacttgtgtgttgatgctctgagtccaacattctatttcctgctgccgtctagtaaaattagagacgtcaccttcctcttcaatgaagagggcaagaacattattgtgatcatgagctccgctggctatatatacacccagctcatggaggaggccagcagcgcgcaacagggccccttctacgttaccaatgtgttggagatcaatcacgaggacctgaagcaagacagtaattctcaggtcgcagggggaggcgtttctgtctattattctcatgtgctgcagatgctctttttctcctactgccaaggcaaatcctttgctgcaacaatcagccgcacaactttagaggtgctccaacttttccctattaatatcaagtcctctaatggaggctcgaagaccagcccggccctgtgccaatggtccgaggtgatgaatcacccaggtttggtctgctgcgtgcagcagacaacaggcgttcctctggtcgtcatggtcaaaccggatacctttctgatacaagaaatcaagactctgccagccaaggcgaagatccaggacatggtggccatacggcacactgcctgcaacgaacagcagcgaaccactatgatccttttatgcgaagacggatctctgcggatctatatggctaacgtcgaaaatactagctattggctgcaaccctcgctccagccttcatcggtaatatctattatgaagccggtgcgtaagagaaagacagccacaattacaactcggacttcctcacaggtgactttccctatcgatttcttcgagcataatcagcaacttacagacgtggaatttggcggtaacgacttactgcaagtgtataacgcccagcagattaaacaccgcctgaatagcaccggaatgtatgtcgccaacacaaagcctggcggattcactatagagatttccaacaacaacagtacaatggtgatgacaggaatgcgtatccagattggaacccaggccatcgagcgagcccctagttacatcgaaatttttggaagaacaatgcaactcaatttatctcgctctcggtggttcgactttccatttacacgcgaggaggcactgcaggcggacaaaaagcttaatcttttttccgagtccccaacaccgggggccgatagtgtgctgattgtcaccgctaaactgggcgcaacaggcctctggctctctaatattctcggctccttgcatagcgctgactttagcgttctgtcttctggaaactttgagctgcacctgatgtactag

SEQ ID NO: 337544 - DNA, 5019 bp, Artificial Sequence
  derived and/or modified sequence
cgcttcctgagcaccatgaagcagaatgccctgcagggcgtggtgcccagcgagacagaggacctgaatgtggagcacctgcagatgctgctgctgatcttccacaacttcacagagaccggccggcgggccatcctgagcctgtttgtgcagatcatccaggagctgtctgtgaacatggatgcccagatgagatttgtgcccctcatcctggcccggctgctgctgatctttgactacctgctgcaccagtacagcaaggcccctgtgtacctgtttgagcaggtgcagcacaacctgctgagccccccatttggctgggccagcggcagccaggacagcaacagcagaagagccaccacccccctgtaccacggcttcaaggaggtggaggagaactggagcaagcacttcagcagtgatgctgtgccccacccccgcttctactgtgtgctgagccctgaggcctctgaagatgacctgaaccggctggacagcgtggcctgtgatgtgctcttcagcaagctggtgaagtatgatgagctgtatgctgccctgacagccctgctggccgccggcagccagctggacacagtgcggaggaaagaaaacaagaatgtgacagccctggaggcctgtgccctgcagtactacttcctgatcctgtggaggatcctgggcatcctgccccccagcaagacctacatcaaccagctgtccatgaacagccctgagatgtctgaatgtgacatcctgcacaccctgcgctggagcagccggctgcgcatcagcagctatgtgaactggatcaaggaccacctgatcaagcagggcatgaaggccgagcacgccagcagcctgctggagctggccagcaccaccaagtgcagctctgtgaagtatgatgtggagatcgtggaggagtactttgcccggcagatcagcagcttctgcagcattgactgcaccaccatcctgcagctgcacgagatccccagcctgcagagcatctacaccctggatgctgccatcagcaaggtgcaggtgtccctggatgagcacttcagcaagatggctgctgagacagacccccacaagagcagcgagatcaccaagaacctgctgcctgccaccctgcagctgattgacacctacgccagcttcacccgggcctacctgctgcagaacttcaatgaggagggcaccacagagaagcccagcaaggagaagctgcagggctttgctgctgtgctggccatcggcagcagccgctgcaaggccaacaccctgggccccaccctggtgcagaacctgcccagctctgtgcagacagtgtgtgagagctggaacaacatcaacaccaatgagttccccaacatcggctcctggagaaatgcctttgccaatgacaccatccccagcgagagctacatctctgctgtgcaggccgcccacctgggcaccctgtgcagccagagcctgcccctggccgccagcctgaagcacaccctgctgagcctggtgcggctgactggagacctgattgtgtggagcgatgagatgaaccccccccaggtgatccgcaccctgctgcccctgctgctggagagcagcacagaatctgtggccgagatcagcagcaacagcctggagcgcatcctgggccctgctgagagtgatgagttcctggcccgggtgtatgagaagctgatcaccggctgctacaacatcctggccaaccacgccgaccccaacagcggcctggatgagagcatcctggaggagtgcctgcagtacctggagaagcagctggagagcagccaggccaggaaggccatggaggagttcttcagtgacagcggggagctggtgcagatcatgatggccacagccaatgaaaacctgagcgccaagttctgcaacagagtgctgaagttcttcaccaagctgttccagctgacagagaagagccccaaccccagcctgctgcacctgtgtggcagcctggcccagctggcctgtgtggagcctgtgcggctgcaggcctggctgaccaggatgaccaccagcccccccaaggacagcgaccagctggatgtgatccaggagaaccggcagctgctgcagctgctgaccacctacatcgtgcgggagaacagccaggtgggggagggcgtgtgtgctgtgctgctgggcaccctgacccccatggccacagagatgctggccaatggagatggcaccggcttccctgagctgatggtggtgatggccaccctggccagcgctggccagggcgccggccacctgcagctgcacaatgctgctgtggactggctgagccgctgcaagaagtacctgagccagaagaatgtggtggagaagctgaatgccaacgtgatgcacggcaagcacgtgatgatcctggagtgcacctgccacatcatgagctacctggctgatgtgaccaatgccctgagccagagcaatggccagggccccagccacctgtctgtggatggagaggagcgggccatcgaggtggacagcgactgggtggaggagctggccgtggaggaggaggacagccaggccgaggacagtgatgaggacagcctgtgcaacaagctgtgcaccttcaccatcacccagaaggagttcatgaaccagcactggtaccactgccacacctgcaagatggtggatggagtgggcgtgtgcaccgtgtgtgccaaggtgtgccacaaggaccacgagatctcctatgccaagtatggcagcttcttctgtgactgtggggccaaggaggatggcagctgcctggccctggtgaagaggacccccagcagcggcatgagcagcaccatgaaggagagcgccttccagagcgagccccgcatcagcgagagcctggtgagacatgccagcaccagcagccctgctgacaaggccaaggtgaccatcagtgatggcaaggtggctgatgaggagaagcccaagaagagcagcctgtgcaggacagtggagggctgccgggaggagctgcagaaccaggccaacttctcctttgcccccctggtgctggacatgctgaacttcctgatggatgccatccagaccaacttccagcaggccagcgctgtgggcagcagcagccgggcccagcaggccctgtctgagctgcacacagtggagaaggctgtggagatgacagaccagctgatggtgcccaccctgggcagccaggagggcgcctttgaaaatgtgaggatgaactacagcggggaccagggccagaccatccggcagctgatcagcgcccacgtgctgcggcgggtggccatgtgtgtgctgagcagcccccacggccggcggcagcacctggccgtgtcccatgagaagggcaagatcaccgtgctgcagctgagcgccctgctgaagcaggccgacagcagcaagaggaagctgaccctgacccggctggccagcgcccctgtgcccttcaccgtgctgagcctgaccggcaacccctgcaaggaggactacctggccgtgtgtggcctgaaggactgccacgtgctgaccttcagcagcagcggctctgtgtctgaccacctggtgctgcacccccagctggccaccggcaacttcatcatcaaggctgtgtggctgcccggcagccagacagagctggccatcgtgacagctgactttgtgaagatctatgacctgtgtgtggatgccctgagccccaccttctacttcctgctgcccagcagcaagatcagagatgtgaccttcctgttcaatgaggagggcaagaacatcatcgtcatcatgagcagcgctggctacatctacacccagctgatggaggaggccagcagcgcccagcagggccccttctacgtgaccaacgtgctggagatcaaccacgaggacctgaagcaggacagcaacagccaggtggccggcggcggcgtgtctgtgtactacagccacgtgctgcagatgctgttcttctcctactgccagggcaagagctttgctgccaccatcagcaggaccaccctggaggtgctgcagctgttccccatcaacatcaagagcagcaatggaggcagcaagaccagccctgccctgtgccagtggagcgaggtgatgaaccaccctggcctggtgtgctgcgtgcagcagaccactggagtgcccctggtggtgatggtgaagccagacaccttcctgatccaggagatcaagaccctgcctgccaaggccaagatccaggacatggtggccatccgccacacagcctgcaatgagcagcagaggaccaccatgatcctgctgtgtgaagatggcagcctgcgcatctacatggccaacgtggagaacaccagctactggctgcagcccagcctgcagcccagcagcgtcatcagcatcatgaagcctgtgaggaagaggaagacagccaccatcaccaccaggaccagcagccaggtgaccttccccatcgacttctttgagcacaaccagcagctgacagatgtggagtttggaggaaatgacctgctgcaggtgtacaatgcccagcagatcaagcaccggctgaacagcacaggcatgtatgtggccaacaccaagccaggcggcttcaccatcgagatcagcaacaacaacagcaccatggtgatgacaggcatgaggatccagatcggcacccaggccatcgagcgggcccccagctacatcgagatcttcggccgcaccatgcagctgaacctgagccgcagccgctggtttgacttccccttcacccgggaggaggccctgcaggccgacaagaagctgaacctcttcagcgagagccccaccccaggagctgacagcgtgctgattgtgacagccaagctgggcgccaccggcctgtggctgagcaacatcctgggcagcctgcacagcgctgacttctctgtgctgagcagcggcaactttgagctgcacctgatgtactag

SEQ ID NO: 337545 - DNA, 5019 bp, Artificial Sequence
  derived and/or modified sequence
cggttcctgagcaccatgaagcagaacgccctgcagggcgtggtgcccagtgaaacggaggatctaaacgtagagcatttgcagatgctcttgctgatcttccacaactttacagagaccggacgccgggccattttgtcactcttcgtgcaaattatccaagaacttagcgtgaatatggatgctcagatgcggtttgttcctcttatcctggcacgtttgttgctgattttcgattacctcctacatcaatactccaaagccccggtctaccttttcgagcaggtgcaacataatttactttctcccccattcggatgggcgagtggaagtcaagatagtaatagccgccgagccaccacccccctttatcacgggtttaaagaggtggaggagaattggtctaagcatttctccagcgacgccgttcctcaccctcgcttctattgtgttctgagccctgaggcctccgaagatgacttgaacaggttggactcagtggcctgcgacgtgttgttctccaaactggttaaatacgatgaattgtacgcagctctcactgccctgctggctgctggatcccagttagataccgttagaaggaaagaaaataagaatgttacagccctggaggcttgcgcactccagtactacttcctcatcctctggcggatcctgggcatcctgcccccgtcgaagacatacatcaatcagctttctatgaattcacccgagatgtctgagtgtgacatcctccacactctaaggtggagctcccgactccgtattagcagctacgtcaattggatcaaggatcacctgatcaagcagggaatgaaggctgaacatgcctcttccctgttggaattagccagcacaaccaaatgttcaagcgtcaagtatgacgtggaaatcgtcgaggaatacttcgctcgccaaatttcttccttttgtagtatcgattgcaccacgatcttgcaactgcacgaaattccctcgctgcagagcatttacacactggatgctgcgattagcaaggtgcaggtctcattggacgaacacttttccaaaatggcagccgagactgatcctcacaaatcttccgagattacgaagaacctcttgcccgcaactttgcagctgatcgacacctacgcaagttttacccgagcatatttactccagaattttaacgaggaaggaactacagaaaaaccctctaaggaaaagttgcaaggcttcgcagccgttttggctattgggtccagccgatgcaaagccaatactctcggccctactcttgtgcagaatctgccttctagtgtccaaactgtgtgcgagtcgtggaacaatataaatacgaacgaattccccaacattggctcctggcgcaacgcctttgcgaatgatacaatccccagtgagagttacatcagtgccgtccaggctgcccatctcggcaccctctgcagccagagcctccccctcgctgcttcactgaaacacaccttactgagtctggtgcgcctaactggcgacctgattgtttggtccgatgagatgaatccaccccaggtgatcaggacccttctgcctctgttactcgaatctagtactgaatccgtagcggagattagctctaatagcctggaacgcattcttggacccgccgagtctgacgagttcttagcaagagtgtacgagaaactcattaccggatgctacaacattctggccaaccatgccgatcccaattcaggactggatgaatcaatcctcgaggagtgcctgcagtatcttgaaaaacagctggagagctctcaggcccgtaaggccatggaagaattcttctccgacagtggcgagctcgttcaaatcatgatggctaccgcaaacgagaatctgtcggctaagttttgcaaccgcgtgctcaagttttttactaagctttttcagcttaccgaaaagagtcctaacccaagccttctgcacttgtgtggaagcttggcccagctggcctgcgtggagccggtcaggctccaggcatggctgaccagaatgactacatcccccccgaaagactcggatcagctggacgtgattcaagagaatcggcagcttctccagttgctaaccacctatatagtccgtgaaaatagccaggttggtgaaggggtgtgcgccgtcctcctcggcaccttgacgcccatggcaacagagatgctcgccaacggggatggcactggtttccctgaactgatggtggtcatggcaactctggcttccgccgggcagggtgccgggcacctgcaactgcacaatgctgcggtcgactggctgtctcgctgcaagaagtacctgagccagaaaaacgtggtggagaagttgaatgctaacgtgatgcacggtaagcacgtaatgattctggagtgtacttgtcatattatgtcctatctggcagatgtgacgaacgccttatcccaaagcaacgggcagggcccctctcacttgagcgttgatggcgaggaacgcgccatcgaggtggactcagattgggtggaagagctcgctgtggaggaagaagattctcaggcagaggactctgacgaggatagcctgtgtaacaagctctgcacatttaccattacacagaaggagtttatgaaccagcactggtaccattgtcacacttgtaaaatggtggatggcgtcggggtctgtacggtctgtgccaaggtctgccacaaagaccatgaaatctcctatgccaagtacggttcttttttctgcgattgcggagccaaggaagacggatcatgcttggctctggtgaagcgcactcccagctctggtatgtcttccacgatgaaggaaagcgcattccagtcagaaccaagaataagtgagtctctggtgcgccacgcaagcacgtcttcccctgccgacaaagcaaaagtgacgatcagcgacggcaaggtggcagacgaggagaagcccaaaaaaagttctctctgtcggacggtcgaaggctgccgcgaggaacttcagaatcaggcaaatttcagctttgctcctctggtcctggatatgctgaattttctgatggatgcgatccagaccaattttcagcaagcctctgctgtcggatcgagctctagggcacaacaggctctgagcgaactgcacaccgtcgagaaagctgtagagatgacggatcagttgatggtcccaacactgggaagccaggaaggcgcgttcgagaacgtgaggatgaattacagcggggatcaggggcaaaccattcgccagttaatttcagctcacgtcctccgacgcgttgccatgtgtgttttgtccagccctcacggacgccggcagcacctggcagtctctcacgaaaaggggaaaattaccgtcctacagttaagcgccttactgaaacaggcagattcctctaaaaggaagctgacccttacgaggcttgcatctgccccagtccctttcactgtcctcagcctcaccgggaacccatgtaaagaagattacctggctgtctgcggacttaaagactgccatgtgttgacgttcagcagctcaggcagcgtaagtgaccatctcgttcttcaccctcagctcgctacgggaaatttcatcatcaaggccgtatggctgccggggagccaaacagaactggctattgtgacggctgacttcgtgaagatctacgatctgtgcgtcgacgctttgtcccccaccttctactttttgctaccgtcatctaaaatcagggacgtcacatttcttttcaatgaagaaggcaaaaatattattgtcataatgtccagcgccggctacatttacacacagctcatggaggaagcctcatccgcccagcaggggccattttatgtcacgaatgtacttgaaattaatcacgaggaccttaaacaggacagtaacagccaggtggctggcggcggtgtgtccgtatattacagtcacgttcttcagatgttgtttttcagctattgccaaggaaagagtttcgccgcgactatttcgagaactactctggaagtacttcagctgttcccaataaacattaagtcttctaatggaggctctaaaacgagtcctgccttgtgccaatggtcagaagtgatgaatcatccaggccttgtgtgctgcgtgcagcagaccaccggagtaccactggtggtgatggtaaaacccgacactttccttatccaggagatcaaaacattacctgctaaggccaaaatccaagacatggtcgctatccgccacaccgcgtgcaacgaacagcagcgtaccaccatgattctgctttgtgaggatggctctctccgcatctacatggctaatgtcgagaataccagctactggctgcagccttcactccaaccctcatccgttatttctatcatgaagcctgtgcgtaaacgaaagaccgccactatcactacacgcaccagttcccaggtgacattcccaatcgactttttcgaacataaccaacaactgaccgacgtggagttcggcggtaatgatttattacaagtatacaacgcccaacagattaaacacaggctgaactccacagggatgtatgtcgccaatacaaagcccggtgggtttaccattgagatatctaataataatagcacaatggtgatgacagggatgcgtatccagatcggaacccaggccatcgagcgtgctccatcatatatagagattttcgggcggaccatgcagctgaatttgagccgctcgcgatggttcgattttcccttcactcgcgaagaagcgctccaggctgacaagaagctgaacctattctctgaaagtcctacccctggagccgatagtgttctcatcgtgacagcaaagctgggggcgacaggattgtggctctctaacattctgggctcattacactcagccgatttttctgttctgagctcaggcaactttgagctgcatttaatgtactag

SEQ ID NO: 337546 - DNA, 5019 bp, Artificial Sequence
  derived and/or modified sequence
agatttctctccactatgaaacagaatgcactccaaggggtcgtgccttctgagaccgaggatttgaacgtggaacacttgcagatgctgctgctcatttttcacaatttcaccgaaaccgggcgacgtgccatcttgtccctgtttgtacaaatcatccaggagctgtccgtgaatatggacgcccaaatgagattcgtgccgctgattctcgctagactgctgctcatcttcgattatctgcttcatcagtactccaaagcacccgtgtatcttttcgagcaggtgcagcataacttgctatcacctcccttcggttgggcgtcagggtcccaagactctaactctcgaagagccacgacacccctgtaccatggcttcaaggaagtggaggagaactggtccaagcattttagtagtgacgccgtgcctcaccccaggttctactgcgttctctcgccagaggcgagcgaggatgacctgaacaggctcgacagtgtcgcctgcgatgtgctattttccaaattggtgaaatacgacgaactttacgcagctctaaccgcattgctggcggctggaagccagttggatactgtgcgaagaaaggaaaacaaaaacgtcacagctctcgaggcttgcgcactacagtactatttcctgattctctggaggatactggggatcctcccaccctccaaaacttacatcaaccagttatcaatgaatagtccagaaatgtccgaatgcgatatccttcacaccttacgatggtcatctagattaaggatttcctcttatgtgaactggataaaggatcatctcattaagcagggcatgaaagcagagcacgcctccagcctcctagaactggcaagcacaacaaagtgcagctcggtcaaatacgatgtggagattgtggaggagtatttcgctaggcagatctcaagcttttgctccattgattgcactactattcttcagctgcatgaaattccgtccctgcagtctatctataccctcgacgctgctatatcgaaggtccaagtgagtctggacgagcacttctccaaaatggctgccgaaactgaccctcacaaatcctctgaaataactaagaacttgctgcctgcaacactccaacttatcgacacttatgcgtcattcactagggcgtaccttctacagaacttcaacgaagaagggaccacagagaaaccgagtaaggagaaactccagggcttcgcagcagtgttggcgattgggtcctctcgatgtaaggcgaatactctgggtcccactctggtgcagaacttgccttctagcgtacaaactgtgtgtgagagctggaacaatatcaataccaacgagtttcctaacatcggctcatggagaaatgctttcgctaacgatacaatcccctccgaaagttacatcagtgcagtccaggcagcccacctggggacattatgctcccagtccctgcctttagcggcatcacttaagcatactctcttaagtctcgtgcgactaacgggagacttgattgtgtggagtgacgagatgaaccccccacaggtgatacgcacactgcttccattgctactggaatcctctacggaatctgtggcggagatctcatctaacagcctggagcggatcctcgggcctgctgagagcgacgaatttctcgctagagtgtacgagaagctaattacaggctgctacaatatacttgctaaccacgcagaccccaactctggcctggacgagagcattctggaagaatgtcttcagtatttggagaagcagctagagagcagtcaagccagaaaagccatggaggaattcttctctgactctggggaactcgtacaaatcatgatggctactgcgaacgaaaatctctcagcaaagttttgtaaccgggtcttaaagttcttcacaaaactgttccagctaacagaaaaatcaccaaacccatcattgctgcacttgtgtggcagcctggctcagcttgcatgcgttgagccggtcagactgcaagcgtggctcacaaggatgacgaccagccctccaaaggactcggatcagctagacgtcattcaggaaaaccggcaactccttcagttgctcactacatacatcgtgagggagaactctcaggtgggagaaggcgtttgtgctgtattgctgggaactctcacacctatggcaacagagatgctcgccaacggggatggaactggtttccctgagttgatggtggtgatggctacattggcatccgcaggacaaggggctggccacctccagttacacaatgcagcagttgactggttatctaggtgtaagaagtatctgtcacagaagaatgtcgttgaaaaactgaatgccaatgtgatgcacgggaaacatgtgatgatactcgaatgcacatgtcacataatgagctacttagctgacgttaccaacgcgctctcccagtccaacggtcagggaccatctcacttaagtgttgatggggaggaaagagccatcgaggtcgacagtgactgggtggaagagctcgccgtggaggaggaggattcacaggccgaggactccgacgaggactccctgtgcaacaagctgtgcacctttacaatcacacagaaggagttcatgaaccagcactggtatcactgtcatacctgcaagatggtcgacggcgtcggtgtatgcactgtctgcgcaaaggtgtgccacaaggaccacgaaatcagctacgcgaagtacgggagtttcttctgtgattgcggggcaaaggaggatggttcatgccttgcactagttaaacgaacaccgtcttccgggatgtcctctacaatgaaagagtctgctttccaaagtgagccacgtatatccgaaagcttggtacgacacgcctccaccagcagccctgccgacaaggctaaggttacgatctccgatgggaaggtggccgatgaagagaagcctaaaaagtcttccttatgtagaactgtggaaggatgcagggaagagttgcaaaaccaggctaattttagctttgcaccactcgttctagatatgctgaatttcctgatggatgcaatccaaaccaatttccagcaggcttccgccgtgggaagttcaagtcgagcacagcaggcactgagcgagctgcacacggtagagaaggcagtggaaatgaccgaccaactcatggttcccactctgggaagtcaggaaggcgcatttgagaatgtaaggatgaattattccggagaccaggggcaaactattcggcagctgatttctgcccacgtccttcggagggttgctatgtgcgtgttatcttcccctcatggtcgcaggcagcacctcgccgtgagccatgagaaggggaagattaccgtccttcagctctcagctctgttaaagcaggccgatagctcaaagcggaaactcaccttaaccagattagcatctgcacctgtgccattcaccgtgctgtcactcaccgggaacccttgtaaggaagattacttggccgtgtgtggcctcaaagactgtcatgtgcttacttttagttcatcaggctctgtgagcgatcaccttgtccttcaccctcaactcgctaccggcaatttcattattaaggctgtctggttaccgggtagtcaaaccgagttagcgattgtcaccgctgattttgtgaagatctatgatctgtgcgtagatgctctgtcccccaccttctactttctgcttcctagcagtaagataagggacgtgacttttctatttaacgaagaaggtaagaacattattgtcataatgtccagtgctggttacatctacacccagctcatggaggaggcgtctagcgcccaacagggaccattctacgtgaccaacgtcctggagatcaaccatgaggacctgaaacaggacagcaatagccaagtggccggaggtggtgtgtctgtatactattcccatgttttacagatgctcttcttttcctattgccagggcaaatcgttcgctgctaccataagtcggacaacgctggaagtgctgcaactgttccctataaacatcaagtcatctaatggaggtagcaaaacctctcccgcactgtgtcagtggtctgaggtcatgaatcaccctggcttagtgtgctgtgtgcagcagaccaccggagtgccccttgtagtaatggtgaagcctgatacattcctgatccaagagatcaaaacgttgcccgcaaaagcaaagattcaagatatggtcgcaattcgtcatactgcctgtaacgaacagcaaaggaccactatgatccttctctgcgaggatggcagtctgcggatttacatggcaaacgtggaaaacacatcttactggctgcaaccaagtctgcagcccagcagcgtgatctcaatcatgaagcccgtgaggaagcggaaaaccgcaactattacaaccagaacctcctctcaggtcacattccccatcgacttcttcgagcacaatcaacagctcaccgacgttgaatttggcggtaatgacttgctacaggtctacaacgctcagcagattaagcacaggctgaactccaccggcatgtacgtcgctaataccaaacccggagggtttacaatagaaatctctaataataatagcaccatggtgatgaccggaatgcggatacaaattgggactcaggccattgagcgcgcaccatcctacatcgagatcttcggtcgaacaatgcagctcaacctcagccgctcgcggtggtttgatttccctttcaccagagaggaggcactccaggccgacaaaaagctgaatctgttcagcgaaagtcctacccctggggctgattccgttctgatagtgactgctaagttgggtgctaccggcctctggctcagcaacatcctaggcagcttgcattccgcagatttctccgtgctcagctccgggaattttgagctccacttgatgtattag

SEQ ID NO: 337547 - DNA, 5583 bp, Artificial Sequence
  derived and/or modified sequence
aggtttttgtctacaatgaagcagaatgccctgcaaggtgtggtgcccagtgagacagaggatctgaatgtagaacacctgcagatgctcctcctcattttccacaatttcaccgagacaggccggcgggccatattgtcgctttttgtccagatcatccaggagttgagcgtcaacatggatgctcagatgcgcttcgtgccgcttatcttggctcgcctccttctcatctttgattatctgcttcatcagtactccaaagcccctgtgtatctatttgagcaggtacagcataacctgctaagtcctccctttgggtgggcaagtggatcccaggacagcaacagccgccgggcaaccactcctctctatcatggattcaaagaagtagaagaaaactggtctaagcatttctcatcagatgctgtcccacaccccagattctactgtgtcctgtccccagaagcctcagaggatgatttgaaccgacttgattctgtggcatgtgacgtccttttctccaagcttgtcaagtatgatgagctttatgctgcactgacagccctgcttgcagctgggtcccagcttgatacagttaggagaaaggaaaacaagaatgtaacagccttggaggcctgtgcccttcaatattacttcttgatactgtggaggatcctaggaattttaccaccatcaaagacttacattaaccagctatccatgaactcacctgagatgagcgaatgtgacatcttgcacactctgcgatggtcttctcggctccggatcagctcctatgtcaactggataaaggatcaccttatcaaacagggaatgaaggctgagcatgctagctcgcttctagaactggcatccaccactaagtgtagctcagtgaaatatgatgttgaaatagtagaggaatacttcgctcgacagatctcatccttctgtagtatcgactgtaccaccatcttgcagctgcatgaaattcccagtctgcagtccatctacacccttgatgccgcgatctcaaaggtccaggtctctttggatgagcatttttctaagatggctgctgagactgatcctcataagtcgtctgagattaccaagaacctacttccagccacgctgcaactcattgacacctatgcatcgttcaccagagcctatttgctgcaaaactttaatgaagagggaacaactgagaaaccttccaaggagaaactgcaaggctttgctgctgttttggctattggctctagcaggtgcaaggcaaatactctgggtccgacactggttcagaatttgccatcgtcagtgcagactgtgtgtgagtcctggaacaacatcaataccaatgaatttcccaatattggatcctggcgcaatgcctttgccaatgacaccatcccttcagagagttatattagtgcagtgcaggctgcacacctggggactctctgtagccaaagtctgcccctggctgcttccctgaagcataccctcctctcactggtcaggttgactggagatcttattgtttggtcagatgagatgaacccaccacaggtaattcggacactgctacctcttcttttggaatcaagcactgagagtgttgccgagatcagtagcaactccctggaacgcatcttgggccctgctgagtctgatgagttcttggctcgtgtttatgagaagctgatcactggttgttacaacattctggccaatcatgcagatcctaacagtggactggatgaatccatcctggaggaatgtctccagtacttggaaaagcagctggaaagtagccaggctcgtaaagctatggaggagtttttctctgacagtggagaacttgtacagatcatgatggcaacagccaatgagaacctctctgctaaattctgtaaccgagttttgaaattcttcaccaaactcttccagctgactgagaagagccctaacccgagcctgttgcatctctgtggctccctggcacaactggcctgtgtggaacctgtgcgcctgcaggcctggctcacccgcatgactacatcgcccccaaaagattctgatcagctggatgtaattcaggagaaccggcagctgctgcagttactgaccacatacattgttcgggaaaacagccaagttggggaaggtgtgtgtgctgttcttctgggcaccctgactcccatggcaacagagatgctggccaacggtgatgggactggcttccctgaacttatggttgtgatggccactctggccagtgcaggtcaaggtgctggtcaccttcagcttcataatgctgctgtggattggctgagcagatgcaagaaatacctgtcacagaagaatgtagttgaaaaactgaatgccaatgtaatgcatggaaagcatgtgatgatcttggagtgcacatgccatatcatgtcttacttggctgatgtcacgaatgccctgagccagagtaatggtcaaggcccaagtcatctctcagtggatggggaagagcgggccattgaagtagactcagactgggtggaggagttggcggtggaagaggaagattcccaggctgaggattcagatgaagattctctttgcaataaactctgcacttttacgatcacacagaaagaattcatgaaccagcattggtaccactgtcacacctgtaaaatggtggatggcgtgggtgtctgcacagtgtgtgctaaggtgtgccacaaggatcatgagatttcctatgccaagtatggatccttcttctgtgactgtggagccaaggaagatggcagctgtttggctctggtgaagagaactcctagcagtggcatgagctctaccatgaaggagtcggcatttcagagtgaacccaggatttcagagagtctagtgcgtcatgccagcacctcctcgccagctgacaaagccaaggttaccatcagtgatggaaaggttgctgacgaagagaagcccaagaagagcagcctctgccgcacagtagagggctgccgggaggaattacagaaccaggccaatttctccttcgctcctctcgtgttagacatgcttaatttccttatggatgccattcagaccaacttccagcaagcttcagccgtcgggagcagcagccgtgctcagcaagccctcagtgagctacacactgtggagaaggcagtggagatgacagaccagctgatggttcccaccttagggtcccaggaaggtgcctttgagaatgtgcggatgaattacagtggagaccagggccagaccatccggcagctgatcagtgctcatgtgctcaggcgggtggctatgtgtgtgctctcctctccccatgggcgccgccaacatttggctgtcagccatgagaagggcaagatcaccgttctgcagctctctgcactcctgaagcaagcagattccagcaaaaggaagttaactctgacccgcttggcttctgccccagttccttttactgtgttgagcctcacaggaaatccctgcaaggaagactacttggcggtttgtgggctaaaggactgtcatgtgctcacctttagtagctcaggctctgtttcggatcacttggttttgcaccctcagttggcaacggggaacttcatcatcaaagccgtgtggttacctggttcacagaccgagttagcaattgtcaccgcagactttgttaagatttatgacctgtgtgttgatgccttgagtccaaccttctattttctcctgccaagctcaaagataagagatgttaccttccttttcaatgaggagggaaagaacatcattgttataatgtcttcggctgggtacatctatactcagcttatggaagaggccagcagtgcccagcagggacccttctatgtcactaatgtgttggaaatcaatcatgaggacctgaagcaggacagtaacagccaggtggcgggcggtggtgtgtccgtgtactactcccacgtgttgcagatgttgttcttcagctattgtcaaggcaaatcattcgcagccaccatcagcaggacaaccctggaggtgttgcaactcttccccatcaacatcaaaagttccaatggtggcagtaagacttctcctgctctttgccagtggtctgaggtgatgaaccaccctggcttggtgtgctgtgtccagcaaactacaggggtgccgctggtagttatggtgaaaccagacacttttcttatccaggagattaagactcttcctgctaaagcgaagatccaagacatggttgctattaggcacacggcctgcaatgagcagcagcggacaacaatgattctgctgtgtgaggatggcagcctgcgcatttacatggccaacgtggagaacacctcctactggctgcagccatccctgcagcccagcagtgtcatcagcatcatgaagcctgttcgaaagcgcaaaacagctacaatcacaacccgcacgtctagccaggtgactttccccattgacttttttgaacacaaccagcagctgacagatgtggagtttggtggtaacgacctcctacaggtctataatgcacaacagataaaacaccggctgaattccactggcatgtatgtggccaacaccaagcccggaggcttcaccattgagattagtaacaacaatagcactatggtgatgacaggcatgcggatccagattgggactcaagcaatagaacgggccccgtcatatatcgagatcttcggcagaactatgcagctcaacctgagtcgctcacgctggtttgacttccccttcaccagagaagaagccctgcaggctgataagaagctgaacctcttcagtgagtcaccaacccctggtgcagactctgtcctcattgtgactgcgaaattgggagccactggcctgtggctgtccaacattctgggatctctccactctgctgatttttctgtcctttcatcaggaaactttgagcttcatttgatgtattaaagaggcaaggtgacaggaaaggagtacaccggagcatggtagcagtaaagatagggctgcactgtgttgagtattcatttcaatagtgttgtgtccacctcactaatggggctacttctgtgtttaggccgagaggaggcagattgacatgaaattgcaaggctttcttaacgcacagaggaagacctcaggtcacacatggctgagagatggttggcaatggcttgctatgccactgaaaactaaactctcagaatacaaatccttgagccttactcaagactgcatttctctgtcatttattggccactgtctgatattctttcttctagatatagttgctgttagtgtgaatgatcatgatctgtactttgaacaaagaaagtgtgtagagacccctgggagtgaggggtaggggatacaatactctgaagcagaagaggacccttgcagtgatggttagggactcttctgagtaggagacgtaatcggcttttggtccatggaacttttaccacatgtattcagcatatatacacgattaaagtgctgcaaatatctcag

SEQ ID NO: 337548 - protein, 258 aa, Artificial Sequence
  derived and/or modified sequence
MGPGKKGRCREEGPGRGRRAWIIRGSGSSRQGWVGSVESSKRSANVTRQRQIEQILPALAAGSCFHPAFILSCRFSSRTRATSREEKNLQGFLEQPKEKWVESAFEVDGPYYFTVLALHILPPEQWRATRVEILRRLLVTSQARAVAPGGATRLTDKAVKDYSAYRSSLLFWALVDLIYNMFKKVPTSNTEGGWSCSLAEYIRHNDMPIYEAADKALKTFQEEFMPVETFSEFLDVAGLLSEITDPESFLKDLLNSVP

SEQ ID NO: 337549 - protein, 212 aa, Artificial Sequence
  derived and/or modified sequence
MVRTINLYYNNRTVQAIVELKNKPARWHKAKKVQLTPGQTEVKIDLPLPIVASNLMIEFADFYENYQASTETLQCPRCSASVPANPGVCGNCGENVYQCHKCRSINYDEKDPFLCNACGFCKYARFDFMLYAKPCCAVDPIENEEDRKKAVSNINTLLDKADRVYHQLMGHRPQLENLLCKVNEAAPEKPQVVPRCKGHLDKGLGLDQKTAS

SEQ ID NO: 337550 - protein, 847 aa, Artificial Sequence
  derived and/or modified sequence
MAVCIETAKRYNLDDYRTPVFIFERLCSIIYPEENEVTEFFVTLEKDPQQEDFLQGRMPGNPYSSNEPGIGPLMRDIKNKICQDCDLVALLEDDSGMEGEPMRIVYRMRGLLGDATEEFIESLDSTTDEEEDEEEVYKMAGVMAQCGGLECMLNRLAGIRDFKQGRHLLTVLLKLFSYCVKVKVNRQQLVKLEMNTLNVMLGTLNLALVAEQESKDSGGAAVAEQVLSIMEIILDESNAEPLSEDKGNLLLTGDKDQLVMLLDQINSTFVRSNPSVLQGLLRIIPYLSFGEVEKMQILVERFKPYCNFDKYDEDHSGDDKVFLDCFCKIAAGIKNNSNGHQLKDLILQKGITQNALDYMKKHIPSAKNLDADIWKKFLSRPALPFILRLLRGLAIQHPGTQVLIGTDSIPNLHKLEQVSSDEGIGTLAENLLEALREHPDVNKKIDAARRETRAEKKRMAMAMRQKALGTLGMTTNEKGQVVTKTALLKQMEELIEEPGLTCCICREGYKFQPTKVLGIYTFTKRVALEEMENKPRKQQGYSTVSHFNIVHYDCHLAAVRLARGREEWESAALQNANTKCNGLLPVWGPHVPESAFATCLARHNTYLQECTGQREPTYQLNIHDIKLLFLRFAMEQSFSADTGGGGRESNIHLIPYIIHTVLYVLNTTRATSREEKNLQGFLEQPKEKWVESAFEVDGPYYFTVLALHILPPEQWRATRVEILRRLLVTSQARAVAPGGATRLTDKAVKDYSAYRSSLLFWALVDLIYNMFKKVPTSNTEGGWSCSLAEYIRHNDMPIYEAADKALKTFQEEFMPVETFSEFLDVAGLLSEITDPESFLKDLLNSVP

SEQ ID NO: 337551 - protein, 706 aa, Artificial Sequence
  derived and/or modified sequence
MRIVYRMRGLLGDATEEFIESLDSTTDEEEDEEEVYKMAGVMAQCGGLECMLNRLAGIRDFKQGRHLLTVLLKLFSYCVKVKVNRQQLVKLEMNTLNVMLGTLNLGNLLLTGDKDQLVMLLDQINSTFVRSNPSVLQGLLRIIPYLSFGEVEKMQILVERFKPYCNFDKYDEDHSGDDKVFLDCFCKIAAGIKNNSNGHQLKDLILQKGITQNALDYMKKHIPSAKNLDADIWKKFLSRPALPFILRLLRGLAIQHPGTQVLIGTDSIPNLHKLEQVSSDEGIGTLAENLLEALREHPDVNKKIDAARRETRAEKKRMAMAMRQKALGTLGMTTNEKGQVVTKTALLKQMEELIEEPGLTCCICREGYKFQPTKVLGIYTFTKRVALEEMENKPRKQQGYSTVSHFNIVHYDCHLAAVRLARGREEWESAALQNANTKCNGLLPVWGPHVPESAFATCLARHNTYLQECTGQREPTYQLNIHDIKLLFLRFAMEQSFSADTGGGGRESNIHLIPYIIHTVLYVLNTTRATSREEKNLQGFLEQPKEKWVESAFEVDGPYYFTVLALHILPPEQWRATRVEILRRLLVTSQARAVAPGGATRLTDKAVKDYSAYRSSLLFWALVDLIYNMFKKVPTSNTEGGWSCSLAEYIRHNDMPIYEAADKALKTFQEEFMPVETFSEFLDVAGLLSEITDPESFLKDLLNSVP

SEQ ID NO: 337552 - DNA, 2121 bp, Artificial Sequence
  derived and/or modified sequence
atgagaatcgtgtacagaatgagaggcctgctgggcgacgccaccgaggagttcatcgagagcctggacagcaccaccgacgaggaggaggacgaggaggaggtgtacaagatggccggcgtgatggcccagtgcggcggcctggagtgcatgctgaacagactggccggcatcagagacttcaagcagggcagacacctgctgaccgtgctgctgaagctgttcagctactgcgtgaaggtgaaggtgaacagacagcagctggtgaagctggagatgaacaccctgaacgtgatgctgggcaccctgaacctgggcaacctgctgctgaccggcgacaaggaccagctggtgatgctgctggaccagatcaacagcaccttcgtgagaagcaaccccagcgtgctgcagggcctgctgagaatcatcccctacctgagcttcggcgaggtggagaagatgcagatcctggtggagagattcaagccctactgcaacttcgacaagtacgacgaggaccacagcggcgacgacaaggtgttcctggactgcttctgcaagatcgccgccggcatcaagaacaacagcaacggccaccagctgaaggacctgatcctgcagaagggcatcacccagaacgccctggactacatgaagaagcacatccccagcgccaagaacctggacgccgacatctggaagaagttcctgagcagacccgccctgcccttcatcctgagactgctgagaggcctggccatccagcaccccggcacccaggtgctgatcggcaccgacagcatccccaacctgcacaagctggagcaggtgagcagcgacgagggcatcggcaccctggccgagaacctgctggaggccctgagagagcaccccgacgtgaacaagaagatcgacgccgccagaagagagaccagagccgagaagaagagaatggccatggccatgagacagaaggccctgggcaccctgggcatgaccaccaacgagaagggccaggtggtgaccaagaccgccctgctgaagcagatggaggagctgatcgaggagcccggcctgacctgctgcatctgcagagagggctacaagttccagcccaccaaggtgctgggcatctacaccttcaccaagagagtggccctggaggagatggagaacaagcccagaaagcagcagggctacagcaccgtgagccacttcaacatcgtgcactacgactgccacctggccgccgtgagactggccagaggcagagaggagtgggagagcgccgccctgcagaacgccaacaccaagtgcaacggcctgctgcccgtgtggggcccccacgtgcccgagagcgccttcgccacctgcctggccagacacaacacctacctgcaggagtgcaccggccagagagagcccacctaccagctgaacatccacgacatcaagctgctgttcctgagattcgccatggagcagagcttcagcgccgacaccggcggcggcggcagagagagcaacatccacctgatcccctacatcatccacaccgtgctgtacgtgctgaacaccaccagagccaccagcagagaggagaagaacctgcagggcttcctggagcagcccaaggagaagtgggtggagagcgccttcgaggtggacggcccctactacttcaccgtgctggccctgcacatcctgccccccgagcagtggagagccaccagagtggagatcctgagaagactgctggtgaccagccaggccagagccgtggcccccggcggcgccaccagactgaccgacaaggccgtgaaggactacagcgcctacagaagcagcctgctgttctgggccctggtggacctgatctacaacatgttcaagaaggtgcccaccagcaacaccgagggcggctggagctgcagcctggccgagtacatcagacacaacgacatgcccatctacgaggccgccgacaaggccctgaagaccttccaggaggagttcatgcccgtggagaccttcagcgagttcctggacgtggccggcctgctgagcgagatcaccgaccccgagagcttcctgaaggacctgctgaacagcgtgccctag

SEQ ID NO: 337553 - DNA, 2121 bp, Artificial Sequence
  derived and/or modified sequence
atgcgaatagtgtaccgcatgcgcgggcttttgggagacgctaccgaggagttcatagagagtctggacagcactaccgacgaggaagaagacgaggaggaggtgtataagatggccggcgtcatggcccaatgcggggggctggaatgtatgttaaaccgtctggccggaattcgggatttcaaacagggacggcacctgttgacggttctgctcaagctgttcagctactgtgttaaggttaaggtcaatagacaacagctagttaagctggagatgaacacactaaatgtgatgctgggaacattgaatctcggaaatctcctattgacgggcgacaaagaccagctggtgatgctcctggatcagattaactccacctttgttcgaagcaacccctctgtcttgcagggccttcttcgcattatcccttacctcagcttcggcgaagtggagaagatgcagatactggttgagaggttcaagccatattgtaatttcgacaagtacgatgaagatcatagcggtgatgacaaagtgtttttggactgtttctgtaagattgccgcgggaattaagaataactctaacggccaccagctcaaggatctgatactccagaagggtatcacacagaatgctctggactatatgaaaaaacacataccatctgctaagaatctcgacgcagacatttggaagaagtttctctcccggccagctctgcctttcatcctgcgcctgttaaggggactcgcaatccagcatcccggaacccaggtcctcatcggcaccgatagcattccgaacttgcacaaactcgaacaagtgtctagtgacgagggcatcggaaccctcgcagagaacctcttggaagcgctgagggaacaccctgacgtaaataaaaagatagatgccgcccggcgcgagacaagggccgagaaaaaaaggatggccatggccatgcgtcagaaagctttgggtacccttggaatgacaactaacgaaaaggggcaggtagtcactaagaccgctttacttaaacagatggaggagttaattgaagaacctggattgacctgctgcatctgtagagagggatataaattccagcccacaaaagtgctggggatatatacattcacgaaacgggttgctcttgaggaaatggaaaacaagcctagaaagcaacaagggtattccaccgtttcccacttcaacatcgtgcactatgactgtcatctagccgcagtgagactcgcgagaggacgcgaagaatgggagagtgccgctctgcagaacgcaaataccaagtgcaatggcctcctgccggtgtggggtcctcacgtccccgagtctgcttttgctacatgtctggccaggcacaacacctacttacaggagtgcacaggccagcgcgaaccgacataccagctgaatatccacgatattaaacttctcttcctgagattcgcaatggagcagtctttctcagctgacaccggggggggcgggcgggagagcaatatccacctgatcccgtacatcatccacacagtcctctatgtgctgaatactactcgtgctacatctagagaagagaagaatctgcaggggttcctggaacagccaaaagagaaatgggtggaatccgcttttgaggttgatggaccctattatttcacagttctggccttacacatcctgcctcctgagcagtggagagcaactagggtcgaaatcctccgccgcttgctggtgacatcccaggctcgggccgtggcccccgggggtgccacccgcctaacagacaaggccgttaaagactactctgcctaccggtcatcccttctattttgggccctggtggacctgatctacaacatgtttaagaaggtgcctacatctaacacggagggagggtggtcctgttcactggccgagtacattcgacataatgacatgcctatctacgaagccgctgataaggccctcaaaaccttccaggaggagttcatgcccgtggagaccttttccgaattccttgatgtcgcaggtctgttatctgagatcaccgaccccgagtcattccttaaggacttgttgaactctgtcccttag

SEQ ID NO: 337554 - DNA, 2121 bp, Artificial Sequence
  derived and/or modified sequence
atgagaattgtgtacaggatgaggggcctgctgggagatgccacagaggagttcatcgagagcctggacagcaccacagatgaggaggaggatgaggaggaggtgtacaagatggccggcgtgatggcccagtgtggcggcctggagtgcatgctgaaccggctggccggcatccgggacttcaagcagggccgccacctgctgactgtgctgctgaagctgttctcctactgtgtgaaggtgaaggtgaaccggcagcagctggtgaagctggagatgaacaccctgaatgtgatgctgggcaccctgaacctgggcaacctgctgctgactggagacaaggaccagctggtgatgctgctggaccagatcaacagcacctttgtgcgcagcaaccccagcgtgctgcagggcctgctgcgcatcatcccctacctgagctttggagaggtggagaagatgcagatcctggtggagcgcttcaagccctactgcaactttgacaagtatgatgaggaccacagcggagatgacaaggtgttcctggactgcttctgcaagattgctgctggcatcaagaacaacagcaatggccaccagctgaaggacctgatcctgcagaagggcatcacccagaatgccctggactacatgaagaagcacatccccagcgccaagaacctggatgctgacatctggaagaagttcctgagcaggcctgccctgcccttcatcctgcggctgctgcggggcctggccatccagcaccctggcacccaggtgctgattggaacagacagcatccccaacctgcacaagctggagcaggtgtccagtgatgagggcatcggcaccctggccgagaacctgctggaggccctgcgggagcacccagatgtgaacaagaagattgatgctgcccggcgggagaccagggctgagaagaagaggatggccatggccatgaggcagaaggccctgggcaccctgggcatgaccaccaatgagaagggccaggtggtgaccaagacagccctgctgaagcagatggaggagctgattgaggagcccggcctgacctgctgcatctgccgggagggctacaagttccagcccaccaaggtgctgggcatctacaccttcaccaagagggtggccctggaggagatggagaacaagcccaggaagcagcagggctacagcacagtgagccacttcaacatcgtgcactatgactgccacctggccgctgtgcggctggcccggggccgggaggagtgggagagcgctgccctgcagaatgccaacaccaagtgcaatggcctgctgcctgtgtggggcccccacgtgcctgagagcgcctttgccacctgcctggcccggcacaacacctacctgcaggagtgcaccggccagcgggagcccacctaccagctgaacatccatgacatcaagctgctcttcctgcgctttgccatggagcagagcttctctgctgacacaggaggcggcggccgggagagcaacatccacctgatcccctacatcatccacacagtgctgtatgtgctgaacaccacccgggccaccagccgggaggagaagaacctgcagggcttcctggagcagcccaaggagaagtgggtggagagcgcctttgaggtggatggcccctactacttcaccgtgctggccctgcacatcctgcccccagagcagtggagggccaccagggtggagatcctgcggcggctgctggtgaccagccaggcccgggctgtggcccctgggggcgccacccggctgacagacaaggctgtgaaggactacagcgcctaccgcagcagcctgctcttctgggccctggtggacctgatctacaacatgttcaagaaggtgcccaccagcaacacagagggcggctggagctgcagcctggccgagtacatccgccacaatgacatgcccatctatgaggccgctgacaaggccctgaagaccttccaggaggagttcatgcctgtggagaccttcagcgagttcctggatgtggccggcctgctgtctgagatcacagatcctgagagcttcctgaaggacctgctgaacagcgtgccctag

SEQ ID NO: 337555 - DNA, 2121 bp, Artificial Sequence
  derived and/or modified sequence
atgcggatcgtgtaccggatgcggggcctgctgggcgacgccaccgaggagtttattgagtccttagatagtacaacggacgaggaggaagatgaggaagaagtgtacaagatggcaggggtgatggcccagtgcggtggcctggagtgtatgctgaaccgcttggccggcatccgagacttcaagcagggccgtcacctgctgacggtgcttctgaagctatttagctactgcgtgaaggttaaggtgaaccgccagcaattggtaaagttggagatgaacacattgaacgttatgttgggtaccttaaatctagggaacttactcctgaccggcgacaaagaccagttggtgatgctgctggatcagatcaactcaactttcgtgagatccaacccctcagtgctacaaggactactaaggattatcccctatctgtcgtttggcgaggttgaaaaaatgcagatcctggtcgagcggttcaaaccctattgcaactttgataaatatgatgaggatcacagcggggatgacaaggtgttcctcgattgtttctgcaagatagccgcgggcattaagaataactctaacggccaccaactgaaggaccttatcttgcagaagggaattacccagaacgctctggattacatgaagaaacacatccctagcgccaagaacttagacgctgatatttggaaaaaatttctgtcacggcctgcacttcccttcatattgcggttgctgagggggttggcgatccagcatcccgggacccaggtgctgatcgggaccgactcaatccctaatctgcacaagttggagcaagtcagcagcgatgaggggattgggacattggccgagaatcttttagaagctctccgcgagcatcctgacgttaataagaagatcgatgccgcacgcagggaaacccgggctgaaaaaaaaagaatggcaatggctatgcgccagaaggcattagggaccctcggaatgacgacaaatgaaaagggccaagttgtgacaaagacagccctgttaaaacagatggaggagctaattgaagaacccggtctgacatgctgtatctgtcgggaaggctacaaattccagcccactaaggttctgggaatttacacctttacaaaacgggtggccctcgaagaaatggagaacaagccgagaaagcagcagggctacagtaccgtgtctcattttaacatcgtacactacgactgccatcttgccgcggtgcggcttgctagagggagagaggaatgggagagtgccgcccttcagaacgctaacacgaaatgcaatggcctgctgcccgtgtggggaccgcatgtgcctgagtccgcatttgctacctgcctggcccggcacaatacttacctgcaagagtgcacgggacaacgcgagccaacctatcagttgaacattcacgacatcaagctgctgttcctgcggttcgcaatggaacagtctttcagtgcagatacgggagggggcgggagagagagcaacattcacctgatcccttacatcatccatacagtactgtacgtgctcaacaccactcgtgccacctcacgagaagagaagaacttgcaagggttcctggaacagccaaaggagaaatgggtggagtctgccttcgaggtagatggaccatattattttaccgtcttggccctccacatcttgcctccagagcagtggagagccacgcgcgtcgaaattctgcggcgtctcctcgtcaccagtcaggcccgggcggttgccccaggcggagccacccggcttaccgacaaagccgtaaaggactactctgcgtaccgctcttcactcttgttctgggctttggtggacctgatatataatatgtttaagaaggttcccactagtaatactgaaggcggctggagctgttcactcgctgagtatatcagacacaacgacatgcctatatatgaagctgctgataaagctctgaagactttccaagaagagttcatgcccgtggagactttctctgagttcctggatgtggccggcctgctgtccgaaatcactgatccagaatccttcctcaaggatcttctgaattccgtgccgtag

SEQ ID NO: 337556 - DNA, 2121 bp, Artificial Sequence
  derived and/or modified sequence
atgaggatcgtttataggatgagagggctcctcggagacgccacagaggagtttatagagagtttggacagtaccaccgatgaagaggaagacgaagaagaagtatataagatggcaggagtcatggctcagtgtggcggactcgaatgcatgctgaaccgacttgcaggaatcagagatttcaaacagggcaggcacttgctgacagtgttactcaaactgtttagctattgtgtaaaggtgaaggtcaatcgacagcagcttgtaaaactggagatgaacaccctgaacgttatgctcggaaccctcaatctcgggaacctcctgttgacaggtgacaaggatcaactggtgatgctgcttgatcagatcaacagcacatttgtacggtcaaacccttccgtactacaaggcctactgagaatcattccttacctgtcatttggcgaggtcgagaaaatgcagatcctcgtggagcggttcaaaccttactgcaatttcgataagtacgatgaggaccatagtggcgacgacaaggtgtttttagattgtttttgtaaaattgctgccggaattaagaacaattctaacgggcatcagcttaaagacctgatcctgcagaaagggattacccagaatgctcttgactacatgaaaaagcatattccctcagctaagaatctcgacgcagacatctggaaaaaattcctgagccgtcctgcacttccttttatactccgcctcctgcggggtctggccattcagcatcccggtacccaggttctgatcgggactgattccatcccaaatttgcacaaattggaacaagtatcaagtgacgaagggatcggtacacttgccgagaacctgctggaggctctgcgtgagcaccctgatgtgaataagaagattgatgccgcaaggagggaaaccagggcagaaaaaaaaaggatggccatggccatgcgacagaaggctttgggaactctaggtatgacgacaaatgaaaagggccaagttgttactaagacagcattactgaagcaaatggaggaacttatcgaagagcctgggcttacttgctgcatctgcagggagggatacaaattccagcctacaaaagtccttggtatttatacatttactaagagagtcgcattggaagagatggagaacaaaccccgaaagcagcagggttattctaccgtgtcacactttaacattgtgcactatgattgtcacctggcagccgtcagactcgctcgcggacgagaggaatgggagagcgccgcactccagaatgctaacactaagtgcaatggcctcctcccggtgtggggcccacacgtgcctgagtccgcatttgccacctgcctggctcggcataacacctacctgcaggaatgtaccgggcagcgggaacccacatatcaactgaatattcacgacataaaattattgtttctgagatttgctatggagcagtccttcagcgctgacacaggaggtggaggcagagaatcgaacattcacttaatcccctacataatccatacagtgctctatgttctgaacacaaccagagcaacatcccgcgaggaaaagaatctacagggatttttggaacagccaaaagaaaagtgggtggagagcgctttcgaggtcgacggcccttactattttaccgtattggctctgcatatcctgcctcccgaacaatggcgcgctacaagagtcgaaattctgcgcagactgctcgtcacttcccaggcacgggctgttgcccctgggggagctactcggctgacagataaggctgtcaaggattatagtgcctatcgctcctctctgctgttctgggccctcgttgacttaatctataacatgttcaagaaagtccccacctcaaacacagaggggggatggagctgctctctggcagaatacatccgccacaacgatatgcctatctatgaagctgcagataaagctctgaagacgtttcaggaggaattcatgcccgtggagaccttcagtgaatttcttgacgtcgccggattgcttagcgagattactgatccagagtctttcctgaaagatctgctcaactccgtgccctag

SEQ ID NO: 337557 - DNA, 2507 bp, Artificial Sequence
  derived and/or modified sequence
ttagtttggaccttcctgtggctgaagtttacaagaaagtctggtgtaccacgaatgagggagagcccatgaggattgtttatcgtatgcgggggctgctgggcgatgccacagaggagttcattgagtccctggactctactacagatgaagaagaagatgaagaagaagtgtataaaatggctggtgtgatggcccagtgtgggggcctggaatgcatgcttaacagactcgcagggatcagagatttcaagcagggacgccaccttctaacagtgctactgaaattgttcagttactgcgtgaaggtgaaagtcaaccggcagcaactggtcaaactggaaatgaacaccttgaacgtcatgctggggaccctaaacctgggcaacctcctcctgacaggtgacaaggatcaactggtgatgctcttggaccagatcaacagcacctttgttcgctccaaccccagtgtgctccagggcctgcttcgcatcatcccgtacctttcctttggagaggtggagaaaatgcagatcttggtggagcgattcaaaccatactgcaactttgataaatatgatgaagatcacagtggtgatgataaagtcttcctggactgcttctgtaaaatagctgctggcatcaagaacaacagcaatgggcaccagctgaaggatctgattctccagaaggggatcacccagaatgcacttgactacatgaaaaagcacatccctagcgccaagaatttggatgccgacatctggaaaaagtttttgtctcgcccagccttgccatttatcctaaggctgcttcggggcctggccatccagcaccctggcacccaggttctgattggaactgattccatcccgaacctgcataagctggagcaggtgtccagtgatgagggcattgggaccttggcagagaacctgctggaagccctgcgggaacaccctgacgtaaacaagaagattgacgcagcccgcagggagacccgggcagagaagaagcgcatggccatggcaatgaggcagaaggccctgggcaccctgggcatgacgacaaatgaaaagggccaggtcgtgaccaagacagcactcctgaagcagatggaagagctgatcgaggagcctggcctcacgtgctgcatctgcagggagggatacaagttccagcccacaaaggtcctgggcatttataccttcacgaagcgggtagccttggaggagatggagaataagccccggaaacagcagggctacagcaccgtgtcccacttcaacattgtgcactacgactgccatctggctgccgtcaggttggctcgaggccgggaagagtgggagagtgccgccctgcagaatgccaacaccaagtgcaacgggctccttccggtctggggacctcatgtccctgaatcagcttttgccacttgcttggcaagacacaacacttacctccaggaatgtacaggccagcgggagcccacgtatcagctcaacatccatgacatcaaactgctcttcctgcgcttcgccatggagcagtcgttcagcgcagacactggcgggggcggccgggagagcaacatccacctgatcccgtacatcattcacactgtgctttacgtcctgaacacaacccgagcaacttcccgagaagagaagaacctccaaggctttctggaacagcccaaggagaagtgggtggagagtgcctttgaagtggacgggccctactatttcacagtcttggcccttcacatcctgccccctgagcagtggagagccacacgtgtggaaatcttgcggaggctgttggtgacctcgcaggctcgggcagtggctccaggtggagccaccaggctgacagataaggcagtgaaggactattccgcttaccgttcttcccttctcttttgggccctcgtcgatctcatttacaacatgtttaagaaggtgcctaccagtaacacagagggaggctggtcctgctctctcgctgagtacatccgccacaacgacatgcccatctacgaagctgccgacaaagccctgaaaaccttccaggaggagttcatgccagtggagaccttctcagagttcctcgatgtggccggtcttttatcagaaatcaccgatccagagagcttcctgaaggacctgttgaactcagtcccctgaccaccacacagcagctgcggcggcgaagacgaagctggcttgccttccaccctctgttctccctccttgtgcattaagttccctccgcgggatgctgcattgttaccccgccctcccctctctcatttttcttggtgtggcttggggtttttaggcttcctgttttatctcgtgtgtgtggtgcaccagctatgaggttgtctgtaacccaagccatcaaagggcctgtacatacctaggagccatgagttgtcccggccagcttcatacttgagtgtgcacatcttgagaaataaacaagtgacttaacacacattg

SEQ ID NO: 337558 - protein, 5159 aa, Artificial Sequence
  derived and/or modified sequence
MATSGGEEAAAAAPAPGTPATGADTTPGWEVAVRPLLSASYSAFEMKELPQLVASVIESESEILHHEKQYEPFYSSFVALSTHYITTVCSLIPRNQLQSVAAACKVLIEFSLLRLENPDEACAVSQKHLILLIKGLCTGCSRLDRTEIITFTAMMKSAKLPQTVKTLSDVEDQKELASPVSPELRQKEVQMNFLNQLTSVFNPRTVASQPISTQTLVEGENDEQSSTDQASAIKTKNVFIAQNVASLQELGGSEKLLRVCLNLPYFLRYINRFQDAVLANSFFIMPATVADATAVRNGFHSLVIDVTMALDTLSLPVLEPLNPSRLQDVTVLSLSCLYAGVSVATCMAILHVGSAQQVRTGSTSSKEDDYESDAATIVQKCLEIYDMIGQAISSSRRAGGEHYQNFQLLGAWCLLNSLFLILNLSPTALADKGKEKDPLAALRVRDILSRTKEGVGSPKLGPGKGHQGFGVLSVILANHAIKLLTSLFQDLQVEALHKGWETDGPPAALSIMAQSTSIQRIQRLIDSVPLMNLLLTLLSTSYRKACVLQRQRKGSMSSDASASTDSNTYYEDDFSSTEEDSSQDDDSEPILGQWFEETISPSKEKAAPPPPPPPPPLESSPRVKSPSKQAPGEKGNILASRKDPELFLGLASNILNFITSSMLNSRNNFIRNYLSVSLSEHHMATLASIIKEVDKDGLKGSSDEEFAAALYHFNHSLVTSDLQSPNLQNTLLQQLGVAPFSEGPWPLYIHPQSLSVLSRLLLIWQHKASAQGDPDVPECLKVWDRFLSTMKQNALQGVVPSETEDLNVEHLQMLLLIFHNFTETGRRAILSLFVQIIQELSVNMDAQMRFVPLILARLLLIFDYLLHQYSKAPVYLFEQVQHNLLSPPFGWASGSQDSNSRRATTPLYHGFKEVEENWSKHFSSDAVPHPRFYCVLSPEASEDDLNRLDSVACDVLFSKLVKYDELYAALTALLAAGSQLDTVRRKENKNVTALEACALQYYFLILWRILGILPPSKTYINQLSMNSPEMSECDILHTLRWSSRLRISSYVNWIKDHLIKQGMKAEHASSLLELASTTKCSSVKYDVEIVEEYFARQISSFCSIDCTTILQLHEIPSLQSIYTLDAAISKVQVSLDEHFSKMAAETDPHKSSEITKNLLPATLQLIDTYASFTRAYLLQNFNEEGTTEKPSKEKLQGFAAVLAIGSSRCKANTLGPTLVQNLPSSVQTVCESWNNINTNEFPNIGSWRNAFANDTIPSESYISAVQAAHLGTLCSQSLPLAASLKHTLLSLVRLTGDLIVWSDEMNPPQVIRTLLPLLLESSTESVAEISSNSLERILGPAESDEFLARVYEKLITGCYNILANHADPNSGLDESILEECLQYLEKQLESSQARKAMEEFFSDSGELVQIMMATANENLSAKFCNRVLKFFTKLFQLTEKSPNPSLLHLCGSLAQLACVEPVRLQAWLTRMTTSPPKDSDQLDVIQENRQLLQLLTTYIVRENSQVGEGVCAVLLGTLTPMATEMLANGDGTGFPELMVVMATLASAGQGAGHLQLHNAAVDWLSRCKKYLSQKNVVEKLNANVMHGKHVMILECTCHIMSYLADVTNALSQSNGQGPSHLSVDGEERAIEVDSDWVEELAVEEEDSQAEDSDEDSLCNKLCTFTITQKEFMNQHWYHCHTCKMVDGVGVCTVCAKVCHKDHEISYAKYGSFFCDCGAKEDGSCLALVKRTPSSGMSSTMKESAFQSEPRISESLVRHASTSSPADKAKVTISDGKVADEEKPKKSSLCRTVEGCREELQNQANFSFAPLVLDMLNFLMDAIQTNFQQASAVGSSSRAQQALSELHTVEKAVEMTDQLMVPTLGSQEGAFENVRMNYSGDQGQTIRQLISAHVLRRVAMCVLSSPHGRRQHLAVSHEKGKITVLQLSALLKQADSSKRKLTLTRLASAPVPFTVLSLTGNPCKEDYLAVCGLKDCHVLTFSSSGSVSDHLVLHPQLATGNFIIKAVWLPGSQTELAIVTADFVKIYDLCVDALSPTFYFLLPSSKIRDVTFLFNEEGKNIIVIMSSAGYIYTQLMEEASSAQQGPFYVTNVLEINHEDLKDSNSQVAGGGVSVYYSHVLQMLFFSYCQGKSFAATISRTTLEVLQLFPINIKSSNGGSKTSPALCQWSEVMNHPGLVCCVQQTTGVPLVVMVKPDTFLIQEIKTLPAKAKIQDMVAIRHTACNEQQRTTMILLCEDGSLRIYMANVENTSYWLQPSLQPSSVISIMKPVRKRKTATITTRTSSQVTFPIDFFEHNQQLTDVEFGGNDLLQVYNAQQIKHRLNSTGMYVANTKPGGFTIEISNNNSTMVMTGMRIQIGTQAIERAPSYIEIFGRTMQLNLSRSRWFDFPFTREEALQADKKLNLFIGASVDPAGVTMIDAVKIYGKTKEQFGWPDEPPEEFPSASVSNICPSNLNQSNGTGDSDSAAPTTTSGTVLESSETESLTKLDRLVVSSLEALESCFAVGPIIEKERNKNAAQELATLLLSLPAPASVQQQSKSLLASLHTSRSAYHSHKDQALLSKAVQCLNTSSKEGKDLDPEVFQRLVITARSIAIMRPNNLVHFTESKLPQMETEGMDEGKEPQKQLEGDCCSFITQLVNHFWKLHASKPKNAFLAPACLPGLTHIEATVNALVDIIHGYCTCELDCINTASKIYMQMLLCPDPAVSFSCKQALIRVLRPRNKRRHVTLPSSPRSNTPMGDKDDDDDDDADEKMQSSGIPNGGHIRQESQEQSEVDHGDFEMVSESMVLETAENVNNGNPSPLEALLAGAEGFPPMLDIPPDADDETMVELAIALSLQQDQQAPASDDEGSTAATDGSTLRTSPADHGGSVGSESGGSAVDSVAGEHSVSGRSSAYGDATAEGHPAGPGSVSSSTGAISTTTGHQEGDGSEGEGEGETEGDVHTSNRLHMVRLMLLERLLQTLPQLRNVGGVRAIPYMQVILMLTTDLDGEDEKDKGALDNLLSQLIAELGMDKKDVSKKNERSALNEVHLVVMRLLSVFMSRTKSGSKSSICESSSLISSATAAALLSSGAVDYCLHVLKSLLEYWKSQQNDEEPVATSQLLKPHTTSSPPDMSPFFLRQYVKGHAADVFEAYTQLLTEMVLRLPYQIKKITDTNSRIPPPVFDHSWFYFLSEYLMIQQTPFVRRQVRKLLLFICGSKEKYRQLRDLHTLDSHVRGIKKLLEEQGIFLRASVVTASSGSALQYDTLISLMEHLKACAEIAAQRTINWQKFCIKDDSVLYFLLQVSFLVDEGVSPVLLQLLSCALCGSKVLAALAASSGSSSASSSSAPVAASSGQATTQSKSSTKKSKKEEKEKEKDGETSGSQEDQLCTALVNQLNKFADKETLIQFLRCFLLESNSSSVRWQAHCLTLHIYRNSSKSQQELLLDLMWSIWPELPAYGRKAAQFVDLLGYFSLKTPQTEKKLKEYSQKAVEILRTQNHILTNHPNSNIYNTLSGLVEFDGYYLESDPCLVCNNPEVPFCYIKLSSIKVDTRYTTTQQVVKLIGSHTISKVTVKIGDLKRTKMVRTINLYYNNRTVQAIVELKNKPARWHKAKKVQLTPGQTEVKIDLPLPIVASNLMIEFADFYENYQASTETLQCPRCSASVPANPGVCGNCGENVYQCHKCRSINYDEKDPFLCNACGFCKYARFDFMLYAKPCCAVDPIENEEDRKKAVSNINTLLDKADRVYHQLMGHRPQLENLLCKVNEAAPEKPQDDSGTAGGISSTSASVNRYILQLAQEYCGDCKNSFDELSKIIQKVFASRKELLEYDLQQREAATKSSRTSVQPTFTASQYRALSVLGCGHTSSTKCYGCASAVTEHCITLLRALATNPALRHILVSQGLIRELFDYNLRRGAAAMREEVRQLMCLLTRDNPEATQQMNDLIIGKVSTALKGHWANPDLASSLQYEMLLLTDSISKEDSCWELRLRCALSLFLMAVNIKTPVVVENITLMCLRILQKLIKPPAPTSKKNKDVPVEALTTVKPYCNEIHAQAQLWLKRDPKASYDAWKKCLPIRGIDGNGKAPSKSELRHLYLTEKYVWRWKQFLSRRGKRTSPLDLKLGHNNWLRQVLFTPATQAARQAACTIVEALATIPSRKQQVLDLLTSYLDELSIAGECAAEYLALYQKLITSAHWKVYLAARGVLPYVGNLITKEIARLLALEEATLSTDLQQGYALKSLTGLLSSFVEVESIKRHFKSRLVGTVLNGYLCLRKLVVQRTKLIDETQDMLLEMLEDMTTGTESETKAFMAVCIETAKRYNLDDYRTPVFIFERLCSIIYPEENEVTEFFVTLEKDPQQEDFLQGRMPGNPYSSNEPGIGPLMRDIKNKICQDCDLVALLEDDSGMELLVNNKIISLDLPVAEVYKKVWCTTNEGEPMRIVYRMRGLLGDATEEFIESLDSTTDEEEDEEEVYKMAGVMAQCGGLECMLNRLAGIRDFKQGRHLLTVLLKLFSYCVKVKVNRQQLVKLEMNTLNVMLGTLNLALVAEQESKDSGGAAVAEQVLSIMEIILDESNAEPLSEDKGNLLLTGDKDQLVMLLDQINSTFVRSNPSVLQGLLRIIPYLSFGEVEKMQILVERFKPYCNFDKYDEDHSGDDKVFLDCFCKIAAGIKNNSNGHQLKDLILQKGITQNALDYMKKHIPSAKNLDADIWKKFLSRPALPFILRLLRGLAIQHPGTQVLIGTDSIPNLHKLEQVSSDEGIGTLAENLLEALREHPDVNKKIDAARRETRAEKKRMAMAMRQKALGTLGMTTNEKGQVVTKTALLKQMEELIEEPGLTCCICREGYKFQPTKVLGIYTFTKRVALEEMENKPRKQQGYSTVSHFNIVHYDCHLAAVRLARGREEWESAALQNANTKCNGLLPVWGPHVPESAFATCLARHNTYLQECTGQREPTYQLNIHDIKLLFLRFAMEQSFSADTGGGGRESNIHLIPYIIHTVLYVLNTTRATSREEKNLQGFLEQPKEKWVESAFEVDGPYYFTVLALHILPPEQWRATRVEILRRLLVTSQARAVAPGGATRLTDKAVKDYSAYRSSLLFWALVDLIYNMFKKVPTSNTEGGWSCSLAEYIRHNDMPIYEAADKALKTFQEEFMPVETFSEFLDVAGLLSEITDPESFLKDLLNSVP

SEQ ID NO: 337559 - protein, 2058 aa, Artificial Sequence
  derived and/or modified sequence
LVRLTGDLIVWSDEMNPPQVIRTLLPLLLESSTESVAEISSNSLERILGPAESDEFLARVYEKLITGCYNILANHADPNSGLDESILEECLQYLEKQLESSQARKAMEEFFSDSGELVQIMMATANENLSAKFCNRVLKFFTKLFQLTEKSPNPSLLHLCGSLAQLACVEPVRLQAWLTRMTTSPPKDSDQLDVIQENRQLLQLLTTYIVRENSQVGEGVCAVLLGTLTPMATEMLANGDGTGFPELMVVMATLASAGQGAGHLQLHNAAVDWLSRCKKYLSQKNVVEKLNANVMHGKHVMILECTCHIMSYLADVTNALSQSNGQGPSHLSVDGEERAIEVDSDWVEELAVEEEDSQAEDSDEDSLCNKLCTFTITQKEFMNQHWYHCHTCKMVDGVGVCTVCAKVCHKDHEISYAKYGSFFCDCGAKEDGSCLALVKRTPSSGMSSTMKESAFQSEPRISESLVRHASTSSPADKAKVTISDGKVADEEKPKKSSLCRTVEGCREELQNQANFSFAPLVLDMLNFLMDAIQTNFQQASAVGSSSRAQQALSELHTVEKAVEMTDQLMVPTLGSQEGAFENVRMNYSGDQGQTIRQLISAHVLRRVAMCVLSSPHGRRQHLAVSHEKGKITVLQLSALLKQADSSKRKLTLTRLASAPVPFTVLSLTGNPCKEDYLAVCGLKDCHVLTFSSSGSVSDHLVLHPQLATGNFIIKAVWLPGSQTELAIVTADFVKIYDLCVDALSPTFYFLLPSSKIRDVTFLFNEEGKNIIVIMSSAGYIYTQLMEEASSAQQGPFYVTNVLEINHEDLKDSNSQVAGGGVSVYYSHVLQMLFFSYCQGKSFAATISRTTLEVLQLFPINIKSSNGGSKTSPALCQWSEVMNHPGLVCCVQQTTGVPLVVMVKPDTFLIQEIKTLPAKAKIQDMVAIRHTACNEQQRTTMILLCEDGSLRIYMANVENTSYWLQPSLQPSSVISIMKPVRKRKTATITTRTSSQVTFPIDFFEHNQQLTDVEFGGNDLLQVYNAQQIKHRLNSTGMYVANTKPGGFTIEISNNNSTMVMTGMRIQIGTQAIERAPSYIEIFGRTMQLNLSRSRWFDFPFTREEALQADKKLNLFIGASVDPAGVTMIDAVKIYGKTKEQFGWPDEPPEEFPSASVSNICPSNLNQSNGTGDSDSAAPTTTSGTVLESSETESLTKLDRLVVSSLEALESCFAVGPIIEKERNKNAAQELATLLLSLPAPASVQQQSKSLLASLHTSRSAYHSHKDQALLSKAVQCLNTSSKEGKDLDPEVFQRLVITARSIAIMRPNNLVHFTESKLPQMETEGMDEGKEPQKQLEGDCCSFITQLVNHFWKLHASKPKNAFLAPACLPGLTHIEATVNALVDIIHGYCTCELDCINTASKIYMQMLLCPDPAVSFSCKQALIRVLRPRNKRRHVTLPSSPRSNTPMGDKDDDDDDDADEKMQSSGIPNGGHIRQESQEQSEVDHGDFEMVSESMVLETAENVNNGNPSPLEALLAGAEGFPPMLDIPPDADDETMVELAIALSLQQDQQAPASDDEGSTAATDGSTLRTSPADHGGSVGSESGGSAVDSVAGEHSVSGRSSAYGDATAEGHPAGPGSVSSSTGAISTTTGHQEGDGSEGEGEGETEGDVHTSNRLHMVRLMLLERLLQTLPQLRNVGGVRAIPYMQVILMLTTDLDGEDEKDKGALDNLLSQLIAELGMDKKDVSKKNERSALNEVHLVVMRLLSVFMSRTKSGSKSSICESSSLISSATAAALLSSGAVDYCLHVLKSLLEYWKSQQNDEEPVATSQLLKPHTTSSPPDMSPFFLRQYVKGHAADVFEAYTQLLTEMVLRLPYQIKKITDTNSRIPPPVFDHSWFYFLSEYLMIQQTPFVRRQVRKLLLFICGSKEKYRQLRDLHTLDSHVRGIKKLLEEQGIFLRASVVTASSGSALQYDTLISLMEHLKACAEIAAQRTINWQKFCIKDDSVLYFLLQVSFLVDEGVSPVLLQLLSCALCGSKVLAALAASSGSSSASSSSAPVAASSGQATTQSKSSTKKSKK

SEQ ID NO: 337560 - DNA, 15480 bp, Artificial Sequence
  derived and/or modified sequence
atggccaccagcggcggcgaggaggccgccgccgccgcccccgcccccggcacccccgccaccggcgccgacaccacccccggctgggaggtggccgtgagacccctgctgagcgccagctacagcgccttcgagatgaaggagctgccccagctggtggccagcgtgatcgagagcgagagcgagatcctgcaccacgagaagcagtacgagcccttctacagcagcttcgtggccctgagcacccactacatcaccaccgtgtgcagcctgatccccagaaaccagctgcagagcgtggccgccgcctgcaaggtgctgatcgagttcagcctgctgagactggagaaccccgacgaggcctgcgccgtgagccagaagcacctgatcctgctgatcaagggcctgtgcaccggctgcagcagactggacagaaccgagatcatcaccttcaccgccatgatgaagagcgccaagctgccccagaccgtgaagaccctgagcgacgtggaggaccagaaggagctggccagccccgtgagccccgagctgagacagaaggaggtgcagatgaacttcctgaaccagctgaccagcgtgttcaaccccagaaccgtggccagccagcccatcagcacccagaccctggtggagggcgagaacgacgagcagagcagcaccgaccaggccagcgccatcaagaccaagaacgtgttcatcgcccagaacgtggccagcctgcaggagctgggcggcagcgagaagctgctgagagtgtgcctgaacctgccctacttcctgagatacatcaacagattccaggacgccgtgctggccaacagcttcttcatcatgcccgccaccgtggccgacgccaccgccgtgagaaacggcttccacagcctggtgatcgacgtgaccatggccctggacaccctgagcctgcccgtgctggagcccctgaaccccagcagactgcaggacgtgaccgtgctgagcctgagctgcctgtacgccggcgtgagcgtggccacctgcatggccatcctgcacgtgggcagcgcccagcaggtgagaaccggcagcaccagcagcaaggaggacgactacgagagcgacgccgccaccatcgtgcagaagtgcctggagatctacgacatgatcggccaggccatcagcagcagcagaagagccggcggcgagcactaccagaacttccagctgctgggcgcctggtgcctgctgaacagcctgttcctgatcctgaacctgagccccaccgccctggccgacaagggcaaggagaaggaccccctggccgccctgagagtgagagacatcctgagcagaaccaaggagggcgtgggcagccccaagctgggccccggcaagggccaccagggcttcggcgtgctgagcgtgatcctggccaaccacgccatcaagctgctgaccagcctgttccaggacctgcaggtggaggccctgcacaagggctgggagaccgacggcccccccgccgccctgagcatcatggcccagagcaccagcatccagagaatccagagactgatcgacagcgtgcccctgatgaacctgctgctgaccctgctgagcaccagctacagaaaggcctgcgtgctgcagagacagagaaagggcagcatgagcagcgacgccagcgccagcaccgacagcaacacctactacgaggacgacttcagcagcaccgaggaggacagcagccaggacgacgacagcgagcccatcctgggccagtggttcgaggagaccatcagccccagcaaggagaaggccgcccccccccccccccccccccccccccccctggagagcagccccagagtgaagagccccagcaagcaggcccccggcgagaagggcaacatcctggccagcagaaaggaccccgagctgttcctgggcctggccagcaacatcctgaacttcatcaccagcagcatgctgaacagcagaaacaacttcatcagaaactacctgagcgtgagcctgagcgagcaccacatggccaccctggccagcatcatcaaggaggtggacaaggacggcctgaagggcagcagcgacgaggagttcgccgccgccctgtaccacttcaaccacagcctggtgaccagcgacctgcagagccccaacctgcagaacaccctgctgcagcagctgggcgtggcccccttcagcgagggcccctggcccctgtacatccacccccagagcctgagcgtgctgagcagactgctgctgatctggcagcacaaggccagcgcccagggcgaccccgacgtgcccgagtgcctgaaggtgtgggacagattcctgagcaccatgaagcagaacgccctgcagggcgtggtgcccagcgagaccgaggacctgaacgtggagcacctgcagatgctgctgctgatcttccacaacttcaccgagaccggcagaagagccatcctgagcctgttcgtgcagatcatccaggagctgagcgtgaacatggacgcccagatgagattcgtgcccctgatcctggccagactgctgctgatcttcgactacctgctgcaccagtacagcaaggcccccgtgtacctgttcgagcaggtgcagcacaacctgctgagcccccccttcggctgggccagcggcagccaggacagcaacagcagaagagccaccacccccctgtaccacggcttcaaggaggtggaggagaactggagcaagcacttcagcagcgacgccgtgccccaccccagattctactgcgtgctgagccccgaggccagcgaggacgacctgaacagactggacagcgtggcctgcgacgtgctgttcagcaagctggtgaagtacgacgagctgtacgccgccctgaccgccctgctggccgccggcagccagctggacaccgtgagaagaaaggagaacaagaacgtgaccgccctggaggcctgcgccctgcagtactacttcctgatcctgtggagaatcctgggcatcctgccccccagcaagacctacatcaaccagctgagcatgaacagccccgagatgagcgagtgcgacatcctgcacaccctgagatggagcagcagactgagaatcagcagctacgtgaactggatcaaggaccacctgatcaagcagggcatgaaggccgagcacgccagcagcctgctggagctggccagcaccaccaagtgcagcagcgtgaagtacgacgtggagatcgtggaggagtacttcgccagacagatcagcagcttctgcagcatcgactgcaccaccatcctgcagctgcacgagatccccagcctgcagagcatctacaccctggacgccgccatcagcaaggtgcaggtgagcctggacgagcacttcagcaagatggccgccgagaccgacccccacaagagcagcgagatcaccaagaacctgctgcccgccaccctgcagctgatcgacacctacgccagcttcaccagagcctacctgctgcagaacttcaacgaggagggcaccaccgagaagcccagcaaggagaagctgcagggcttcgccgccgtgctggccatcggcagcagcagatgcaaggccaacaccctgggccccaccctggtgcagaacctgcccagcagcgtgcagaccgtgtgcgagagctggaacaacatcaacaccaacgagttccccaacatcggcagctggagaaacgccttcgccaacgacaccatccccagcgagagctacatcagcgccgtgcaggccgcccacctgggcaccctgtgcagccagagcctgcccctggccgccagcctgaagcacaccctgctgagcctggtgagactgaccggcgacctgatcgtgtggagcgacgagatgaaccccccccaggtgatcagaaccctgctgcccctgctgctggagagcagcaccgagagcgtggccgagatcagcagcaacagcctggagagaatcctgggccccgccgagagcgacgagttcctggccagagtgtacgagaagctgatcaccggctgctacaacatcctggccaaccacgccgaccccaacagcggcctggacgagagcatcctggaggagtgcctgcagtacctggagaagcagctggagagcagccaggccagaaaggccatggaggagttcttcagcgacagcggcgagctggtgcagatcatgatggccaccgccaacgagaacctgagcgccaagttctgcaacagagtgctgaagttcttcaccaagctgttccagctgaccgagaagagccccaaccccagcctgctgcacctgtgcggcagcctggcccagctggcctgcgtggagcccgtgagactgcaggcctggctgaccagaatgaccaccagcccccccaaggacagcgaccagctggacgtgatccaggagaacagacagctgctgcagctgctgaccacctacatcgtgagagagaacagccaggtgggcgagggcgtgtgcgccgtgctgctgggcaccctgacccccatggccaccgagatgctggccaacggcgacggcaccggcttccccgagctgatggtggtgatggccaccctggccagcgccggccagggcgccggccacctgcagctgcacaacgccgccgtggactggctgagcagatgcaagaagtacctgagccagaagaacgtggtggagaagctgaacgccaacgtgatgcacggcaagcacgtgatgatcctggagtgcacctgccacatcatgagctacctggccgacgtgaccaacgccctgagccagagcaacggccagggccccagccacctgagcgtggacggcgaggagagagccatcgaggtggacagcgactgggtggaggagctggccgtggaggaggaggacagccaggccgaggacagcgacgaggacagcctgtgcaacaagctgtgcaccttcaccatcacccagaaggagttcatgaaccagcactggtaccactgccacacctgcaagatggtggacggcgtgggcgtgtgcaccgtgtgcgccaaggtgtgccacaaggaccacgagatcagctacgccaagtacggcagcttcttctgcgactgcggcgccaaggaggacggcagctgcctggccctggtgaagagaacccccagcagcggcatgagcagcaccatgaaggagagcgccttccagagcgagcccagaatcagcgagagcctggtgagacacgccagcaccagcagccccgccgacaaggccaaggtgaccatcagcgacggcaaggtggccgacgaggagaagcccaagaagagcagcctgtgcagaaccgtggagggctgcagagaggagctgcagaaccaggccaacttcagcttcgcccccctggtgctggacatgctgaacttcctgatggacgccatccagaccaacttccagcaggccagcgccgtgggcagcagcagcagagcccagcaggccctgagcgagctgcacaccgtggagaaggccgtggagatgaccgaccagctgatggtgcccaccctgggcagccaggagggcgccttcgagaacgtgagaatgaactacagcggcgaccagggccagaccatcagacagctgatcagcgcccacgtgctgagaagagtggccatgtgcgtgctgagcagcccccacggcagaagacagcacctggccgtgagccacgagaagggcaagatcaccgtgctgcagctgagcgccctgctgaagcaggccgacagcagcaagagaaagctgaccctgaccagactggccagcgcccccgtgcccttcaccgtgctgagcctgaccggcaacccctgcaaggaggactacctggccgtgtgcggcctgaaggactgccacgtgctgaccttcagcagcagcggcagcgtgagcgaccacctggtgctgcacccccagctggccaccggcaacttcatcatcaaggccgtgtggctgcccggcagccagaccgagctggccatcgtgaccgccgacttcgtgaagatctacgacctgtgcgtggacgccctgagccccaccttctacttcctgctgcccagcagcaagatcagagacgtgaccttcctgttcaacgaggagggcaagaacatcatcgtgatcatgagcagcgccggctacatctacacccagctgatggaggaggccagcagcgcccagcagggccccttctacgtgaccaacgtgctggagatcaaccacgaggacctgaaggacagcaacagccaggtggccggcggcggcgtgagcgtgtactacagccacgtgctgcagatgctgttcttcagctactgccagggcaagagcttcgccgccaccatcagcagaaccaccctggaggtgctgcagctgttccccatcaacatcaagagcagcaacggcggcagcaagaccagccccgccctgtgccagtggagcgaggtgatgaaccaccccggcctggtgtgctgcgtgcagcagaccaccggcgtgcccctggtggtgatggtgaagcccgacaccttcctgatccaggagatcaagaccctgcccgccaaggccaagatccaggacatggtggccatcagacacaccgcctgcaacgagcagcagagaaccaccatgatcctgctgtgcgaggacggcagcctgagaatctacatggccaacgtggagaacaccagctactggctgcagcccagcctgcagcccagcagcgtgatcagcatcatgaagcccgtgagaaagagaaagaccgccaccatcaccaccagaaccagcagccaggtgaccttccccatcgacttcttcgagcacaaccagcagctgaccgacgtggagttcggcggcaacgacctgctgcaggtgtacaacgcccagcagatcaagcacagactgaacagcaccggcatgtacgtggccaacaccaagcccggcggcttcaccatcgagatcagcaacaacaacagcaccatggtgatgaccggcatgagaatccagatcggcacccaggccatcgagagagcccccagctacatcgagatcttcggcagaaccatgcagctgaacctgagcagaagcagatggttcgacttccccttcaccagagaggaggccctgcaggccgacaagaagctgaacctgttcatcggcgccagcgtggaccccgccggcgtgaccatgatcgacgccgtgaagatctacggcaagaccaaggagcagttcggctggcccgacgagccccccgaggagttccccagcgccagcgtgagcaacatctgccccagcaacctgaaccagagcaacggcaccggcgacagcgacagcgccgcccccaccaccaccagcggcaccgtgctggagagcagcgagaccgagagcctgaccaagctggacagactggtggtgagcagcctggaggccctggagagctgcttcgccgtgggccccatcatcgagaaggagagaaacaagaacgccgcccaggagctggccaccctgctgctgagcctgcccgcccccgccagcgtgcagcagcagagcaagagcctgctggccagcctgcacaccagcagaagcgcctaccacagccacaaggaccaggccctgctgagcaaggccgtgcagtgcctgaacaccagcagcaaggagggcaaggacctggaccccgaggtgttccagagactggtgatcaccgccagaagcatcgccatcatgagacccaacaacctggtgcacttcaccgagagcaagctgccccagatggagaccgagggcatggacgagggcaaggagccccagaagcagctggagggcgactgctgcagcttcatcacccagctggtgaaccacttctggaagctgcacgccagcaagcccaagaacgccttcctggcccccgcctgcctgcccggcctgacccacatcgaggccaccgtgaacgccctggtggacatcatccacggctactgcacctgcgagctggactgcatcaacaccgccagcaagatctacatgcagatgctgctgtgccccgaccccgccgtgagcttcagctgcaagcaggccctgatcagagtgctgagacccagaaacaagagaagacacgtgaccctgcccagcagccccagaagcaacacccccatgggcgacaaggacgacgacgacgacgacgacgccgacgagaagatgcagagcagcggcatccccaacggcggccacatcagacaggagagccaggagcagagcgaggtggaccacggcgacttcgagatggtgagcgagagcatggtgctggagaccgccgagaacgtgaacaacggcaaccccagccccctggaggccctgctggccggcgccgagggcttcccccccatgctggacatcccccccgacgccgacgacgagaccatggtggagctggccatcgccctgagcctgcagcaggaccagcaggcccccgccagcgacgacgagggcagcaccgccgccaccgacggcagcaccctgagaaccagccccgccgaccacggcggcagcgtgggcagcgagagcggcggcagcgccgtggacagcgtggccggcgagcacagcgtgagcggcagaagcagcgcctacggcgacgccaccgccgagggccaccccgccggccccggcagcgtgagcagcagcaccggcgccatcagcaccaccaccggccaccaggagggcgacggcagcgagggcgagggcgagggcgagaccgagggcgacgtgcacaccagcaacagactgcacatggtgagactgatgctgctggagagactgctgcagaccctgccccagctgagaaacgtgggcggcgtgagagccatcccctacatgcaggtgatcctgatgctgaccaccgacctggacggcgaggacgagaaggacaagggcgccctggacaacctgctgagccagctgatcgccgagctgggcatggacaagaaggacgtgagcaagaagaacgagagaagcgccctgaacgaggtgcacctggtggtgatgagactgctgagcgtgttcatgagcagaaccaagagcggcagcaagagcagcatctgcgagagcagcagcctgatcagcagcgccaccgccgccgccctgctgagcagcggcgccgtggactactgcctgcacgtgctgaagagcctgctggagtactggaagagccagcagaacgacgaggagcccgtggccaccagccagctgctgaagccccacaccaccagcagcccccccgacatgagccccttcttcctgagacagtacgtgaagggccacgccgccgacgtgttcgaggcctacacccagctgctgaccgagatggtgctgagactgccctaccagatcaagaagatcaccgacaccaacagcagaatccccccccccgtgttcgaccacagctggttctacttcctgagcgagtacctgatgatccagcagacccccttcgtgagaagacaggtgagaaagctgctgctgttcatctgcggcagcaaggagaagtacagacagctgagagacctgcacaccctggacagccacgtgagaggcatcaagaagctgctggaggagcagggcatcttcctgagagccagcgtggtgaccgccagcagcggcagcgccctgcagtacgacaccctgatcagcctgatggagcacctgaaggcctgcgccgagatcgccgcccagagaaccatcaactggcagaagttctgcatcaaggacgacagcgtgctgtacttcctgctgcaggtgagcttcctggtggacgagggcgtgagccccgtgctgctgcagctgctgagctgcgccctgtgcggcagcaaggtgctggccgccctggccgccagcagcggcagcagcagcgccagcagcagcagcgcccccgtggccgccagcagcggccaggccaccacccagagcaagagcagcaccaagaagagcaagaaggaggagaaggagaaggagaaggacggcgagaccagcggcagccaggaggaccagctgtgcaccgccctggtgaaccagctgaacaagttcgccgacaaggagaccctgatccagttcctgagatgcttcctgctggagagcaacagcagcagcgtgagatggcaggcccactgcctgaccctgcacatctacagaaacagcagcaagagccagcaggagctgctgctggacctgatgtggagcatctggcccgagctgcccgcctacggcagaaaggccgcccagttcgtggacctgctgggctacttcagcctgaagaccccccagaccgagaagaagctgaaggagtacagccagaaggccgtggagatcctgagaacccagaaccacatcctgaccaaccaccccaacagcaacatctacaacaccctgagcggcctggtggagttcgacggctactacctggagagcgacccctgcctggtgtgcaacaaccccgaggtgcccttctgctacatcaagctgagcagcatcaaggtggacaccagatacaccaccacccagcaggtggtgaagctgatcggcagccacaccatcagcaaggtgaccgtgaagatcggcgacctgaagagaaccaagatggtgagaaccatcaacctgtactacaacaacagaaccgtgcaggccatcgtggagctgaagaacaagcccgccagatggcacaaggccaagaaggtgcagctgacccccggccagaccgaggtgaagatcgacctgcccctgcccatcgtggccagcaacctgatgatcgagttcgccgacttctacgagaactaccaggccagcaccgagaccctgcagtgccccagatgcagcgccagcgtgcccgccaaccccggcgtgtgcggcaactgcggcgagaacgtgtaccagtgccacaagtgcagaagcatcaactacgacgagaaggaccccttcctgtgcaacgcctgcggcttctgcaagtacgccagattcgacttcatgctgtacgccaagccctgctgcgccgtggaccccatcgagaacgaggaggacagaaagaaggccgtgagcaacatcaacaccctgctggacaaggccgacagagtgtaccaccagctgatgggccacagaccccagctggagaacctgctgtgcaaggtgaacgaggccgcccccgagaagccccaggacgacagcggcaccgccggcggcatcagcagcaccagcgccagcgtgaacagatacatcctgcagctggcccaggagtactgcggcgactgcaagaacagcttcgacgagctgagcaagatcatccagaaggtgttcgccagcagaaaggagctgctggagtacgacctgcagcagagagaggccgccaccaagagcagcagaaccagcgtgcagcccaccttcaccgccagccagtacagagccctgagcgtgctgggctgcggccacaccagcagcaccaagtgctacggctgcgccagcgccgtgaccgagcactgcatcaccctgctgagagccctggccaccaaccccgccctgagacacatcctggtgagccagggcctgatcagagagctgttcgactacaacctgagaagaggcgccgccgccatgagagaggaggtgagacagctgatgtgcctgctgaccagagacaaccccgaggccacccagcagatgaacgacctgatcatcggcaaggtgagcaccgccctgaagggccactgggccaaccccgacctggccagcagcctgcagtacgagatgctgctgctgaccgacagcatcagcaaggaggacagctgctgggagctgagactgagatgcgccctgagcctgttcctgatggccgtgaacatcaagacccccgtggtggtggagaacatcaccctgatgtgcctgagaatcctgcagaagctgatcaagccccccgcccccaccagcaagaagaacaaggacgtgcccgtggaggccctgaccaccgtgaagccctactgcaacgagatccacgcccaggcccagctgtggctgaagagagaccccaaggccagctacgacgcctggaagaagtgcctgcccatcagaggcatcgacggcaacggcaaggcccccagcaagagcgagctgagacacctgtacctgaccgagaagtacgtgtggagatggaagcagttcctgagcagaagaggcaagagaaccagccccctggacctgaagctgggccacaacaactggctgagacaggtgctgttcacccccgccacccaggccgccagacaggccgcctgcaccatcgtggaggccctggccaccatccccagcagaaagcagcaggtgctggacctgctgaccagctacctggacgagctgagcatcgccggcgagtgcgccgccgagtacctggccctgtaccagaagctgatcaccagcgcccactggaaggtgtacctggccgccagaggcgtgctgccctacgtgggcaacctgatcaccaaggagatcgccagactgctggccctggaggaggccaccctgagcaccgacctgcagcagggctacgccctgaagagcctgaccggcctgctgagcagcttcgtggaggtggagagcatcaagagacacttcaagagcagactggtgggcaccgtgctgaacggctacctgtgcctgagaaagctggtggtgcagagaaccaagctgatcgacgagacccaggacatgctgctggagatgctggaggacatgaccaccggcaccgagagcgagaccaaggccttcatggccgtgtgcatcgagaccgccaagagatacaacctggacgactacagaacccccgtgttcatcttcgagagactgtgcagcatcatctaccccgaggagaacgaggtgaccgagttcttcgtgaccctggagaaggacccccagcaggaggacttcctgcagggcagaatgcccggcaacccctacagcagcaacgagcccggcatcggccccctgatgagagacatcaagaacaagatctgccaggactgcgacctggtggccctgctggaggacgacagcggcatggagctgctggtgaacaacaagatcatcagcctggacctgcccgtggccgaggtgtacaagaaggtgtggtgcaccaccaacgagggcgagcccatgagaatcgtgtacagaatgagaggcctgctgggcgacgccaccgaggagttcatcgagagcctggacagcaccaccgacgaggaggaggacgaggaggaggtgtacaagatggccggcgtgatggcccagtgcggcggcctggagtgcatgctgaacagactggccggcatcagagacttcaagcagggcagacacctgctgaccgtgctgctgaagctgttcagctactgcgtgaaggtgaaggtgaacagacagcagctggtgaagctggagatgaacaccctgaacgtgatgctgggcaccctgaacctggccctggtggccgagcaggagagcaaggacagcggcggcgccgccgtggccgagcaggtgctgagcatcatggagatcatcctggacgagagcaacgccgagcccctgagcgaggacaagggcaacctgctgctgaccggcgacaaggaccagctggtgatgctgctggaccagatcaacagcaccttcgtgagaagcaaccccagcgtgctgcagggcctgctgagaatcatcccctacctgagcttcggcgaggtggagaagatgcagatcctggtggagagattcaagccctactgcaacttcgacaagtacgacgaggaccacagcggcgacgacaaggtgttcctggactgcttctgcaagatcgccgccggcatcaagaacaacagcaacggccaccagctgaaggacctgatcctgcagaagggcatcacccagaacgccctggactacatgaagaagcacatccccagcgccaagaacctggacgccgacatctggaagaagttcctgagcagacccgccctgcccttcatcctgagactgctgagaggcctggccatccagcaccccggcacccaggtgctgatcggcaccgacagcatccccaacctgcacaagctggagcaggtgagcagcgacgagggcatcggcaccctggccgagaacctgctggaggccctgagagagcaccccgacgtgaacaagaagatcgacgccgccagaagagagaccagagccgagaagaagagaatggccatggccatgagacagaaggccctgggcaccctgggcatgaccaccaacgagaagggccaggtggtgaccaagaccgccctgctgaagcagatggaggagctgatcgaggagcccggcctgacctgctgcatctgcagagagggctacaagttccagcccaccaaggtgctgggcatctacaccttcaccaagagagtggccctggaggagatggagaacaagcccagaaagcagcagggctacagcaccgtgagccacttcaacatcgtgcactacgactgccacctggccgccgtgagactggccagaggcagagaggagtgggagagcgccgccctgcagaacgccaacaccaagtgcaacggcctgctgcccgtgtggggcccccacgtgcccgagagcgccttcgccacctgcctggccagacacaacacctacctgcaggagtgcaccggccagagagagcccacctaccagctgaacatccacgacatcaagctgctgttcctgagattcgccatggagcagagcttcagcgccgacaccggcggcggcggcagagagagcaacatccacctgatcccctacatcatccacaccgtgctgtacgtgctgaacaccaccagagccaccagcagagaggagaagaacctgcagggcttcctggagcagcccaaggagaagtgggtggagagcgccttcgaggtggacggcccctactacttcaccgtgctggccctgcacatcctgccccccgagcagtggagagccaccagagtggagatcctgagaagactgctggtgaccagccaggccagagccgtggcccccggcggcgccaccagactgaccgacaaggccgtgaaggactacagcgcctacagaagcagcctgctgttctgggccctggtggacctgatctacaacatgttcaagaaggtgcccaccagcaacaccgagggcggctggagctgcagcctggccgagtacatcagacacaacgacatgcccatctacgaggccgccgacaaggccctgaagaccttccaggaggagttcatgcccgtggagaccttcagcgagttcctggacgtggccggcctgctgagcgagatcaccgaccccgagagcttcctgaaggacctgctgaacagcgtgccctag

SEQ ID NO: 337561 - DNA, 6177 bp, Artificial Sequence
  derived and/or modified sequence
ctggtgagactgaccggcgacctgatcgtgtggagcgacgagatgaaccccccccaggtgatcagaaccctgctgcccctgctgctggagagcagcaccgagagcgtggccgagatcagcagcaacagcctggagagaatcctgggccccgccgagagcgacgagttcctggccagagtgtacgagaagctgatcaccggctgctacaacatcctggccaaccacgccgaccccaacagcggcctggacgagagcatcctggaggagtgcctgcagtacctggagaagcagctggagagcagccaggccagaaaggccatggaggagttcttcagcgacagcggcgagctggtgcagatcatgatggccaccgccaacgagaacctgagcgccaagttctgcaacagagtgctgaagttcttcaccaagctgttccagctgaccgagaagagccccaaccccagcctgctgcacctgtgcggcagcctggcccagctggcctgcgtggagcccgtgagactgcaggcctggctgaccagaatgaccaccagcccccccaaggacagcgaccagctggacgtgatccaggagaacagacagctgctgcagctgctgaccacctacatcgtgagagagaacagccaggtgggcgagggcgtgtgcgccgtgctgctgggcaccctgacccccatggccaccgagatgctggccaacggcgacggcaccggcttccccgagctgatggtggtgatggccaccctggccagcgccggccagggcgccggccacctgcagctgcacaacgccgccgtggactggctgagcagatgcaagaagtacctgagccagaagaacgtggtggagaagctgaacgccaacgtgatgcacggcaagcacgtgatgatcctggagtgcacctgccacatcatgagctacctggccgacgtgaccaacgccctgagccagagcaacggccagggccccagccacctgagcgtggacggcgaggagagagccatcgaggtggacagcgactgggtggaggagctggccgtggaggaggaggacagccaggccgaggacagcgacgaggacagcctgtgcaacaagctgtgcaccttcaccatcacccagaaggagttcatgaaccagcactggtaccactgccacacctgcaagatggtggacggcgtgggcgtgtgcaccgtgtgcgccaaggtgtgccacaaggaccacgagatcagctacgccaagtacggcagcttcttctgcgactgcggcgccaaggaggacggcagctgcctggccctggtgaagagaacccccagcagcggcatgagcagcaccatgaaggagagcgccttccagagcgagcccagaatcagcgagagcctggtgagacacgccagcaccagcagccccgccgacaaggccaaggtgaccatcagcgacggcaaggtggccgacgaggagaagcccaagaagagcagcctgtgcagaaccgtggagggctgcagagaggagctgcagaaccaggccaacttcagcttcgcccccctggtgctggacatgctgaacttcctgatggacgccatccagaccaacttccagcaggccagcgccgtgggcagcagcagcagagcccagcaggccctgagcgagctgcacaccgtggagaaggccgtggagatgaccgaccagctgatggtgcccaccctgggcagccaggagggcgccttcgagaacgtgagaatgaactacagcggcgaccagggccagaccatcagacagctgatcagcgcccacgtgctgagaagagtggccatgtgcgtgctgagcagcccccacggcagaagacagcacctggccgtgagccacgagaagggcaagatcaccgtgctgcagctgagcgccctgctgaagcaggccgacagcagcaagagaaagctgaccctgaccagactggccagcgcccccgtgcccttcaccgtgctgagcctgaccggcaacccctgcaaggaggactacctggccgtgtgcggcctgaaggactgccacgtgctgaccttcagcagcagcggcagcgtgagcgaccacctggtgctgcacccccagctggccaccggcaacttcatcatcaaggccgtgtggctgcccggcagccagaccgagctggccatcgtgaccgccgacttcgtgaagatctacgacctgtgcgtggacgccctgagccccaccttctacttcctgctgcccagcagcaagatcagagacgtgaccttcctgttcaacgaggagggcaagaacatcatcgtgatcatgagcagcgccggctacatctacacccagctgatggaggaggccagcagcgcccagcagggccccttctacgtgaccaacgtgctggagatcaaccacgaggacctgaaggacagcaacagccaggtggccggcggcggcgtgagcgtgtactacagccacgtgctgcagatgctgttcttcagctactgccagggcaagagcttcgccgccaccatcagcagaaccaccctggaggtgctgcagctgttccccatcaacatcaagagcagcaacggcggcagcaagaccagccccgccctgtgccagtggagcgaggtgatgaaccaccccggcctggtgtgctgcgtgcagcagaccaccggcgtgcccctggtggtgatggtgaagcccgacaccttcctgatccaggagatcaagaccctgcccgccaaggccaagatccaggacatggtggccatcagacacaccgcctgcaacgagcagcagagaaccaccatgatcctgctgtgcgaggacggcagcctgagaatctacatggccaacgtggagaacaccagctactggctgcagcccagcctgcagcccagcagcgtgatcagcatcatgaagcccgtgagaaagagaaagaccgccaccatcaccaccagaaccagcagccaggtgaccttccccatcgacttcttcgagcacaaccagcagctgaccgacgtggagttcggcggcaacgacctgctgcaggtgtacaacgcccagcagatcaagcacagactgaacagcaccggcatgtacgtggccaacaccaagcccggcggcttcaccatcgagatcagcaacaacaacagcaccatggtgatgaccggcatgagaatccagatcggcacccaggccatcgagagagcccccagctacatcgagatcttcggcagaaccatgcagctgaacctgagcagaagcagatggttcgacttccccttcaccagagaggaggccctgcaggccgacaagaagctgaacctgttcatcggcgccagcgtggaccccgccggcgtgaccatgatcgacgccgtgaagatctacggcaagaccaaggagcagttcggctggcccgacgagccccccgaggagttccccagcgccagcgtgagcaacatctgccccagcaacctgaaccagagcaacggcaccggcgacagcgacagcgccgcccccaccaccaccagcggcaccgtgctggagagcagcgagaccgagagcctgaccaagctggacagactggtggtgagcagcctggaggccctggagagctgcttcgccgtgggccccatcatcgagaaggagagaaacaagaacgccgcccaggagctggccaccctgctgctgagcctgcccgcccccgccagcgtgcagcagcagagcaagagcctgctggccagcctgcacaccagcagaagcgcctaccacagccacaaggaccaggccctgctgagcaaggccgtgcagtgcctgaacaccagcagcaaggagggcaaggacctggaccccgaggtgttccagagactggtgatcaccgccagaagcatcgccatcatgagacccaacaacctggtgcacttcaccgagagcaagctgccccagatggagaccgagggcatggacgagggcaaggagccccagaagcagctggagggcgactgctgcagcttcatcacccagctggtgaaccacttctggaagctgcacgccagcaagcccaagaacgccttcctggcccccgcctgcctgcccggcctgacccacatcgaggccaccgtgaacgccctggtggacatcatccacggctactgcacctgcgagctggactgcatcaacaccgccagcaagatctacatgcagatgctgctgtgccccgaccccgccgtgagcttcagctgcaagcaggccctgatcagagtgctgagacccagaaacaagagaagacacgtgaccctgcccagcagccccagaagcaacacccccatgggcgacaaggacgacgacgacgacgacgacgccgacgagaagatgcagagcagcggcatccccaacggcggccacatcagacaggagagccaggagcagagcgaggtggaccacggcgacttcgagatggtgagcgagagcatggtgctggagaccgccgagaacgtgaacaacggcaaccccagccccctggaggccctgctggccggcgccgagggcttcccccccatgctggacatcccccccgacgccgacgacgagaccatggtggagctggccatcgccctgagcctgcagcaggaccagcaggcccccgccagcgacgacgagggcagcaccgccgccaccgacggcagcaccctgagaaccagccccgccgaccacggcggcagcgtgggcagcgagagcggcggcagcgccgtggacagcgtggccggcgagcacagcgtgagcggcagaagcagcgcctacggcgacgccaccgccgagggccaccccgccggccccggcagcgtgagcagcagcaccggcgccatcagcaccaccaccggccaccaggagggcgacggcagcgagggcgagggcgagggcgagaccgagggcgacgtgcacaccagcaacagactgcacatggtgagactgatgctgctggagagactgctgcagaccctgccccagctgagaaacgtgggcggcgtgagagccatcccctacatgcaggtgatcctgatgctgaccaccgacctggacggcgaggacgagaaggacaagggcgccctggacaacctgctgagccagctgatcgccgagctgggcatggacaagaaggacgtgagcaagaagaacgagagaagcgccctgaacgaggtgcacctggtggtgatgagactgctgagcgtgttcatgagcagaaccaagagcggcagcaagagcagcatctgcgagagcagcagcctgatcagcagcgccaccgccgccgccctgctgagcagcggcgccgtggactactgcctgcacgtgctgaagagcctgctggagtactggaagagccagcagaacgacgaggagcccgtggccaccagccagctgctgaagccccacaccaccagcagcccccccgacatgagccccttcttcctgagacagtacgtgaagggccacgccgccgacgtgttcgaggcctacacccagctgctgaccgagatggtgctgagactgccctaccagatcaagaagatcaccgacaccaacagcagaatccccccccccgtgttcgaccacagctggttctacttcctgagcgagtacctgatgatccagcagacccccttcgtgagaagacaggtgagaaagctgctgctgttcatctgcggcagcaaggagaagtacagacagctgagagacctgcacaccctggacagccacgtgagaggcatcaagaagctgctggaggagcagggcatcttcctgagagccagcgtggtgaccgccagcagcggcagcgccctgcagtacgacaccctgatcagcctgatggagcacctgaaggcctgcgccgagatcgccgcccagagaaccatcaactggcagaagttctgcatcaaggacgacagcgtgctgtacttcctgctgcaggtgagcttcctggtggacgagggcgtgagccccgtgctgctgcagctgctgagctgcgccctgtgcggcagcaaggtgctggccgccctggccgccagcagcggcagcagcagcgccagcagcagcagcgcccccgtggccgccagcagcggccaggccaccacccagagcaagagcagcaccaagaagagcaagaagtag

SEQ ID NO: 337562 - DNA, 15480 bp, Artificial Sequence
  derived and/or modified sequence
atggcaacttcaggcggagaggaggccgccgccgctgccccagcgcccggcactcccgcgactggagcagacactactcccgggtgggaagtggctgtgagacctctcctttctgcctcctactccgctttcgagatgaaggagctgcctcaacttgtcgctagtgtgattgagtccgagtctgagatcctccatcatgagaagcaatacgagccattctacagttccttcgtggctctgagtacgcactacattaccaccgtgtgcagtctgatcccgcgaaatcagctgcaatcggttgctgctgcgtgcaaggtccttatcgagttcagcttattacggctggaaaatccggacgaggcctgcgcggtctcacaaaaacaccttatcctgctcatcaagggtctgtgcacaggctgtagcaggttggatcggaccgaaatcattacatttacagccatgatgaagtccgcaaaactaccacagacagttaagacactctccgatgtggaggatcagaaagagctcgcatccccagtgtctcccgagctccgccagaaggaagtccagatgaactttctgaaccagctgacatctgtcttcaatccaaggaccgtggcctcacagcctatttctacccaaaccctagtcgaaggcgagaacgacgagcagagttctacagaccaggcctctgcgatcaagactaaaaacgtcttcatagcacagaatgtcgcaagccttcaagagctgggtggctctgaaaagttgctcagggtgtgtctaaatctgccttatttcctgcgctacatcaatcgtttccaagatgccgtgctggcgaattcattctttatcatgcccgccacggttgcggacgccactgccgtgcgtaacggcttccacagtttggtcattgacgttacaatggccctggacacactcagtctgcctgttttggagcctctcaacccttcacgcctgcaggacgtaaccgttctgagtctttcctgcctgtatgcaggtgtgagtgtggcaacgtgcatggctatcctccacgtgggaagcgcccagcaggtgaggactggttcgacctcctccaaagaggatgactacgaatccgatgcggcaaccattgtacagaagtgtctcgagatctacgatatgatcgggcaggcgatttcctcctccaggcgcgccggaggcgagcattatcaaaattttcagctcctgggtgcttggtgtttgctgaacagtcttttccttattctgaacttgtccccaacggccctcgctgacaagggcaaggaaaaggatccgctggccgctctgagggtccgcgatattctcagccgcaccaaagagggagtgggaagtccgaaacttggtccaggaaagggtcaccagggcttcggagtgttgagtgtaatcctcgctaaccacgccatcaagctgttgactagcctctttcaggatttgcaggtggaagcactgcacaaagggtgggagaccgacggcccccccgctgccctgagtattatggcccagtccaccagcatccaacgcattcaacggttgatcgattctgtgcccctgatgaacctgctactgactttattgagcacctcctaccgcaaagcatgcgtgctgcagcggcaacgcaagggtagcatgagttccgatgcctcggcctccacggattccaacacatactatgaagacgacttctcgagtactgaggaggactcatcccaagacgacgattcagagcctatactaggccagtggtttgaagaaacgatcagccctagcaaggaaaaggctgccccgcctccccctccgccaccacccccactggagagctctccacgtgtaaagtccccctcgaaacaggccccaggcgagaagggaaacattctcgccagccgtaaagacccagaactttttctcgggttggcaagcaacattctgaatttcattacgtccagcatgcttaattccaggaacaacttcattaggaattacctgtcggtctcattgagtgagcatcacatggcgactctcgcaagtatcattaaggaagttgacaaagatgggctcaaagggtcaagtgatgaagagtttgctgctgctctgtatcatttcaatcacagtttggtgacatccgacctgcagtccccgaatctccagaacaccctgcttcagcagctgggggtggcgccgttctccgaggggccctggcctttatacatacacccacagtctctatcggttctgagccgcttgctcctgatatggcagcataaggcgagcgcacagggtgaccctgacgttccggagtgcctgaaggtctgggataggttcctctctactatgaaacagaacgccttgcagggagtcgtcccctcggagacggaggatttgaatgtcgagcatctccaaatgctactgctcatattccacaacttcaccgaaactggacgtagagctattctctcgttgttcgtccaaattattcaggaactgtctgtgaatatggacgcccaaatgagatttgtgcccctgattctcgccaggctgctgctgatcttcgattacctgttgcatcaatacagcaaagcccctgtctacctgttcgagcaggttcaacacaacctactgagccctccctttgggtgggctagcggcagtcaggatagcaactccagaagagcgacaacacctctgtatcacggatttaaagaggtagaggagaactggtctaagcacttttcatccgatgcagtcccgcacccacggttttattgcgtgttgtccccggaggcttctgaagatgatctcaaccgcctggattccgttgcctgcgacgtcctcttttccaaactggtcaagtatgacgagctttacgccgcccttactgcccttcttgccgccggaagccaactggacacagtgcggcgtaaggagaataaaaatgtgactgctcttgaggcctgcgccctgcagtactactttctgatcctgtggcggatacttgggatactcccacccagcaaaacatacattaaccagctttctatgaatagccccgagatgagtgaatgcgatatcctacatactttgcggtggtcgagccgactgaggatcagttcgtacgtcaactggataaaagaccatttgatcaagcagggcatgaaggccgagcacgcttcttcactgcttgagctggcatccacaacgaaatgctcttctgttaagtacgacgtggagatagtagaggagtacttcgccagacagatctccagtttttgcagcattgattgcaccaccatcctccagcttcatgagattccttccctgcaatctatttacaccctggatgctgccattagcaaagtacaagtctctctcgatgagcacttttccaagatggcagctgagactgacccacataaatcatcggaaatcacgaaaaaccttctgcccgcgacgttgcagttgatcgacacatacgccagcttcactagggcatacctcctgcagaatttcaatgaagagggtacaacggagaagcccagcaaagagaagcttcagggtttcgccgcggttctagccatcggaagttcccgctgcaaggccaacaccctgggcccaacactggtgcagaacctcccctcatcagtccagaccgtctgtgagagctggaacaatataaatacaaacgaattcccaaacattgggtcttggcgtaacgcatttgcaaatgacaccataccctccgaatcatatatatcagcagtgcaggccgcccacctcggcaccctctgtagccagtctttacccctcgcagcaagtttaaaacacactttgctgtcactcgtccgcctcactggagacttgatcgtgtggtctgatgagatgaatcccccccaggtcataaggaccctcctcccgctcctgctcgagtcaagcactgagtcagtggccgagatctcgagcaacagtctcgagcgaatcctcggccctgccgagagcgatgagtttttagctagggtatacgagaaactgattacaggttgctacaatattctcgccaaccatgccgatccaaactctggattggacgaaagcattcttgaggagtgcctgcaatatctagagaagcagctggagagttcacaggccaggaaggccatggaagaattcttttccgattcaggcgaattagtgcagatcatgatggccactgccaacgagaacctctcggcaaaattttgtaatcgcgtgcttaaattcttcacgaagcttttccagctgaccgagaagagcccaaacccatctttgcttcacctgtgcggtagtctggcacagttggcgtgcgtcgaacccgtacgactccaggcatggctgactaggatgacaacaagcccccccaaggacagcgaccagctcgacgttatacaggaaaacaggcagctcttgcaactattgacaacttatatcgtgagagagaattcccaggtgggtgagggcgtatgcgcagttctcctggggacacttactcccatggcaacagagatgctagccaacggagatggcaccggcttccccgaactcatggttgttatggccactctcgcctctgccggccaaggcgccggacacctgcagcttcataatgctgcagtagactggctttcccggtgcaagaaatacttatcacagaaaaatgtcgtggaaaagctgaacgccaatgtgatgcacggaaaacatgttatgattctggaatgcacgtgccacataatgtcctatctggccgatgtgactaatgccttgagccagtctaatgggcaagggcccagtcacctctcggtcgacggtgaagagcgggccatagaagtggattctgactgggtggaagagctagcagtggaagaagaggattctcaggccgaagactccgatgaagactctctctgcaataagctctgcaccttcactattacacagaaggagtttatgaaccaacactggtaccattgccatacctgtaaaatggtggatggagtgggcgtgtgcaccgtgtgcgccaaggtttgccataaggaccacgagattagttacgctaagtatgggtcgtttttctgtgactgcggtgctaaagaggacggctcttgtctggctctagtgaaacggactccatcatctgggatgtcatcgaccatgaaagaaagcgcattccagagtgagcctcgaatttctgaatccctggtcagacacgcctctacatcgtcacccgcagacaaggcaaaggtaacaatatctgacgggaaggtggctgatgaggaaaagccaaaaaaaagcagcctttgccggacggtggagggatgtcgagaggaacttcaaaatcaggcaaacttttctttcgcacctttagtcctcgacatgctgaacttcctcatggacgcaattcagacaaatttccagcaggcctctgctgttggaagttcttcccgcgcgcagcaagcactatccgaattgcataccgtggagaaggccgtggagatgaccgaccagttaatggtgcctacactaggcagtcaggagggggctttcgagaacgtgaggatgaattatagcggcgatcagggccaaacaatcaggcaactgattagtgctcacgttttgcggcgcgtagcgatgtgcgtgctgtcctcccctcacggcaggcggcagcatttggcagtaagccacgagaaaggcaaaatcaccgtgctccagctgagcgccctgctcaagcaggccgactctagtaagagaaaacttacactcactagactggcctccgcaccagtacccttcaccgttttgtcactcacaggcaatccatgcaaggaggactatcttgccgtgtgtggattaaaggactgtcacgtgctgaccttctcctcgagtgggagcgtgtccgatcacctggtgcttcacccacagctcgccaccgggaatttcataatcaaagccgtgtggctgccgggcagccagacagaactggcgatcgtgaccgcagacttcgttaagatttacgatctctgtgtagatgccttatctcccactttttatttcttgctaccctcgagcaaaattagggacgttacctttctcttcaatgaggagggcaagaacattatcgtgatcatgagcagtgcgggctacatttatacacagctaatggaggaggccagcagtgcgcagcagggcccattttatgttaccaatgtgctagaaattaaccacgaagacctcaaggacagcaacagccaagtcgccggaggcggagtgagcgtttattattctcacgtgttacaaatgttatttttcagttattgccaaggaaagtcatttgccgctacaataagccggactacactggaagtactgcaattgttccccattaatatcaaatctagcaacggggggtccaagacaagtccagctctgtgccagtggagcgaggtgatgaaccaccctggcctggtgtgttgcgtccaacagacaaccggagtcccattggtggtgatggtgaagcctgacacattcctgatacaagagattaagacactgcccgctaaagccaagatacaagacatggtcgccattagacatacagcttgtaacgaacagcagcgcactaccatgatcttgctgtgtgaggacgggagccttagaatctatatggcaaacgtagagaacacaagttattggctgcagccttctttgcagccatcttcagttatatctataatgaagccagtgagaaagaggaaaacagctacgattaccacaaggacatctagccaggtgacctttcccatagacttcttcgaacataaccaacagctcacagacgttgagtttggcgggaacgatctgcttcaggtctataacgctcagcagatcaagcatcgcttaaatagcaccggcatgtatgtggcaaatacaaagcccggcggcttcaccattgaaatcagcaacaataactctaccatggtgatgaccgggatgaggattcagataggaacccaggccatcgaacgcgcgccttcgtacatcgaaattttcggccgcaccatgcagctgaatttatcacgcagtcggtggttcgattttcctttcacaagggaagaggccctccaggcggacaagaagctgaacctgtttataggcgcgagtgtagaccccgccggagtaaccatgattgatgccgtgaaaatttacggtaaaacgaaggaacagtttggctggcctgatgaaccacccgaggaattccccagtgcaagtgtctcgaacatctgtccttcaaatttgaaccaaagcaacggcaccggtgactctgactcagcagcgccaacaacgacaagcggaactgttctggagtcgagcgaaacagagtctctgaccaagctcgatagattggtagtaagttcattggaggcgctagagagctgcttcgcagtgggtcccatcattgagaaagagcggaataaaaatgcggcccaagagctggccacgttgcttctgagtctgcccgcgccggcaagtgtgcaacagcaatcaaagagtctgttagcatccctgcacacatctaggtcagcttatcattcccataaggaccaggccctgctgagcaaagctgtacagtgcctcaatactagtagtaaggagggaaaagatcttgatcccgaggtctttcagaggttggtgatcaccgcaaggtccattgctattatgcgccccaacaacttggttcactttacagaatctaagctgccacagatggaaaccgagggaatggatgagggcaaagagccccagaaacagctggaaggtgactgctgcagctttattacccagctcgtgaatcatttctggaagctgcacgcgtctaagcctaagaatgcttttctcgcgcccgcgtgtctgcccggcctaacacatatcgaggcaacagtgaatgccttggtcgatatcatccacggctattgcacatgcgagctggactgtatcaacaccgcctctaagatttatatgcagatgctcctgtgtccagatcccgccgtatccttctcatgtaagcaggcactgatccgcgtattacggccacgtaacaagcgtcggcacgtaacacttccgtcatcccccagaagtaacacaccaatgggcgataaagatgacgatgatgacgatgacgcagatgaaaaaatgcagtcaagcggcattccgaatggaggtcatattcgccaagagtcgcaggagcagtccgaggtggaccatggggacttcgagatggtaagtgagagtatggttcttgagacagccgagaacgtgaataatgggaacccaagtcccttggaagccctcctcgccggagcagagggcttccctcccatgcttgacatccctcccgatgctgacgatgagacaatggtcgaactggccatcgctcttagtctgcaacaggaccagcaggctcctgcctctgatgatgaagggagtaccgcagctactgacgggtcaacgcttcggacgtctcccgctgatcacggaggctcggtgggctctgagagcgggggatcagcggtcgacagcgtggcaggtgagcacagtgtaagcggtcgttcaagcgcctatggcgatgccaccgctgaggggcaccctgcgggacccggaagtgtcagtagctccactggcgctatcagtactacaacaggccaccaggagggggacggcagcgaaggtgagggcgaaggagaaactgaaggagacgtgcacacatctaacaggctacacatggttcgcctgatgctcctcgagagactgctccagacattaccccagcttcgcaacgttggaggcgtgcgtgccattccttatatgcaagtaattctcatgttgacgaccgatcttgatggcgaggatgagaaagataaaggcgcgctcgataatttgctttctcagcttattgctgaactaggtatggacaagaaggatgtaagcaaaaagaacgaacgctccgctctcaacgaggtccacctggtcgtcatgagactgttgtccgtcttcatgagccggaccaagtctggtagtaagagcagcatctgcgaatcttcttccttgatttcttccgcaacggcagccgccctcctgtcatcaggcgcagttgactattgcctccatgtcctgaaatcccttctggaatattggaaaagtcagcagaacgatgaggaaccagtggccacctcgcaattactcaaacctcacactacttcgtcccccccagacatgagccctttttttctgaggcagtacgttaagggccacgccgctgacgtgtttgaggcatacactcagctcctgactgagatggttctacggctgccctaccagattaagaagatcaccgacacaaactcacgcataccaccacctgtgtttgaccacagctggttctacttcctgtctgagtacctcatgattcagcagacgccctttgttaggcgccaggtgaggaaattattgctgtttatttgtggttctaaggagaagtataggcagctgagggacctgcacacattggattcacacgttcgagggattaagaagctgctcgaggagcagggaatcttcctgcgtgcatccgtggtcactgcatctagcggctccgctctccaatatgatactcttattagcctgatggagcacctgaaagcgtgcgctgaaattgccgcacagcggactattaactggcagaagttctgcataaaggatgactcagtgctgtatttcctcctgcaggttagttttctggtcgacgaaggggtttctcccgtgctcctacaactgctgagctgcgctctctgcggaagtaaggtcctcgctgccctcgctgcatcctccggatcatcaagcgccagcagcagctccgccccggttgcagcgtcttcagggcaggcaactactcaaagtaagagtagtacaaagaagtcgaaaaaagaggaaaaggagaaggagaaggacggagagacctcaggttcacaggaagatcagttgtgtaccgccctggtgaatcagcttaataaattcgccgacaaggagactctgattcaatttctccggtgctttcttcttgaatctaacagtagtagcgttagatggcaggcacactgtctgacactacacatctatagaaatagctctaaatcgcagcaggaactgcttttggatttaatgtggagcatatggccagagctgccagcttatggccgtaaagctgcgcagttcgtggacttgttgggctacttcagcttgaagacccctcagaccgaaaagaagctcaaggaatacagccagaaagctgttgaaatactccggacccaaaaccacatactcaccaaccacccaaactccaacatctataataccctgagcggcctggtggagttcgacgggtattaccttgagagcgacccctgcctggtctgcaataatcccgaagtgcctttctgctacattaaactgtcctcaattaaagtggatacacggtatacgaccacgcaacaggtggtgaaattgattgggtctcacacaatcagcaaagttacagtcaagatcggcgacctcaaacggactaaaatggtgcgtacgattaacctatactataacaaccgtactgtccaggccattgtggagctgaagaataaaccagctcgttggcacaaggccaagaaagtacaactgacaccaggtcagacggaggttaaaattgacctcccactacccatcgttgcctcgaaccttatgatcgagttcgccgatttctacgagaattaccaagcctccacggagacactacagtgtcctcgctgctccgcttcagtgccagcaaaccccggtgtgtgcggtaactgtggcgagaacgtttatcagtgccacaagtgtcggtccataaactacgatgaaaaagatcctttcttatgtaatgcatgcgggttttgtaagtacgctcggttcgacttcatgctgtacgctaaaccatgctgtgctgttgatccaatagagaacgaagaggatagaaaaaaggctgtctcaaacattaacactcttctggacaaggcagaccgtgtctaccaccagctgatgggacacaggcctcaattagaaaatctgctgtgtaaggtaaacgaggccgcccccgagaaaccccaggacgactctggcacagcaggtgggatcagttcgacttcagcatccgtgaatagatacatcctacagctcgctcaggaatattgtggggattgcaaaaattcttttgatgagctgagcaaaatcattcagaaggtttttgccagccggaaggagctgctcgagtatgatctgcagcaaagggaagctgcgacaaagtctagcagaaccagtgttcagcccaccttcaccgccagccagtaccgggccctctctgtcctggggtgtgggcatactagtagcactaaatgttacggatgcgcctccgctgttaccgagcactgtattactttgctgcgcgctcttgcaaccaacccagccttaagacatattctggtgtctcaaggcttgatcagggagcttttcgactacaacctccgccgaggggccgcggccatgcgggaggaagttagacagcttatgtgtttgctcacacgggacaacccagaagctacgcagcagatgaacgatctgattatcgggaaggtatctaccgcactcaaaggccattgggctaatccggacctggcatcctccttgcaatacgagatgcttctccttaccgattcaatctctaaagaagattcttgttgggagctgcgcctgcgatgtgccctgtctctgttcctgatggccgttaatataaagacccccgtggtagtggaaaatatcactctgatgtgtctcaggatcttgcagaaactgattaagccgcccgcccctacatctaagaaaaacaaagacgtgcccgtagaagctctgacaacagtgaagccatattgtaatgagatacatgcacaggcgcaactatggctcaagagggaccctaaagcaagctatgatgcatggaagaagtgtttacctattagggggatcgatggaaatggaaaagcccccagcaaatctgagttgcgacacctctatctcactgaaaagtatgtctggcggtggaaacaatttctctctaggcggggcaagaggacgtcgcctctcgacctgaagttaggacacaataactggctgcgtcaggtcctgtttacacccgctactcaggctgcccgacaggctgcctgcactatcgttgaggctctggccaccatccctagccggaaacagcaagtgcttgatttattgacttcctacttggatgagctgagcatcgctggtgaatgtgccgccgaatacctggccctgtaccagaagctaatcacatccgctcactggaaagtctacttggccgctagaggggtgcttccttatgtggggaatcttatcactaaagagatcgctagactcctggcgctcgaagaggccaccctcagcacagatttgcagcagggatacgcccttaaaagtctcaccgggctgctatccagtttcgtggaggtggagagcatcaaacggcacttcaagagcaggttggtcggcaccgtgcttaacggatacctttgtctacgcaaactagtggtgcagagaacgaaactcatcgacgaaacacaggacatgctgctcgagatgttggaggacatgacgaccggaactgagagtgaaactaaagccttcatggctgtgtgcatcgagaccgccaagagatataatttagacgattaccggacccctgtattcatattcgaaagactctgttcgatcatctacccagaagaaaatgaggtgacagaatttttcgtgacgttagagaaggacccgcaacaggaagactttctccagggaaggatgcccgggaatccctactcctctaacgagccagggatagggcccctgatgcgagatattaagaataaaatttgtcaggactgcgatctcgtagccctcttggaggatgactcgggaatggagctgttagtgaacaacaagattattagcttggacctccctgtggcagaggtctataaaaaggtgtggtgcacaacaaacgagggggaacctatgcgcattgtgtaccgaatgcggggattgctgggagacgcaaccgaggagttcattgaatccctggactctacaaccgacgaggaagaagacgaagaagaggtttacaagatggccggggtgatggctcagtgcggtggactggaatgtatgctcaacaggctggcaggtattcgtgactttaaacaagggcgacacctgctgactgtgttattgaagctcttttcttactgcgtgaaggttaaggtgaatcggcaacagctggttaaactggagatgaacactctgaatgtcatgctaggcacgctgaacctcgctctggtcgctgaacaggagtcgaaggacagcggcggagctgctgttgccgaacaagtgctatctatcatggagatcattctggacgagagcaacgccgagccattgtccgaagataagggcaatttgctactgaccggggataaggaccaacttgtcatgctgctggatcagattaatagcaccttcgtgagaagcaacccatcagtgctccagggccttctgaggatcattccatacctgagttttggcgaagtggagaagatgcaaatcttggtggagaggtttaaaccctactgtaatttcgacaagtacgacgaagaccactcaggcgatgataaggtcttccttgactgtttttgcaagatcgccgccggaatcaagaataactcaaacggacatcaactgaaggacttaattctgcagaagggtattacgcaaaatgcactggattacatgaagaaacacatcccaagcgctaagaaccttgacgcagacatatggaaaaagtttctgtcccgcccggcgttaccatttatcttaaggctattgcgaggtctggccatccagcacccagggacacaagtgctcatcggcacagattcgatacccaacctgcacaagcttgaacaggtgagctccgacgaagggattggtaccttggctgagaacttgctggaggctctgcgggagcacccggatgtcaataaaaagattgatgccgctaggagagagacccgagccgagaagaagcggatggcgatggctatgcgtcagaaggctttaggcacactgggaatgaccactaacgaaaagggacaggtggtaacaaaaaccgccctcctgaaacagatggaggaattgattgaagagcctggactgacatgttgtatttgtcgcgaggggtacaaatttcagcctacaaaggttctgggcatttacactttcacaaagcgtgtggctctcgaggaaatggaaaataagccacgcaagcagcaaggctactcaaccgtcagtcactttaatatcgtgcactatgattgtcacttggcggccgtgcgcctggcaagagggcgagaggaatgggagtccgcagccttgcagaatgcaaatacgaagtgcaacggactgctccctgtttgggggccccacgtgccagagagcgccttcgcaacgtgcctcgcacgacataacacctacttgcaggaatgtaccggacagcgcgagcccacttatcagttgaacatccacgatattaaactgctcttccttcgcttcgccatggagcagtcctttagcgctgacacgggcggcggtggccgggagagtaatatccacctcatcccatacataatccataccgttctgtatgtgctaaatacaacacgagctacaagcagagaggaaaagaatctccaggggttcctggaacaaccaaaggagaaatgggtagaatccgcattcgaggtcgacggcccctactatttcacggtgctggctttgcacatccttcctcccgaacagtggcgagccacacgggtcgaaattctgaggaggctactggtgacatcccaggctcgcgctgtggcacctggaggggctacacggttaactgataaggctgttaaagactactccgcctacagaagctcgctgctgttttgggcactggtggacttgatttacaacatgtttaaaaaggtacccacatccaataccgaaggtggatggtcttgcagcttggctgagtacatacgccacaacgacatgcctatatacgaagcagctgataaggcgctcaagacctttcaagaagagttcatgcccgtggagacattcagcgaattcctggatgtcgcaggcctgcttagcgaaattacggaccccgaaagctttctaaaggatttactgaattcggtaccttag

SEQ ID NO: 337563 - DNA, 6177 bp, Artificial Sequence
  derived and/or modified sequence
ctggtgcggcttactggcgacctgatcgtatggagcgatgagatgaatccccctcaagtcatcaggacactgctaccgttactcctggagtcatctacagaaagcgtggcagagatctcatcaaattctttagaacggatactgggcccagcggagtccgacgagtttctagcacgcgtgtatgagaagttgataacaggctgttataacatcctggctaaccacgctgatcctaactcaggtttagacgagtccatactggaggagtgtttacagtacctcgagaagcagctagagtcaagccaggcacgcaaagcgatggaagaattctttagcgacagcggagagctggtccaaatcatgatggccaccgccaacgagaacctgtcagcaaaattttgtaacagggtgctgaagttctttactaagctgttccaactcactgagaagagccctaatccgtcccttctgcacctgtgcgggagtctggctcagttggcctgtgtggagccagtgcgtcttcaagcatggcttacgaggatgacaacgagtccacctaaagattccgatcaactggatgtgatccaggaaaatcgacagctgctccagctgctgaccacatacattgtccgtgaaaactctcaggtgggtgaaggggtttgcgcagttcttctcggcacacttacccccatggcaactgaaatgctcgcaaatggagatggaacaggcttccccgaactgatggtcgtgatggctaccttggcctcagccggccaaggtgctggccatctgcaactgcacaacgctgccgtggactggctgtcccgctgcaagaaatatttgtctcagaagaatgtggtggaaaagcttaacgcgaacgttatgcacggcaaacacgtgatgatactggagtgcacgtgccacattatgtcttatctggccgacgtcacaaatgccctgtcacagtcaaatggccagggcccatcgcatctgtctgtggatggcgaagaacgagcaattgaagttgactccgactgggtggaggagctggccgttgaagaagaggattcacaggctgaggattctgatgaagatagtctgtgtaataagctgtgtacattcactataactcaaaaggagtttatgaaccagcactggtaccattgtcacacttgtaagatggtggatggtgtgggggtatgtactgtgtgtgccaaggtctgccacaaggaccacgaaatatcctatgctaaatacggaagctttttttgcgattgtggagccaaggaagacggatcctgcctggcactggttaagcgaacccccagctccggtatgtcaagtactatgaaggaatctgcctttcagtcagagcccagaatttccgagagtctcgtacgccacgcttccacttcctcacccgcagacaaagctaaagtcacgatcagcgatggtaaggtcgctgatgaggaaaagccaaagaagtcaagtctgtgtaggacagtggaggggtgcagagaagaactgcaaaaccaggcgaacttcagcttcgcaccactagtactcgacatgttgaattttctcatggatgccattcagacaaatttccagcaggctagtgctgtagggtcctccagccgggctcagcaggcactcagcgagctccataccgtggagaaggccgtggagatgacggaccagctcatggtgccaaccttggggtcccaggaaggagcattcgaaaacgttaggatgaattacagcggcgaccaaggtcagaccatcagacagctaattagtgcccacgtgctgcgacgggtggccatgtgcgtcctgtcttcaccacacgggagacgacaacaccttgccgtctcacacgagaagggcaaaatcacagtcttgcaactaagcgctctactcaagcaagccgattcaagcaagagaaagttaaccctcacaaggttagccagcgctcctgtgcctttcactgttctgtcactgacagggaacccgtgcaaggaagattatctggccgtatgcgggttgaaggactgtcacgtgctcacatttagctccagtggcagtgttagcgatcatctggttcttcacccacagctagccaccggcaacttcatcatcaaggccgtgtggttgccaggctcacagacagagttggctattgttactgcagacttcgtgaagatctatgatctatgcgttgacgccctcagtcctacattttactttctgttacctagttctaagattagagacgttacattcctgtttaacgaagaggggaagaatatcatcgtcatcatgtcctccgcagggtacatctacacacagttaatggaggaagctagtagcgcacagcaggggcctttctacgtaacaaatgtgttggagataaaccacgaagacctgaaggatagtaacagtcaggtggcaggaggcggcgttagcgtgtattactcccatgtgctgcagatgctgttcttttcatattgccagggtaagagtttcgccgcaacaatctctagaacgactctggaagtcctgcagctgtttcccattaacattaagtctagcaacgggggcagcaaaacctcccctgctctgtgtcagtggtccgaagtgatgaaccaccctggattggtctgctgtgtccaacagaccaccggagtccccctagtcgttatggtaaaacctgatacattcctcatccaggagattaagactctgcctgcgaaggctaagattcaggacatggtggctatccggcatacggcatgcaatgagcagcagagaaccacaatgatcttgctgtgtgaagatggctctctcaggatttacatggccaatgttgagaacacatcctactggctacagccctcgctgcaacccagcagcgttataagcattatgaaacccgtgcgcaaaagaaagactgcaactatcaccacgaggaccagctcccaggtgacctttccaatcgacttctttgaacacaatcagcagctcactgacgtcgagttcggcggaaacgatttgcttcaggtctataacgctcagcagatcaaacataggctgaactcaacaggaatgtatgtcgctaacactaaacctggaggctttacgatcgagattagcaataacaattcaaccatggtcatgacgggcatgaggatacaaattggaacccaggctattgagcgggctccaagttacattgagatcttcggccggactatgcaacttaatctctcccggtctcgctggtttgatttccccttcactcgcgaggaagccctgcaagccgacaagaaactcaatctttttatcggagcaagtgtggatcctgccggtgtcacgatgatcgacgccgtcaaaatttacggtaagacaaaggagcagtttggatggcctgacgagccccctgaggaatttccgtccgcctccgtttctaacatatgtccaagtaacctaaaccagtccaacgggactggcgattccgatagtgcggctcctacaactactagcggtaccgtcctggaaagcagtgaaactgagtcattaacgaagctggacagattggtggtgagctccctcgaagcattagagtcctgttttgccgtcggccctattatcgagaaggaacgaaacaagaatgccgcccaagagctagcaaccctcctgttgtctttaccagcacctgcttctgtccagcaacagtctaagtctttactggcatcactacacacttcccgcagcgcctatcatagccataaagatcaggcactattgtccaaggccgtgcagtgtttgaatacatcgtccaaggaaggaaaggacctcgaccccgaggtgtttcagagactggtgataactgctcgctctatcgcgattatgagaccgaataatctagttcacttcaccgagtctaagcttccacagatggagacagaagggatggacgaaggaaaagagccacaaaagcagctagagggagactgctgttccttcatcactcagttggtaaatcacttctggaaactccacgcttccaagcccaaaaatgcctttcttgccccggcttgcctgcccgggctgacccatatcgaggcgacagtgaatgcacttgtggacatcatccacggctactgtacatgcgaactggattgcatcaatactgcttctaagatctatatgcagatgctactgtgccccgacccagccgtttcgttctcatgtaagcaggccttgatcagggtgctgcgacctagaaataaaaggaggcacgtaacactcccgtccagcccaaggtctaatactccaatgggagataaagatgatgacgatgacgacgatgcagatgagaagatgcaatctagcggcataccgaatggaggacatattaggcaggaaagccaggagcagagcgaagtggaccatggggatttcgaaatggtctcggaatcaatggtgctagagaccgccgagaacgtgaacaacggcaatccgagccctcttgaggccctgctggctggcgccgaaggcttcccaccaatgctcgacattccacccgacgccgatgacgagactatggtggagctggcgattgccctgtcactacaacaagaccagcaggccccagcttctgacgacgaaggcagcaccgcagcgaccgatggctctaccctgcgcacctctcctgctgatcatggcgggtcagttggttcggaatcaggggggtctgccgtcgattccgtcgccggagagcacagtgtctccggaaggtcctcggcctatggcgatgccaccgccgagggacatccagctggacccggcagtgttagctcctccacaggggccatcagcacaactaccggccatcaagagggagacggcagtgagggggagggcgaaggtgaaaccgagggcgatgtccatactagtaatcggctccacatggtgcgactgatgcttctcgagagactcctccagacactcccccagctgcgtaacgtgggcggcgttcgggccatcccctatatgcaggtcattctgatgcttactaccgatctagatggcgaggatgaaaaagacaaaggtgccctagacaacctcctgtcacagttaatagctgaattaggcatggataagaaggacgtatctaagaagaacgagcgctccgccctaaatgaagttcacctggtggtgatgaggctcttatctgtttttatgtctcgtactaaatcaggttctaagagctccatatgcgaatcgtctagcctgattagctccgcaaccgctgctgctctcctgtctagcggggccgtcgactactgcttacacgtgttgaaaagcctgctcgagtactggaagtcgcaacagaatgacgaagaacctgtggcgactagtcagctcctgaagcctcacactacctccagtcctccagatatgtctccatttttcttgagacagtatgtgaagggacacgctgccgatgtctttgaggcctacacacagctcttaacagagatggtgttgcgcctgccctatcaaataaaaaaaataactgacacgaactcaagaatccctcccccagtgtttgaccattcctggttttatttcctgtccgaatatctgatgattcagcagactcctttcgtccgacggcaggtgcggaaattgctcctcttcatctgcggttccaaggagaagtacagacagctgcgcgatctgcacactctcgactcgcacgttagaggaataaaaaagttgctggaagagcagggtatttttcttagggctagcgtggtgactgccagcagtggttctgcccttcagtatgatactttgatttcactgatggagcatcttaaggcctgcgccgagattgcggctcaaaggacgattaattggcaaaaattctgcattaaggatgacagcgttctctacttcctgctgcaggtgtcatttctcgtggacgaaggcgttagtcccgtgttactccagctcttaagctgcgccttgtgtgggagcaaagtgctggctgcactggctgcgagctccgggagctctagcgcgtcatcgtcgtccgcccctgttgccgctagtagcggccaggccaccactcaatctaagagcagcaccaagaaatcaaagaagtag

SEQ ID NO: 337564 - DNA, 15480 bp, Artificial Sequence
  derived and/or modified sequence
atggccaccagcggcggggaggaggccgctgctgctgccccagcccctggcaccccagccactggagctgacaccaccccaggctgggaggtggccgtgcggcccctgctgagcgccagctacagcgcctttgagatgaaggagctgccccagctggtggcctctgtgattgaaagtgaaagtgagatcctgcaccacgagaagcagtatgagcccttctacagcagctttgtggccctgagcacccactacatcaccaccgtgtgcagcctcatccccaggaaccagctgcagagcgtggccgccgcctgcaaggtgctgattgagttcagcctgctgcggctggagaacccagatgaggcctgtgctgtgtcccagaagcacctgatcctgctgatcaagggcctgtgcaccggctgcagccggctggacagaacagagatcatcaccttcaccgccatgatgaagagcgccaagctgccccagacagtgaagaccctgagtgatgtggaggaccagaaggagctggccagccctgtgtccccagagctgcggcagaaggaggtgcagatgaacttcctgaaccagctgacctctgtgttcaaccccaggacagtggccagccagcccatcagcacccagaccctggtggagggggagaatgatgagcagagcagcacagaccaggccagcgccatcaagaccaagaatgtgttcatcgcccagaatgtggccagcctgcaggagctgggcggcagcgagaagctgctgcgggtgtgcctgaacctgccctacttcctgcgctacatcaaccgcttccaggatgctgtgctggccaacagcttcttcatcatgcctgccaccgtggctgatgccacagctgtgagaaatggcttccacagcctggtgattgatgtgaccatggccctggacaccctgagcctgcctgtgctggagcccctgaaccccagccggctgcaggatgtgacagtgctgagcctgagctgcctgtatgccggcgtgtctgtggccacctgcatggccatcctgcacgtgggcagcgcccagcaggtgaggacaggcagcaccagcagcaaagaagatgattatgaaagtgatgctgccaccatcgtgcagaagtgcctggagatctatgacatgattggccaggccatcagcagcagccggcgggccggcggggagcactaccagaacttccagctgctgggcgcctggtgcctgctgaacagcctcttcctgatcctgaacctgagccccacagccctggccgacaagggcaaggagaaggaccccctggccgccctgcgggtgcgggacatcctgagcaggaccaaggagggcgtgggcagccccaagctgggccctgggaagggccaccagggctttggagtgctgagcgtcatcctggccaaccacgccatcaagctgctgaccagcctcttccaggacctgcaggtggaggccctgcacaagggctgggagacagatggccccccagctgccctgagcatcatggcccagagcaccagcatccagaggatccagaggctgattgattctgtgcccctgatgaacctgctgctgaccctgctgagcaccagctacaggaaggcctgtgtgctgcagaggcagaggaagggctccatgagcagtgatgccagcgccagcacagacagcaacacctactatgaagatgacttcagcagcacagaggaggacagcagccaggatgatgattctgagcccatcctgggccagtggtttgaggagaccatcagccccagcaaggagaaggccgcccctcctcctcctcctcctcctccacccctggagagcagcccccgggtgaagagccccagcaagcaggcccctggagagaagggcaacatcctggccagcaggaaggaccctgagctgttcctgggcctggccagcaacatcctgaacttcatcaccagctccatgctgaacagcaggaacaacttcatccggaactacctgtctgtgtccctgtctgagcaccacatggccaccctggccagcatcatcaaggaggtggacaaggatggcctgaagggcagcagtgatgaggagtttgctgctgccctgtaccacttcaaccacagcctggtgaccagtgacctgcagagccccaacctgcagaacaccctgctgcagcagctgggcgtggcccccttcagcgagggcccctggcccctgtacatccacccccagagcctgtctgtgctgagccggctgctgctgatctggcagcacaaggccagcgcccagggcgaccctgatgtgcctgagtgcctgaaggtgtgggaccgcttcctgagcaccatgaagcagaatgccctgcagggcgtggtgcccagcgagacagaggacctgaatgtggagcacctgcagatgctgctgctgatcttccacaacttcacagagaccggccggcgggccatcctgagcctgtttgtgcagatcatccaggagctgtctgtgaacatggatgcccagatgagatttgtgcccctcatcctggcccggctgctgctgatctttgactacctgctgcaccagtacagcaaggcccctgtgtacctgtttgagcaggtgcagcacaacctgctgagccccccatttggctgggccagcggcagccaggacagcaacagcagaagagccaccacccccctgtaccacggcttcaaggaggtggaggagaactggagcaagcacttcagcagtgatgctgtgccccacccccgcttctactgtgtgctgagccctgaggcctctgaagatgacctgaaccggctggacagcgtggcctgtgatgtgctcttcagcaagctggtgaagtatgatgagctgtatgctgccctgacagccctgctggccgccggcagccagctggacacagtgcggaggaaagaaaacaagaatgtgacagccctggaggcctgtgccctgcagtactacttcctgatcctgtggaggatcctgggcatcctgccccccagcaagacctacatcaaccagctgtccatgaacagccctgagatgtctgaatgtgacatcctgcacaccctgcgctggagcagccggctgcgcatcagcagctatgtgaactggatcaaggaccacctgatcaagcagggcatgaaggccgagcacgccagcagcctgctggagctggccagcaccaccaagtgcagctctgtgaagtatgatgtggagatcgtggaggagtactttgcccggcagatcagcagcttctgcagcattgactgcaccaccatcctgcagctgcacgagatccccagcctgcagagcatctacaccctggatgctgccatcagcaaggtgcaggtgtccctggatgagcacttcagcaagatggctgctgagacagacccccacaagagcagcgagatcaccaagaacctgctgcctgccaccctgcagctgattgacacctacgccagcttcacccgggcctacctgctgcagaacttcaatgaggagggcaccacagagaagcccagcaaggagaagctgcagggctttgctgctgtgctggccatcggcagcagccgctgcaaggccaacaccctgggccccaccctggtgcagaacctgcccagctctgtgcagacagtgtgtgagagctggaacaacatcaacaccaatgagttccccaacatcggctcctggagaaatgcctttgccaatgacaccatccccagcgagagctacatctctgctgtgcaggccgcccacctgggcaccctgtgcagccagagcctgcccctggccgccagcctgaagcacaccctgctgagcctggtgcggctgactggagacctgattgtgtggagcgatgagatgaaccccccccaggtgatccgcaccctgctgcccctgctgctggagagcagcacagaatctgtggccgagatcagcagcaacagcctggagcgcatcctgggccctgctgagagtgatgagttcctggcccgggtgtatgagaagctgatcaccggctgctacaacatcctggccaaccacgccgaccccaacagcggcctggatgagagcatcctggaggagtgcctgcagtacctggagaagcagctggagagcagccaggccaggaaggccatggaggagttcttcagtgacagcggggagctggtgcagatcatgatggccacagccaatgaaaacctgagcgccaagttctgcaacagagtgctgaagttcttcaccaagctgttccagctgacagagaagagccccaaccccagcctgctgcacctgtgtggcagcctggcccagctggcctgtgtggagcctgtgcggctgcaggcctggctgaccaggatgaccaccagcccccccaaggacagcgaccagctggatgtgatccaggagaaccggcagctgctgcagctgctgaccacctacatcgtgcgggagaacagccaggtgggggagggcgtgtgtgctgtgctgctgggcaccctgacccccatggccacagagatgctggccaatggagatggcaccggcttccctgagctgatggtggtgatggccaccctggccagcgctggccagggcgccggccacctgcagctgcacaatgctgctgtggactggctgagccgctgcaagaagtacctgagccagaagaatgtggtggagaagctgaatgccaacgtgatgcacggcaagcacgtgatgatcctggagtgcacctgccacatcatgagctacctggctgatgtgaccaatgccctgagccagagcaatggccagggccccagccacctgtctgtggatggagaggagcgggccatcgaggtggacagcgactgggtggaggagctggccgtggaggaggaggacagccaggccgaggacagtgatgaggacagcctgtgcaacaagctgtgcaccttcaccatcacccagaaggagttcatgaaccagcactggtaccactgccacacctgcaagatggtggatggagtgggcgtgtgcaccgtgtgtgccaaggtgtgccacaaggaccacgagatctcctatgccaagtatggcagcttcttctgtgactgtggggccaaggaggatggcagctgcctggccctggtgaagaggacccccagcagcggcatgagcagcaccatgaaggagagcgccttccagagcgagccccgcatcagcgagagcctggtgagacatgccagcaccagcagccctgctgacaaggccaaggtgaccatcagtgatggcaaggtggctgatgaggagaagcccaagaagagcagcctgtgcaggacagtggagggctgccgggaggagctgcagaaccaggccaacttctcctttgcccccctggtgctggacatgctgaacttcctgatggatgccatccagaccaacttccagcaggccagcgctgtgggcagcagcagccgggcccagcaggccctgtctgagctgcacacagtggagaaggctgtggagatgacagaccagctgatggtgcccaccctgggcagccaggagggcgcctttgaaaatgtgaggatgaactacagcggggaccagggccagaccatccggcagctgatcagcgcccacgtgctgcggcgggtggccatgtgtgtgctgagcagcccccacggccggcggcagcacctggccgtgtcccatgagaagggcaagatcaccgtgctgcagctgagcgccctgctgaagcaggccgacagcagcaagaggaagctgaccctgacccggctggccagcgcccctgtgcccttcaccgtgctgagcctgaccggcaacccctgcaaggaggactacctggccgtgtgtggcctgaaggactgccacgtgctgaccttcagcagcagcggctctgtgtctgaccacctggtgctgcacccccagctggccaccggcaacttcatcatcaaggctgtgtggctgcccggcagccagacagagctggccatcgtgacagctgactttgtgaagatctatgacctgtgtgtggatgccctgagccccaccttctacttcctgctgcccagcagcaagatcagagatgtgaccttcctgttcaatgaggagggcaagaacatcatcgtcatcatgagcagcgctggctacatctacacccagctgatggaggaggccagcagcgcccagcagggccccttctacgtgaccaacgtgctggagatcaaccacgaggacctgaaggacagcaacagccaggtggccggcggcggcgtgtctgtgtactacagccacgtgctgcagatgctgttcttctcctactgccagggcaagagctttgctgccaccatcagcaggaccaccctggaggtgctgcagctgttccccatcaacatcaagagcagcaatggaggcagcaagaccagccctgccctgtgccagtggagcgaggtgatgaaccaccctggcctggtgtgctgcgtgcagcagaccaccggggtgcccctggtggtgatggtgaagccagacaccttcctgatccaggagatcaagaccctgcctgccaaggccaagatccaggacatggtggccatccgccacacagcctgcaatgagcagcagaggaccaccatgatcctgctgtgtgaagatggcagcctgcgcatctacatggccaacgtggagaacaccagctactggctgcagcccagcctgcagcccagcagcgtcatcagcatcatgaagcctgtgaggaagaggaagacagccaccatcaccaccaggaccagcagccaggtgaccttccccatcgacttctttgagcacaaccagcagctgacagatgtggagtttggaggaaatgacctgctgcaggtgtacaatgcccagcagatcaagcaccggctgaacagcacaggcatgtatgtggccaacaccaagccaggcggcttcaccatcgagatcagcaacaacaacagcaccatggtgatgacaggcatgaggatccagatcggcacccaggccatcgagcgggcccccagctacatcgagatctttggaagaaccatgcagctgaacctgagccgcagccgctggtttgacttccccttcacccgggaggaggccctgcaggccgacaagaagctgaacctcttcatcggggcctctgtggaccctgctggggtgaccatgattgatgctgtgaagatctacggcaagaccaaggagcagtttggctggccagatgagcccccagaggagttccccagcgcctctgtgagcaacatctgccccagcaacctgaaccagagcaatggaactggagacagcgacagcgctgcccccaccaccaccagcggcaccgtgctggagagcagcgagacagagagcctgaccaagctggaccggctggtggtgagcagcctggaggccctggagagctgctttgctgtgggccccatcatcgagaaggagaggaacaagaatgctgcccaggagctggccaccctgctgctgagcctgcctgccccagcctctgtgcagcagcagagcaagagcctgctggccagcctgcacaccagccgcagcgcctaccacagccacaaggaccaggccctgctgagcaaggctgtgcagtgcctgaacaccagcagcaaggagggcaaggacctggaccctgaggtgttccagaggctggtgatcacagcccggagcatcgccatcatgaggcccaacaacctggtgcacttcacagagagcaagctgccccagatggagacagagggcatggatgagggcaaggagccccagaagcagctggagggggactgctgcagcttcatcacccagctggtgaaccacttctggaagctgcacgccagcaagcccaagaatgccttcctggccccagcctgcctgcccggcctgacccacatcgaggccaccgtgaatgccctggtggacatcatccacggctactgcacctgtgagctggactgcatcaacacagccagcaagatctacatgcagatgctgctgtgcccagaccctgctgtgtccttcagctgcaagcaggccctgatccgggtgctgcggcccaggaacaagagaagacatgtgaccctgcccagcagccccaggagcaacacccccatgggagacaaggatgatgatgatgatgatgatgctgatgagaagatgcagagcagcggcatccccaatggaggccacatccggcaggagagccaggagcagagcgaggtggaccatggagactttgagatggtgtctgagagcatggtgctggagacagcagaaaatgtgaacaatggaaaccccagccccctggaggccctgctggccggggctgagggcttcccccccatgctggacatccccccagatgctgatgatgagaccatggtggagctggccatcgccctgagcctgcagcaggaccagcaggccccagccagtgatgatgagggcagcacagctgccacagatggcagcaccctgcggaccagccctgctgaccatggaggctctgtgggcagcgagagcggcggcagcgctgtggacagcgtggccggggagcacagcgtgtctggccgcagcagcgcctatggagatgccacagctgagggccaccctgctggccctggctctgtgagcagcagcactggagccatcagcaccaccaccggccaccaggagggagatggcagcgagggggagggggagggggagacagaaggagatgtgcacaccagcaaccggctgcacatggtgcggctgatgctgctggagcggctgctgcagaccctgccccagctgagaaatgtgggcggcgtgcgggccatcccctacatgcaggtgatcctgatgctgaccacagacctggatggagaagatgagaaggacaagggggccctggacaacctgctgagccagctgattgctgagctgggcatggacaagaaggatgtgtccaagaagaatgaaagaagtgccctgaatgaggtgcacctggtggtgatgaggctgctgagcgtcttcatgagcaggaccaagagcggcagcaagagcagcatctgtgagagcagcagcctcatcagcagcgccacagctgctgccctgctgagcagcggggctgtggactactgcctgcacgtgctgaagagcctgctggagtactggaagagccagcagaatgatgaggagcctgtggccaccagccagctgctgaagccccacaccaccagcagccccccagacatgagccccttcttcctgcggcagtatgtgaagggccatgctgctgatgtgtttgaggcctacacccagctgctgacagagatggtgctgcggctgccctaccagatcaagaagatcacagacaccaacagccgcatccccccacctgtgtttgaccacagctggttctacttcctgtctgagtacctgatgatccagcagaccccatttgtgcggcggcaggtgaggaagctgctgctcttcatctgtggcagcaaggagaagtaccggcagctgcgggacctgcacaccctggacagccacgtgcggggcatcaagaagctgctggaggagcagggcatcttcctgcgggcctctgtggtgacagccagcagcggcagcgccctgcagtatgacaccctcatcagcctgatggagcacctgaaggcctgtgccgagattgctgcccagaggaccatcaactggcagaagttctgcatcaaggatgattctgtgctgtacttcctgctgcaggtgtccttcctggtggatgagggcgtgtcccctgtgctgctgcagctgctgagctgtgccctgtgtggcagcaaggtgctggccgccctggccgccagcagcggcagcagcagcgccagcagcagcagcgcccctgtggccgccagcagcggccaggccaccacccagagcaagagcagcaccaagaagagcaagaaggaggagaaggagaaggagaaggatggagagaccagcggcagccaggaggaccagctgtgcacagccctggtgaaccagctgaacaagtttgctgacaaggagaccctcatccagttcctgcgctgcttcctgctggagagcaacagcagctctgtgcgctggcaggcccactgcctgaccctgcacatctacagaaacagcagcaagagccagcaggagctgctgctggacctgatgtggagcatctggccagagctgcctgcctacggcaggaaggccgcccagtttgtggacctgctgggctacttcagcctgaagaccccccagacagagaagaagctgaaggagtacagccagaaggctgtggagatcctgcggacccagaaccacatcctgaccaaccaccccaacagcaacatctacaacaccctgagcggcctggtggagtttgatggctactacctggagagtgacccctgcctggtgtgcaacaaccctgaggtgcccttctgctacatcaagctgagcagcatcaaggtggacacccgctacaccaccacccagcaggtggtgaagctgattggcagccacaccatcagcaaggtgacagtgaagatcggggacctgaagaggaccaagatggtgaggaccatcaacctgtactacaacaacagaacagtgcaggccatcgtggagctgaagaacaagccagcccgctggcacaaggccaagaaggtgcagctgaccccaggccagacagaggtgaagattgacctgcccctgcccatcgtggccagcaacctgatgattgaatttgctgacttctatgagaactaccaggccagcacagagaccctgcagtgcccccgctgcagcgcctctgtgcctgccaaccctggggtgtgtggcaactgtggagaaaatgtgtaccagtgccacaagtgccgcagcatcaactatgatgagaaggaccccttcctgtgcaatgcctgtggcttctgcaagtatgccaggtttgacttcatgctgtatgccaagccctgctgtgctgtggaccccattgaaaatgaggaggacaggaagaaggctgtgagcaacatcaacaccctgctggacaaggctgacagagtgtaccaccagctgatgggccaccggccccagctggagaacctgctgtgcaaggtgaatgaggccgcccctgagaagccccaggatgattctggaacagctgggggcatcagcagcaccagcgcctctgtgaaccgctacatcctgcagctggcccaggagtactgtggggactgcaagaacagctttgatgagctgagcaagatcatccagaaggtgtttgccagcaggaaggagctgctggagtatgacctgcagcagcgggaggccgccaccaagagcagcaggacctctgtgcagcccaccttcaccgccagccagtaccgggccctgtctgtgctgggctgcggccacaccagcagcaccaagtgctacggctgtgccagcgctgtgacagagcactgcatcaccctgctgcgggccctggccaccaacccagccctgcggcacatcctggtgtcccagggcctcatccgggagctgtttgactacaacctgcggagaggagctgctgccatgagggaggaggtgcggcagctgatgtgcctgctgacccgggacaaccctgaggccacccagcagatgaatgacctgatcatcggcaaggtgtccacagccctgaagggccactgggccaacccagacctggccagcagcctgcagtatgagatgctgctgctgacagacagcatcagcaaggaggacagctgctgggagctgcggctgcgctgtgccctgagcctcttcctgatggctgtgaacatcaagacccctgtggtggtggagaacatcaccctgatgtgcctgcgcatcctgcagaagctgatcaagcccccagcccccaccagcaagaagaacaaggatgtgcctgtggaggccctgaccaccgtgaagccctactgcaatgagatccacgcccaggcccagctgtggctgaagagggaccccaaggccagctatgatgcctggaagaagtgcctgcccatccggggcattgatggaaatggcaaggcccccagcaagtctgagctgcggcacctgtacctgacagagaagtatgtgtggcgctggaagcagttcctgagcagaagaggcaagaggaccagccccctggacctgaagctgggccacaacaactggctgcggcaggtgctcttcaccccagccacccaggccgcccggcaggccgcctgcaccatcgtggaggccctggccaccatccccagcaggaagcagcaggtgctggacctgctgaccagctacctggatgagctgagcattgctggggagtgtgccgctgagtacctggccctgtaccagaagctgatcaccagcgcccactggaaggtgtacctggccgcccggggcgtgctgccctacgtgggcaacctgatcaccaaggagatcgcccggctgctggccctggaggaggccaccctgagcacagacctgcagcagggctacgccctgaagagcctgaccggcctgctgagcagctttgtggaggtggagagcatcaagaggcacttcaagagccggctggtgggcaccgtgctgaatggctacctgtgcctgaggaagctggtggtgcagaggaccaagctgattgatgagacccaggacatgctgctggagatgctggaggacatgaccaccggcacagagagcgagaccaaggccttcatggctgtgtgcatcgagacagccaagcgctacaacctggatgactaccgcacccctgtgttcatctttgagcggctgtgcagcatcatctacccagaagaaaatgaggtgacagagttctttgtgaccctggagaaggacccccagcaggaggacttcctgcagggccgcatgcctggcaacccctacagcagcaatgaacctggcatcggccccctgatgagggacatcaagaacaagatctgccaggactgtgacctggtggccctgctggaggatgacagcggcatggagctgctggtgaacaacaagatcatcagcctggacctgcctgtggccgaggtgtacaagaaggtgtggtgcaccaccaatgaaggagagcccatgagaattgtgtacaggatgaggggcctgctgggagatgccacagaggagttcatcgagagcctggacagcaccacagatgaggaggaggatgaggaggaggtgtacaagatggccggcgtgatggcccagtgtggcggcctggagtgcatgctgaaccggctggccggcatccgggacttcaagcagggccgccacctgctgactgtgctgctgaagctgttctcctactgtgtgaaggtgaaggtgaaccggcagcagctggtgaagctggagatgaacaccctgaatgtgatgctgggcaccctgaacctggccctggtggccgagcaggagagcaaggacagcggcggcgctgctgtggccgagcaggtgctgagcatcatggagatcatcctggatgagagcaatgctgagcccctgtctgaggacaagggcaacctgctgctgaccggggacaaggaccagctggtgatgctgctggaccagatcaacagcacctttgtgcgcagcaaccccagcgtgctgcagggcctgctgcgcatcatcccctacctgagctttggagaggtggagaagatgcagatcctggtggagcgcttcaagccctactgcaactttgacaagtatgatgaggaccacagcggagatgacaaggtgttcctggactgcttctgcaagattgctgctggcatcaagaacaacagcaatggccaccagctgaaggacctgatcctgcagaagggcatcacccagaatgccctggactacatgaagaagcacatccccagcgccaagaacctggatgctgacatctggaagaagttcctgagcaggcctgccctgcccttcatcctgcggctgctgcggggcctggccatccagcaccctggcacccaggtgctgattggaacagacagcatccccaacctgcacaagctggagcaggtgtccagtgatgagggcatcggcaccctggccgagaacctgctggaggccctgcgggagcacccagatgtgaacaagaagattgatgctgcccggcgggagaccagggctgagaagaagaggatggccatggccatgaggcagaaggccctgggcaccctgggcatgaccaccaatgagaagggccaggtggtgaccaagacagccctgctgaagcagatggaggagctgattgaggagcccggcctgacctgctgcatctgccgggagggctacaagttccagcccaccaaggtgctgggcatctacaccttcaccaagagggtggccctggaggagatggagaacaagcccaggaagcagcagggctacagcacagtgagccacttcaacatcgtgcactatgactgccacctggccgctgtgcggctggcccggggccgggaggagtgggagagcgctgccctgcagaatgccaacaccaagtgcaatggcctgctgcctgtgtggggcccccacgtgcctgagagcgcctttgccacctgcctggcccggcacaacacctacctgcaggagtgcaccggccagcgggagcccacctaccagctgaacatccatgacatcaagctgctcttcctgcgctttgccatggagcagagcttctctgctgacaccggcggcggcggccgggagagcaacatccacctgatcccctacatcatccacacagtgctgtatgtgctgaacaccacccgggccaccagccgggaggagaagaacctgcagggcttcctggagcagcccaaggagaagtgggtggagagcgcctttgaggtggatggcccctactacttcaccgtgctggccctgcacatcctgcccccagagcagtggagggccaccagggtggagatcctgcggcggctgctggtgaccagccaggcccgggctgtggcccctggaggagccacccggctgacagacaaggctgtgaaggactacagcgcctaccgcagcagcctgctcttctgggccctggtggacctgatctacaacatgttcaagaaggtgcccaccagcaacacagaaggaggctggagctgcagcctggccgagtacatccgccacaatgacatgcccatctatgaagctgctgacaaggccctgaagaccttccaggaggagttcatgcctgtggagaccttcagcgagttcctggatgtggccggcctgctgtctgagatcacagatcctgagagcttcctgaaggacctgctgaacagcgtgccctag

SEQ ID NO: 337565 - DNA, 6177 bp, Artificial Sequence
  derived and/or modified sequence
ctggtgcggctgactggagacctgattgtgtggagcgatgagatgaaccccccccaggtgatccgcaccctgctgcccctgctgctggagagcagcacagaatctgtggccgagatcagcagcaacagcctggagcgcatcctgggccctgctgagagtgatgagttcctggcccgggtgtatgagaagctgatcaccggctgctacaacatcctggccaaccacgccgaccccaacagcggcctggatgagagcatcctggaggagtgcctgcagtacctggagaagcagctggagagcagccaggccaggaaggccatggaggagttcttcagtgacagcggggagctggtgcagatcatgatggccacagccaatgaaaacctgagcgccaagttctgcaacagagtgctgaagttcttcaccaagctgttccagctgacagagaagagccccaaccccagcctgctgcacctgtgtggcagcctggcccagctggcctgtgtggagcctgtgcggctgcaggcctggctgaccaggatgaccaccagcccccccaaggacagcgaccagctggatgtgatccaggagaaccggcagctgctgcagctgctgaccacctacatcgtgcgggagaacagccaggtgggggagggcgtgtgtgctgtgctgctgggcaccctgacccccatggccacagagatgctggccaatggagatggcaccggcttccctgagctgatggtggtgatggccaccctggccagcgctggccagggcgccggccacctgcagctgcacaatgctgctgtggactggctgagccgctgcaagaagtacctgagccagaagaatgtggtggagaagctgaatgccaacgtgatgcacggcaagcacgtgatgatcctggagtgcacctgccacatcatgagctacctggctgatgtgaccaatgccctgagccagagcaatggccagggccccagccacctgtctgtggatggagaggagcgggccatcgaggtggacagcgactgggtggaggagctggccgtggaggaggaggacagccaggccgaggacagtgatgaggacagcctgtgcaacaagctgtgcaccttcaccatcacccagaaggagttcatgaaccagcactggtaccactgccacacctgcaagatggtggatggagtgggcgtgtgcaccgtgtgtgccaaggtgtgccacaaggaccacgagatctcctatgccaagtatggcagcttcttctgtgactgtggggccaaggaggatggcagctgcctggccctggtgaagaggacccccagcagcggcatgagcagcaccatgaaggagagcgccttccagagcgagccccgcatcagcgagagcctggtgagacatgccagcaccagcagccctgctgacaaggccaaggtgaccatcagtgatggcaaggtggctgatgaggagaagcccaagaagagcagcctgtgcaggacagtggagggctgccgggaggagctgcagaaccaggccaacttctcctttgcccccctggtgctggacatgctgaacttcctgatggatgccatccagaccaacttccagcaggccagcgctgtgggcagcagcagccgggcccagcaggccctgtctgagctgcacacagtggagaaggctgtggagatgacagaccagctgatggtgcccaccctgggcagccaggagggcgcctttgaaaatgtgaggatgaactacagcggggaccagggccagaccatccggcagctgatcagcgcccacgtgctgcggcgggtggccatgtgtgtgctgagcagcccccacggccggcggcagcacctggccgtgtcccatgagaagggcaagatcaccgtgctgcagctgagcgccctgctgaagcaggccgacagcagcaagaggaagctgaccctgacccggctggccagcgcccctgtgcccttcaccgtgctgagcctgaccggcaacccctgcaaggaggactacctggccgtgtgtggcctgaaggactgccacgtgctgaccttcagcagcagcggctctgtgtctgaccacctggtgctgcacccccagctggccaccggcaacttcatcatcaaggctgtgtggctgcccggcagccagacagagctggccatcgtgacagctgactttgtgaagatctatgacctgtgtgtggatgccctgagccccaccttctacttcctgctgcccagcagcaagatcagagatgtgaccttcctgttcaatgaggagggcaagaacatcatcgtcatcatgagcagcgctggctacatctacacccagctgatggaggaggccagcagcgcccagcagggccccttctacgtgaccaacgtgctggagatcaaccacgaggacctgaaggacagcaacagccaggtggccggcggcggcgtgtctgtgtactacagccacgtgctgcagatgctgttcttctcctactgccagggcaagagctttgctgccaccatcagcaggaccaccctggaggtgctgcagctgttccccatcaacatcaagagcagcaatggaggcagcaagaccagccctgccctgtgccagtggagcgaggtgatgaaccaccctggcctggtgtgctgcgtgcagcagaccaccggggtgcccctggtggtgatggtgaagccagacaccttcctgatccaggagatcaagaccctgcctgccaaggccaagatccaggacatggtggccatccgccacacagcctgcaatgagcagcagaggaccaccatgatcctgctgtgtgaagatggcagcctgcgcatctacatggccaacgtggagaacaccagctactggctgcagcccagcctgcagcccagcagcgtcatcagcatcatgaagcctgtgaggaagaggaagacagccaccatcaccaccaggaccagcagccaggtgaccttccccatcgacttctttgagcacaaccagcagctgacagatgtggagtttggaggaaatgacctgctgcaggtgtacaatgcccagcagatcaagcaccggctgaacagcacaggcatgtatgtggccaacaccaagccaggcggcttcaccatcgagatcagcaacaacaacagcaccatggtgatgacaggcatgaggatccagatcggcacccaggccatcgagcgggcccccagctacatcgagatctttggaagaaccatgcagctgaacctgagccgcagccgctggtttgacttccccttcacccgggaggaggccctgcaggccgacaagaagctgaacctcttcatcggggcctctgtggaccctgctggggtgaccatgattgatgctgtgaagatctacggcaagaccaaggagcagtttggctggccagatgagcccccagaggagttccccagcgcctctgtgagcaacatctgccccagcaacctgaaccagagcaatggaactggagacagcgacagcgctgcccccaccaccaccagcggcaccgtgctggagagcagcgagacagagagcctgaccaagctggaccggctggtggtgagcagcctggaggccctggagagctgctttgctgtgggccccatcatcgagaaggagaggaacaagaatgctgcccaggagctggccaccctgctgctgagcctgcctgccccagcctctgtgcagcagcagagcaagagcctgctggccagcctgcacaccagccgcagcgcctaccacagccacaaggaccaggccctgctgagcaaggctgtgcagtgcctgaacaccagcagcaaggagggcaaggacctggaccctgaggtgttccagaggctggtgatcacagcccggagcatcgccatcatgaggcccaacaacctggtgcacttcacagagagcaagctgccccagatggagacagagggcatggatgagggcaaggagccccagaagcagctggagggggactgctgcagcttcatcacccagctggtgaaccacttctggaagctgcacgccagcaagcccaagaatgccttcctggccccagcctgcctgcccggcctgacccacatcgaggccaccgtgaatgccctggtggacatcatccacggctactgcacctgtgagctggactgcatcaacacagccagcaagatctacatgcagatgctgctgtgcccagaccctgctgtgtccttcagctgcaagcaggccctgatccgggtgctgcggcccaggaacaagagaagacatgtgaccctgcccagcagccccaggagcaacacccccatgggagacaaggatgatgatgatgatgatgatgctgatgagaagatgcagagcagcggcatccccaatggaggccacatccggcaggagagccaggagcagagcgaggtggaccatggagactttgagatggtgtctgagagcatggtgctggagacagcagaaaatgtgaacaatggaaaccccagccccctggaggccctgctggccggggctgagggcttcccccccatgctggacatccccccagatgctgatgatgagaccatggtggagctggccatcgccctgagcctgcagcaggaccagcaggccccagccagtgatgatgagggcagcacagctgccacagatggcagcaccctgcggaccagccctgctgaccatggaggctctgtgggcagcgagagcggcggcagcgctgtggacagcgtggccggggagcacagcgtgtctggccgcagcagcgcctatggagatgccacagctgagggccaccctgctggccctggctctgtgagcagcagcactggagccatcagcaccaccaccggccaccaggagggagatggcagcgagggggagggggagggggagacagaaggagatgtgcacaccagcaaccggctgcacatggtgcggctgatgctgctggagcggctgctgcagaccctgccccagctgagaaatgtgggcggcgtgcgggccatcccctacatgcaggtgatcctgatgctgaccacagacctggatggagaagatgagaaggacaagggggccctggacaacctgctgagccagctgattgctgagctgggcatggacaagaaggatgtgtccaagaagaatgaaagaagtgccctgaatgaggtgcacctggtggtgatgaggctgctgagcgtcttcatgagcaggaccaagagcggcagcaagagcagcatctgtgagagcagcagcctcatcagcagcgccacagctgctgccctgctgagcagcggggctgtggactactgcctgcacgtgctgaagagcctgctggagtactggaagagccagcagaatgatgaggagcctgtggccaccagccagctgctgaagccccacaccaccagcagccccccagacatgagccccttcttcctgcggcagtatgtgaagggccatgctgctgatgtgtttgaggcctacacccagctgctgacagagatggtgctgcggctgccctaccagatcaagaagatcacagacaccaacagccgcatccccccacctgtgtttgaccacagctggttctacttcctgtctgagtacctgatgatccagcagaccccatttgtgcggcggcaggtgaggaagctgctgctcttcatctgtggcagcaaggagaagtaccggcagctgcgggacctgcacaccctggacagccacgtgcggggcatcaagaagctgctggaggagcagggcatcttcctgcgggcctctgtggtgacagccagcagcggcagcgccctgcagtatgacaccctcatcagcctgatggagcacctgaaggcctgtgccgagattgctgcccagaggaccatcaactggcagaagttctgcatcaaggatgattctgtgctgtacttcctgctgcaggtgtccttcctggtggatgagggcgtgtcccctgtgctgctgcagctgctgagctgtgccctgtgtggcagcaaggtgctggccgccctggccgccagcagcggcagcagcagcgccagcagcagcagcgcccctgtggccgccagcagcggccaggccaccacccagagcaagagcagcaccaagaagagcaagaagtag

SEQ ID NO: 337566 - DNA, 15480 bp, Artificial Sequence
  derived and/or modified sequence
atggccaccagcggcggcgaggaggccgccgccgccgcccccgccccagggaccccagccactggcgcggacactaccccaggctgggaggttgcagtccgcccgttgctgagtgcatcctacagtgcattcgagatgaaggagttgccgcagttagtggcctccgttatagaaagtgagtcggaaattttgcaccacgagaagcaatacgaacctttctattcttcttttgtggctttatcaactcactacatcactaccgtctgtagtttaatcccgcgaaatcaattacagagcgtggcagccgcctgcaaagttttaattgagttttcgctgttaagattggagaatccagatgaagcttgcgccgtaagccagaagcatctgatcctgcttattaaagggctgtgcacgggatgttccaggctggatcgcactgagattatcacattcaccgctatgatgaaaagcgcgaagcttcctcagactgttaaaactcttagtgacgtggaggaccagaaggagttggcgagcccagtaagccccgagctaaggcaaaaagaagtccaaatgaattttctgaaccagctcacctccgtttttaatccaagaaccgtagcctcccagcctattagcacacaaaccctggtggaaggcgaaaacgacgagcaaagctccaccgatcaggcatccgccatcaagaccaaaaatgtgttcattgcccagaatgtcgccagcctacaagagctgggggggtcagagaagctattacgagtgtgtttgaacctgccttatttcctccggtacatcaacagattccaggatgctgttctggccaactcattttttattatgccagctacagtcgcggacgctactgctgtaaggaatggcttccatagcttggtaatcgatgttaccatggcactagacaccctgagccttccagtcttggagccccttaatccgagtcgacttcaagatgtgacagtgctgagtctgtcgtgcctgtacgctggcgtgtcggtagccacctgtatggccattttgcacgtggggtccgcccagcaggtgagaaccggatctacctctagtaaagaggatgattatgaatcagacgctgccaccattgtccagaagtgcctggagatttacgacatgattggacaggcgatctcatccagcagacgggccgggggagagcactatcagaattttcaactgcttggggcctggtgcttattaaactctttgttcttgattttgaatctctcccctactgcccttgccgataaagggaaagagaaggaccccctggccgcactgagagtgcgggacatcctcagcaggacaaaggagggcgtgggatccccaaaactgggcccggggaagggacaccagggattcggcgtgctcagcgtgatattagccaatcacgccataaagctgctgacttccttgtttcaagatcttcaggtggaggcgcttcacaagggctgggaaactgacggacccccagctgccctgagcatcatggcccagtcaacctccatccagcgcattcagcgcttgatcgactccgtgcctttgatgaacttgttgctgacactcctttctacctcctatcggaaagcatgtgtgctacagaggcagcgtaaaggaagcatgtcttccgatgccagcgcctccacggactctaacacatactatgaggacgacttcagcagcaccgaagaggattcctctcaagacgacgactcggagcccattctgggtcaatggtttgaggaaaccatttctcccagtaaagagaaggctgctcccccccctcctccccctccccctccactcgagtccagccctagggtcaagagcccctctaagcaggctcctggtgaaaaagggaacatccttgcttcacgtaaagacccggaattgtttttaggtctcgccagcaatattctcaacttcatcaccagctcgatgcttaactctagaaacaacttcatcaggaattacctttccgtctccttaagtgagcaccatatggctacccttgctagcatcatcaaagaagttgataaagacggcctcaaagggtcttcggacgaggagtttgccgcagctctctaccacttcaaccattctcttgtgactagtgatctgcagtccccaaatctgcagaacactctcctgcagcagctgggcgtggccccattcagcgagggaccctggccactgtatattcatcctcagagcctgtcagtgctctctaggttacttttgatttggcaacacaaggccagcgctcagggtgatcccgacgtgcccgagtgcctaaaggtgtgggatcgcttcctctccacgatgaaacagaacgctctgcagggcgtcgtccccagtgaaacggaggacctaaacgtcgagcatctacaaatgctgctgctcattttccacaatttcaccgaaactgggcgaagggcaatcctgtcgctatttgtccagattatccaggagttgagtgttaacatggatgcccaaatgcgttttgtacccctcattttagctcgactgctgctcatattcgactaccttctacatcagtattcgaaggcaccggtctatctgtttgaacaagtccaacacaatttactgtctccgcctttcggatgggcctccgggagtcaggattcaaactcacgccgcgcaacaacaccactgtatcacggcttcaaggaggtggaagagaattggagtaaacattttagttctgacgcggtcccccatccaagattttactgcgtgctgtctcctgaagcaagtgaggatgatctgaatcgcctggattcagtggcatgtgatgtcctgttcagcaagctggtgaaatacgatgagttgtacgctgcgctcaccgcgctgctggctgccggtagtcagctggataccgtgagacgcaaggaaaacaaaaacgttacagccctggaggcatgcgcactgcagtactattttctgattctgtggcgaattcttggcattttgccgccttccaaaacttacattaatcagctctcaatgaacagccccgagatgagtgagtgtgatatactccacacactgagatggtcatcgagattgcggatcagctcctacgtgaattggatcaaagaccatctaatcaaacaaggaatgaaagccgagcacgcaagctccctactcgaactggcttctactactaagtgcagctctgtgaagtacgatgttgagatcgttgaggaatacttcgcccggcagatctcctcattttgttcaatcgactgcacaactatactgcagctccatgagatcccaagtctgcagagcatctatacactggatgcagccatctcgaaggtccaggtgtcacttgatgaacacttttcaaagatggcagccgaaacagatcctcacaagtccagcgagattacaaagaacctcctgccggcgactttacaactcattgacacatacgccagctttacacgagcttacctgttacagaattttaacgaggaggggacaacagagaaacccagtaaggagaaattacaagggtttgccgccgttttagctattggttcttcacggtgcaaagccaacactttgggccccaccttggtacagaacttacccagctcagtgcagacagtgtgtgaatcttggaataatataaatactaacgagttccccaacatcggatcttggcgcaacgcattcgcaaatgacacaattccgtccgagagttacatcagcgcagttcaggccgcccatcttgggacactttgcagtcaatcccttccattggcagcctcgctgaagcatactctactcagcttagttaggttgactggagatctgatcgtctggtctgacgaaatgaatcccccccaggtcatccgcaccctgctgcccctgttgctcgagtcctccaccgagtctgtcgccgaaatctcatcaaactcccttgagaggattctaggaccagcggagtcagatgagttcctcgcccgtgtatacgagaagctgatcacaggctgctataatattctcgccaaccacgctgaccccaactctggtctcgatgaatcgatcttagaggaatgtctccaatatctcgaaaagcaactggagagttcccaagcccgaaaggccatggaagaattctttagcgacagcggagagttggttcagatcatgatggctaccgctaatgaaaacctgagcgcaaaattttgcaaccgggtcctcaagttctttacaaagctcttccagttaacagaaaagtctccaaatccctcactactccacctttgtgggtctctggcacagctggcctgcgttgagcccgtgcgtcttcaggcttggctgacccgtatgaccacatccccaccgaaggactccgaccagctggatgttattcaggagaaccgccagctgctgcagttgctcacaacgtatattgtccgggagaactcgcaggtgggtgagggtgtgtgcgccgtgctccttggtactctaacccctatggctaccgagatgctggcaaatggcgacgggaccggcttccctgagctgatggtggtcatggccacactggcatccgcaggccagggcgcaggccacctacagcttcataatgccgcggtagattggctcagccgatgcaagaaatacctgagtcagaagaatgtggttgaaaaactgaacgccaatgtcatgcatggaaaacacgtcatgattctagagtgtacctgccatatcatgtcgtatttagccgacgtgactaatgcattgtcacagtcgaatggtcagggccctagccacctgagcgtggacggagaagagcgtgctattgaagttgatagcgattgggttgaggagttggcagttgaggaggaggacagccaggccgaggactcagatgaggatagcctttgtaataaactttgtacattcactattacacagaaagagttcatgaatcagcattggtatcactgccatacttgcaagatggtcgacggggttggcgtgtgtaccgtctgtgctaaggtgtgccacaaagatcacgagatttcctatgccaaatacggttcgtttttttgcgattgcggcgccaaggaggacggctcttgcctggctctcgtcaagagaaccccatccagcgggatgagctctaccatgaaagaatcagccttccagtctgaacctcgtattagtgagagtctggtgcgccacgcaagtaccagttcacccgctgacaaggcaaaggtgactatttcagatgggaaggtggcagatgaagagaagccaaaaaaaagcagcctctgccgtacagtcgaaggctgccgggaggaattgcagaaccaggccaacttctccttcgctccattggttttggatatgctcaatttcctgatggatgcaattcaaactaacttccagcaagctagtgctgttgggagtagctcgcgcgcacagcaagcactcagcgagctccataccgtggaaaaagccgtggagatgacggatcaactcatggtgcccacactgggctctcaggagggtgcctttgaaaatgttcgaatgaactactccggggatcaggggcagactataaggcagctgatttcggcccacgtcctgaggagggtggctatgtgcgtgctgtcgagcccccacggtagacgccagcacctggccgttagtcatgagaaggggaaaatcacagtcctccagctttccgccctattaaagcaagccgattcttctaagcgaaaactgaccctgacacgcttggcatctgccccagtgcccttcacagtgctgtcactcaccggcaacccatgcaaggaggactacttagccgtgtgcggcctgaaagattgtcacgttctcactttctcctcatctggttctgttagtgatcatcttgttctgcacccacaactcgcgacaggtaacttcatcataaaggccgtgtggctgccaggatctcagaccgagctcgccatcgtcacagccgactttgtgaaaatctacgacctgtgcgtggacgcactctcaccgacattctacttcctgcttccaagctccaagattcgcgacgtgacattcctgtttaatgaggaagggaagaacattatcgtgatcatgtcaagtgcaggttatatctacacacaactcatggaagaagcctcctctgcccaacaggggcccttttatgtcaccaacgtgctcgaaatcaatcatgaagacctgaaggacagtaactcccaagtagccggaggaggggtttccgtatattactctcatgtcctgcagatgttgttcttttcctattgccaaggtaagagcttcgcagccactatttctcgaactactcttgaggtgcttcagctttttcctatcaatattaaatcctccaacggtggctctaagacatcccccgcactctgccaatggtccgaggttatgaaccatcccgggctggtgtgttgtgtgcagcagacgaccggcgttcccctggtggtgatggttaaacccgacaccttcctgatccaagagataaaaacacttcctgccaaggctaaaatccaggacatggtggccattagacacaccgcatgtaacgagcaacagagaaccaccatgatcctcctgtgcgaggacgggagcctgagaatttatatggccaacgttgagaacacatcctattggctgcagccaagtttgcaaccaagtagcgtgatttccatcatgaagcccgtgaggaaacgcaagacggctaccattacaactcggacctccagtcaggtcacatttcccattgacttttttgaacataatcagcagctgaccgacgtggaatttggcgggaacgatcttcttcaggtttataatgcccaacagatcaaacaccgcttgaatagtaccggcatgtatgtggctaataccaagccagggggcttcacaatcgagatatctaacaataacagcaccatggtgatgactggcatgaggattcagattggcacgcaagcgatcgagcgcgcaccatcctacattgagatcttcggtcggaccatgcagctcaacctcagtaggagtcggtggtttgatttccccttcacgcgcgaggaggccttgcaagccgacaaaaaattgaatctctttattggggcatctgtggacccagccggtgttaccatgattgatgccgtgaagatatatgggaaaacgaaagaacagttcggctggcccgatgaaccacctgaagagttcccgtccgcttctgtgagtaacatttgtccttctaacctaaaccagagtaatggaaccggagactccgattctgccgctcctacaacaacatcaggcacagttttagaatcctctgaaactgaatctcttactaaacttgatcggcttgttgtaagttctttggaagctctggagtcgtgttttgctgtggggcctattatcgaaaaggagcgtaataaaaacgccgcacaggagctggccaccctgcttttgagcctgccggctcctgcttccgtgcaacaacagtccaaaagtctcctcgcctctctgcacacctctcgctccgcttatcactcacataaagatcaggcattgctatctaaagcggtacagtgtctcaacactagctcaaaagaaggtaaggatctcgatccagaagttttccaaagattagtgatcacagctcgcagcattgccattatgagaccaaataatctcgtccacttcaccgaatcgaagttgccccaaatggaaaccgagggcatggacgaaggcaaagagccacaaaagcagctggagggggactgttgctcctttatcacgcaattggtgaatcacttctggaaactgcatgcatcaaagccgaagaacgccttcctggcccctgcatgcttaccgggtctgacccacatcgaggccacagtcaatgccctggttgacatcattcacggttactgcacgtgtgagctcgactgcattaatacggcctctaagatttacatgcagatgctgttgtgtcccgacccagctgtatcatttagttgtaaacaagccctcatcagggtgctgcggccaagaaacaagcggcgacacgtgactttgccatcttcccctaggtccaatacccctatgggcgacaaggatgacgatgatgatgacgatgcggatgaaaagatgcagtcaagtggaatccccaacggtggacatatccgccaggagtcacaagagcagagtgaagtagaccacggtgactttgagatggtatcagaatccatggtcctggaaactgccgagaatgtcaataacggaaatccatcaccacttgaggcattacttgcgggagccgaaggcttcccacccatgctcgatattcctcctgacgccgacgatgaaacaatggtggagctggcgattgccctgtcgcttcagcaggaccagcaggcgcctgcctccgacgatgagggctctactgctgccactgatggatctaccctgcggacctcccctgcggatcacggcggttctgtcgggtcggagagtgggggtagtgcggttgattctgtggctggagagcactctgtctctggcaggtcctctgcctatggtgacgcgacagcggaaggtcatccggccggacccggaagcgtcagctcctcaaccggagccatatcaactacaacggggcaccaggaaggagacggtagtgagggcgagggtgagggggagacagagggcgacgttcatacatctaaccgactgcacatggtgcgactcatgttgctcgagaggctgttgcagacgctgccccaactgaggaacgtgggcggggtgcgcgcgattccttatatgcaggtgattctcatgcttacaacagacttagacggagaagatgagaaggataagggggcactagataatctcctgtcccagctcatagcggaactgggaatggacaagaaggatgtgtctaagaagaacgaacgatcagcactgaatgaagtgcatctggttgtgatgcgtctcctgagtgtctttatgagtcgcactaagagcgggagtaaaagcagtatttgcgaatccagcagcttgatttcatctgccacagccgctgccctgttgtcgtccggcgccgtcgactattgcctgcatgttctcaagtcactcctcgagtactggaagtcccagcaaaatgacgaggagcctgtcgcaacctcacaacttctgaagcctcatactacaagtagtccgcctgatatgagtccattttttctgcgacagtacgtgaagggccacgccgcggacgtgtttgaagcatacacacagctgctgacagaaatggttttgagactcccttatcagatcaaaaagataaccgataccaattcaagaataccaccaccggtgttcgatcattcatggttttactttctgagcgaatatctgatgattcagcagactcccttcgtacggcgacaagtgagaaagcttctcttgtttatttgcgggagcaaagagaagtaccgtcaactaagagacctacacaccctggattcgcacgtgagagggataaaaaagctgcttgaagagcagggtatatttctgagggcctccgtggtcacggcctcaagcgggagcgctctacagtacgacacgctcatatctctgatggagcatttgaaagcttgtgctgagatagctgcccaaaggaccataaactggcagaagttctgtattaaggatgacagcgttctgtatttcctgttgcaggtgtctttcctcgtcgacgagggagtctcgccagtccttctgcagctgctctcatgcgcgttgtgcggatctaaggttcttgccgccctggccgcctccagcgggagctcatccgcgtcttcttccagtgcacccgtcgccgcttccagtggccaagctactacgcaaagcaaatcctctacaaagaagtcgaagaaggaagagaaggagaaagagaaagatggagaaactagcggctctcaagaagatcagctttgcaccgctctggttaaccagctcaacaaattcgccgacaaggagaccctaatacagttcctgagatgcttcctgctggagagcaattcctcctcagtccgctggcaggcgcactgccttaccctccatatctatagaaattctagcaaatcccaacaggagctgctgctggacctgatgtggtccatttggcctgagctaccagcatacgggcgcaaggctgcccagttcgtggatttgctggggtacttttcactgaagactccacagacagaaaagaaactgaaggagtattctcagaaggccgtggagatcttacgaacacaaaaccacattttgaccaaccaccccaatagcaatatatataacacactctcaggtcttgttgaattcgacggatactatctggagtctgatccatgcctagtctgtaataaccccgaggttcccttttgttacattaagctatctagcattaaggtagataccagatatactactactcagcaggtagtaaaattaattgggagtcacaccatatccaaagttaccgttaagatcggcgacttgaaacgcaccaagatggtgagaacaattaatctctactacaataacaggaccgtccaagcaattgtagagttgaaaaacaaaccagcaagatggcataaggccaaaaaggtccagctcactcctgggcagactgaggtcaagatagatctccctctgcccatagttgccagcaacctcatgatcgaatttgcagacttctatgagaactaccaggcctccaccgaaacactccagtgccccagatgctccgcctctgtgccagcaaaccccggagtgtgtggcaactgcggagaaaacgtctaccagtgccacaagtgtcgcagtattaactatgatgagaaagaccctttcctgtgtaacgcgtgcgggttctgcaaatatgccaggttcgacttcatgctttacgctaaaccgtgctgcgcagtggatccaattgagaacgaagaggataggaagaaggccgtcagcaatattaacactttgttagacaaggccgacagggtgtaccaccagctgatgggccaccgaccccaactggaaaatctgctgtgcaaagtcaacgaggccgcacccgagaagccgcaagacgatagtggcacagcagggggcatctcctctacaagcgccagcgtcaatcgctatatcctccagcttgcgcaagagtattgcggcgattgtaaaaattcattcgacgaactttcaaaaatcatccagaaggtcttcgcttctagaaaggagctcctcgagtacgacctccaacagcgggaagccgccacaaagagcagtagaacttcagtacagccgacattcactgcttcacaataccgggccctgtccgtgctgggatgcggtcacacttcctctactaaatgctacggctgtgccagcgccgtaacagagcattgtataacgcttctcagggcgctggctactaaccccgcactgagacacattctggtcagtcagggccttattcgcgagctgtttgactataatttaaggcgcggcgctgcagctatgagggaggaggtgcgccagctcatgtgcctgctgacacgtgataatcccgaagctactcaacagatgaacgaccttatcattggtaaggtgtctacagctctcaagggccactgggcgaatccagatttggctagttctctgcagtacgaaatgcttctcctgaccgattccatctccaaagaggatagctgttgggaacttaggctgaggtgcgccctcagtctgtttctgatggccgttaatatcaagacacccgtggtagtagaaaatattacgctaatgtgtctgcggattttgcaaaagcttatcaagcctcctgccccaacatctaagaagaacaaggacgtgcctgtagaagccctcaccactgtcaagccctactgtaacgaaatccatgcccaagcacaactctggctgaagcgggaccctaaggcctcctacgatgcttggaaaaagtgcttaccgattcggggaatcgatggcaatggtaaggcaccaagtaagtcagaactccggcacctctatctcactgaaaagtatgtatggaggtggaagcagtttttatcacggaggggcaaaaggacatcgcccctggaccttaaacttggccataacaattggctccggcaggtgttgtttacaccggccacacaggctgccagacaagccgcatgtactatcgtagaagccctcgcgacaatcccatcgcggaagcagcaagtgttggatctattgacaagctatctggatgaactttccattgctggcgaatgtgctgctgagtacttggcgctgtatcagaagctgatcacaagtgctcactggaaggtgtacctggccgccaggggcgtgttgccttatgtgggaaacttgattaccaaggaaatcgccagactgctcgcattagaagaagctactctgtccacggacctccagcagggatatgccctgaagtcgctgaccggcctgttatcctcgtttgtagaggtggaatccataaagaggcacttcaagtcccgcctcgtgggcactgtcctgaacggatatctgtgtcttaggaagctggtggtgcaaaggacaaaactcatcgatgagacccaggacatgctcttagagatgctagaagacatgacgacaggaacggaaagcgaaacaaaagctttcatggccgtgtgtatagaaacagccaaaagatacaacctggacgactatagaacccctgtgtttatctttgagagattgtgcagtatcatctaccccgaggagaatgaggtgactgagttcttcgtgaccctagaaaaagacccacagcaagaagatttcctccaggggagaatgcccggcaacccgtactcatcgaatgaacctgggatcgggccactaatgcgggacataaagaataaaatctgtcaggattgcgacttagtggcacttctggaagatgacagcgggatggaactactcgtaaacaacaagatcatctctttggacttgcctgtggccgaagtgtataaaaaggtatggtgcacgacaaacgagggggagcctatgcgaatcgtctatcgcatgcgcgggctgctgggggatgctacagaggaattcattgagtccctcgattccacaacagatgaagaggaggatgaggaagaggtttacaagatggccggagtcatggcccaatgtggcggccttgagtgcatgctcaaccgcctggctggcattcgcgactttaagcagggcagacacctgttaaccgtgctactcaaactgttttcctattgcgtgaaagtgaaagtcaataggcagcagcttgtcaaactcgaaatgaatactctaaatgtaatgctgggcacactgaatctggccttggtggccgagcaagaatcaaaagattccggtggagctgctgttgccgagcaggtactgtccatcatggagatcatactcgatgaaagcaatgctgaacctctctctgaagacaaaggcaacttgttgctgacgggagataaggaccaactggtcatgctcctcgatcagatcaattccacctttgtgcgaagcaaccctagcgtgttgcagggactgttaaggataataccatacctgagtttcggcgaggtggagaagatgcagatcctggtggaacggttcaagccttactgtaacttcgacaagtacgatgaggaccactcaggtgacgacaaggtgtttcttgattgtttctgcaagatcgctgcagggatcaaaaacaattccaatggccaccagctgaaagatctgatcctgcagaaaggcatcacccagaatgctctggattacatgaagaagcacatcccctcagctaagaatctagacgcagatatttggaaaaaattcctatcgcgaccggcattaccatttattctgaggctgttaagagggcttgccattcaacaccctggaactcaagttttaatcggaacggacagcatccccaatttacataaactggaacaggtctccagcgacgaggggattggcactctcgccgagaaccttctggaggccctgagggagcacccagatgtcaataaaaaaattgacgcagctcggcgcgaaacaagagcagaaaaaaagcggatggcaatggccatgcgtcagaaagccttgggaactctcggcatgactaccaacgaaaaggggcaggtcgtgactaagacggccctgctgaaacagatggaggagctcatcgaagagcccggcctgacctgttgcatctgtcgcgagggttataagtttcagccaactaaggtcctgggtatctacacattcaccaaacgcgtggccctggaagaaatggaaaataagccacggaaacagcagggctactccacggtatcacatttcaatattgtacattacgactgtcacttggcggctgtcaggctcgcgcgcggacgcgaggagtgggagagtgcggcccttcaaaacgccaacacgaaatgtaacggcttgttacctgtgtggggcccccacgttcccgagtcagcctttgcaacttgccttgcccggcataacacatacctgcaagagtgcaccggtcaaagagagcccacataccagctcaacatccacgacatcaagctgctctttctgagatttgcaatggaacaaagttttagtgctgataccggcgggggcggcagggagtcaaacatccatcttatcccttatataatccacacagtgctgtatgttctaaatactacaagagctacaagccgcgaggaaaagaatttgcaggggttcctggaacagcccaaagagaaatgggttgaatccgcctttgaggtcgacgggccctattacttcacagtgctggccctgcatattctccctcctgaacagtggagagcaacacgcgtcgaaatcctccgtcgcctgctggtcacctctcaggcccgggctgtggcccccggaggagccacacggctgactgataaagccgttaaggattactctgcatataggtcatcactgttattttgggccctggtcgacctgatctataatatgtttaaaaaagtccctaccagtaacacggaaggagggtggtcctgctccctcgccgagtatattcggcataacgatatgcccatatacgaagctgccgataaggcgctgaagacatttcaggaggaatttatgcccgtagagaccttcagcgaatttcttgatgtggctggtctcctgtctgaaatcacagaccctgaaagttttctcaaggacctcttaaactcagtcccctag

SEQ ID NO: 337567 - DNA, 6177 bp, Artificial Sequence
  derived and/or modified sequence
ctggtgcggctgaccggcgacctgatcgtgtggagcgacgagatgaacccgcctcaggttatacggaccctcctgccgcttctcttggagagttctacagagagtgttgcggagatttcctcaaattccctggaacgaatcctgggtccagcagagtccgacgaattcctggcaagagtgtatgagaaattaatcacagggtgctacaacatcctcgctaaccacgctgatcccaacagtggactcgacgagagtatcctggaagagtgcctgcagtacctcgaaaagcagttggagagcagccaggctcgtaaagcaatggaggaatttttctctgattctggagagttggtacagataatgatggccaccgccaatgaaaatttaagtgcaaaattctgcaatcgggtgctcaaattcttcacaaagcttttccaactgacggagaagtcaccgaatccctccttgttacacctgtgcggtagcttggcacagcttgcatgtgtggagcccgttcggctacaggcttggctcacaagaatgactacatcccctcccaaggattcagatcagttagatgtgatacaggagaacagacaactactgcaactgctgacgacatatattgtgagagaaaatagtcaagtcggcgaaggggtctgtgctgtgcttttggggaccctcactcccatggctacggagatgctagccaacggcgatgggaccggatttcctgagttgatggtggttatggctaccctcgcgagcgctggtcagggtgccggccacctacagctccacaacgcagcggtagattggttgtcgcgctgcaaaaagtatctctcacaaaaaaacgtcgtggagaaactgaacgccaatgtgatgcacggaaagcacgtgatgatactcgagtgcacatgccatataatgtcctacttagcggacgtgacgaatgccttgagtcagtccaatggacagggtcccagccatctgagcgtggacggagaagagcgggcaatcgaagtcgattccgattgggtagaggaactcgctgttgaggaagaggattctcaggccgaagattctgatgaagacagcctgtgtaacaagctgtgtacattcactattactcaaaaagaattcatgaaccagcactggtaccactgccacacctgcaaaatggtggacggcgtgggcgtgtgcacagtgtgcgctaaagtgtgtcataaggaccacgaaatctcttatgctaaatacggatcattcttctgcgactgcggtgctaaagaggacggtagctgtctagctctagtgaaacgcacgccctcctccgggatgtcctccactatgaaagaatctgcattccagtcagaaccccgcatctctgagtccctggtcaggcacgccagtacatccagtcctgccgacaaagccaaggtgaccattagcgacggcaaggtggcagacgaggagaagccaaaaaaatcctctctgtgtaggactgtggagggttgccgagaggaactgcagaaccaggccaacttctcctttgcccccctcgtattagatatgcttaattttctcatggacgccattcagaccaattttcaacaggctagcgcagtaggatcttcctcacgggcccagcaagcgttatctgaactccacaccgtggagaaagcagtggaaatgacagatcaactaatggtccccaccttgggctcacaggagggtgcctttgagaatgtgcggatgaactattccggagatcagggtcagaccatccgacaattaatttccgcgcacgtcttgagaagggtggccatgtgcgttctgagctccccccatggacggaggcaacatctggcagtttctcatgaaaagggaaagattacagttctccagctgtctgcgctattgaagcaggcggacagtagcaagaggaagttgactttaacccggctagcctctgcacccgtgccttttacagttctgtcgctcaccggaaacccgtgtaaagaggattatctagcagtatgcgggctcaaggactgccatgtgctcacattttcatcatccggatcggtgagcgatcatctggtattgcacccccagctcgcaactggcaattttattatcaaggccgtgtggcttcccggctctcagactgagctcgcaattgtgacagcggactttgtaaaaatctacgatctctgcgtggatgccctgagccccactttttatttcctgttgccttcctccaaaatccgagacgtaacttttctcttcaacgaggaaggaaagaacataattgttatcatgtcgagcgccggttatatctacacgcaactgatggaagaggcctcaagtgctcagcagggtcccttttacgtaacgaacgtgctcgaaatcaaccacgaagatctcaaggactcaaatagtcaggttgctggcggaggggtgagcgtgtactattcacacgtgcttcagatgctgttctttagctattgtcagggaaagtccttcgccgctactatctcccgcactaccctggaagtactgcagctgttccccattaacatcaaaagcagtaatggcggttccaagaccagccccgctttatgccaatggagtgaagtcatgaaccaccccgggcttgtctgctgtgtgcagcagaccaccggagtaccactggtagtaatggttaaacccgacacttttctgatccaggagattaaaacgcttccggcaaaagccaaaatacaggatatggttgccattaggcacacagcatgcaatgaacagcagcgcaccacaatgattttactgtgtgaagacgggtcattgaggatttacatggctaacgtggagaacacttcttactggctccagcctagtctgcagcccagcagtgttatatccatcatgaagcctgtgagaaaaagaaaaaccgctacaataacaactcgaaccagtagccaggtgacctttccgatagatttttttgaacacaatcagcaactcactgatgtagagtttgggggcaacgacctgttgcaagtttataacgcccagcagatcaagcaccgcctgaactcaaccggcatgtatgtggcgaacaccaaacccgggggattcaccatcgagatctcaaataataacagtaccatggtcatgaccggcatgcggatccagatcggtacccaagccatcgaaagggcgccgtcgtacatagagatcttcggtaggacaatgcagctgaacctatcccgaagtcgttggtttgacttcccttttacccgagaagaagctctgcaggccgacaagaagctcaacctattcataggcgcatcagttgacccagcaggggtaaccatgatcgatgctgtgaagatctacggtaagacaaaagagcagtttggatggcctgacgagccccctgaagaattccctagtgcctctgtaagcaacatctgtccctctaaccttaaccagtctaacggcactggcgacagtgatagtgccgcaccgaccactacatctggcacggtcttggaatcgagtgagaccgagagcttgaccaaacttgatagactggtggtgtcatccctcgaagccttggaaagttgctttgccgtgggccccatcatcgaaaaggagagaaataagaatgccgcccaggagctagccaccctcttgctgtctctgcccgcacctgcctccgtgcaacagcaatcaaagtctctcctagcatcactacatactagtcggtctgcctatcacagccataaggaccaggcccttctgagtaaagctgtgcaatgccttaacacaagttccaaggagggaaaggaccttgatcccgaggtctttcagagactcgttataacagctagatcaatcgctattatgcgccctaataacttagtccatttcacagagtccaagctacctcagatggagacggaaggcatggacgagggaaaggaacctcagaagcagctcgagggagattgttgtagtttcatcacccagctcgtcaatcacttctggaaacttcatgcctccaagcccaagaacgccttccttgcacccgcttgtctccccggactgacccacattgaggccaccgtcaacgccctggtcgacatcattcacggctactgtacatgcgagctggactgcattaatacagcaagcaaaatatacatgcaaatgttgctttgtccagacccggctgtgagcttctcctgcaaacaggctctcattcgtgtgttaagacctcgaaacaaacggaggcacgttactctgccctcgtcaccccgcagcaacacccctatgggagacaaagacgatgatgacgatgacgacgcagacgagaagatgcagtcgagcggaattccaaacggaggtcacatccgccaagaaagtcaggaacaatctgaggtggatcacggcgactttgagatggtcagcgagagtatggtcctggagactgccgaaaatgtgaataacgggaatccttcacctctcgaggctctgctggctggtgctgagggcttcccaccaatgctggatatcccgcccgatgctgacgatgagacaatggtggagctggcaattgcattgagcctccagcaagatcagcaggcgcccgcttcagatgacgaggggagcacagcagctactgatggtagcacgctgcgaacctcaccagcagaccacggcgggtctgtcggatctgaatctgggggcagcgctgtggactcagtggctggcgagcacagtgtctctggacggtctagcgcctacggagacgccactgccgaaggccatccagccggcccagggtccgtgagctcatccacaggagcgatttcaactacgacaggccatcaggagggagatgggagtgagggagaaggagagggggaaaccgaaggagatgtgcacacatcaaatcgacttcacatggtccggttgatgttacttgagcgactgcttcagacgctgccccagttgcgtaacgtaggcggcgtgagagctataccgtacatgcaagtcatcttgatgctaaccacggatctggacggcgaagacgaaaaagacaaaggagccctcgacaacctgctatcccagctgattgcagagctgggcatggacaaaaaggatgttagcaaaaagaacgaacgaagtgcactgaacgaagtgcatctcgtggtgatgcgcctgctgagcgtgtttatgagccggactaagtcaggtagcaaatccagcatctgcgaatctagctctctcatttcatcagccaccgccgccgctttgctgagttctggcgctgtggactattgcctccacgtgcttaaatccctgcttgagtactggaaatcgcaacagaatgacgaggagcctgtagcaactagtcagttgctcaaacctcacacaacctcttcaccaccagacatgtccccattttttctcaggcagtacgtaaaaggccacgccgcggacgttttcgaagcatacacccaacttcttacagagatggtattgcggctgccataccagattaagaaaatcactgacactaacagcagaattccacctccggtgttcgaccatagctggttctatttcctgtctgagtatctgatgattcagcagacccctttcgttcgtcggcaggttagaaagctgctcctgttcatttgcggctctaaggaaaaatacagacaacttcgagatttgcataccctggactctcacgttcgcggcatcaagaagctgttggaggaacaggggatattcctgagggctagcgttgtgaccgcttcttcaggtagcgccctacaatacgatactttgatcagcttgatggaacacctcaaggcatgcgccgagattgccgctcaaaggaccatcaattggcagaagttttgtatcaaggacgatagcgtgttgtattttttgctccaggtttcctttctggtggacgagggtgtctccccggtactgctgcagttacttagctgcgcactgtgtgggtcaaaagtgctcgctgctctggctgctagctccggatcctccagcgcgtccagtagttctgcacccgtcgcggctagctccggccaggctaccacacagagcaagagctctacaaagaaaagcaaaaagtag

SEQ ID NO: 337568 - DNA, 15480 bp, Artificial Sequence
  derived and/or modified sequence
atggccacatctggcggtgaggaggctgccgctgctgcaccggctcccggaacaccagccactggggctgatacaacgcctggttgggaagtggccgttcggccactgcttagcgcgtcatatagcgccttcgaaatgaaagaattacctcagttggtggctagcgtgattgagagcgagtcagagatcttgcaccacgagaaacagtatgagcccttttactcaagtttcgtggcgttgtcgactcattacattacaaccgtgtgctccctcattcccagaaatcagctgcagtctgtggcggcagcatgcaaggtgctgatcgagttctctctgttgcggttggaaaaccctgatgaggcttgcgccgtatctcagaagcacctcattttactgataaaaggtttgtgcaccgggtgctcacgtctggatagaaccgaaatcattacatttactgccatgatgaaatctgcgaaactcccccagacggtgaaaactctgagcgacgtagaggaccagaaggaattagccagccccgtttcccctgagctgcgccaaaaggaggtccaaatgaatttccttaatcagctaacctctgtattcaacccacggactgtggcaagccagccaatatccacgcaaacactcgtcgaaggcgagaatgatgaacagagtagcactgatcaggcctctgccataaaaactaagaatgtttttatagctcagaacgtggccagcctccaggaattggggggttctgagaaattgttacgggtctgcctcaacttgccttacttcctaagatacatcaatcgttttcaggacgccgtccttgctaacagttttttcattatgccagctacagtggccgacgccactgctgtcaggaatggtttccactcactggtcatcgacgttaccatggctctggacaccctgtcattacccgttctggagcctctaaacccatctcggctgcaggatgtaactgtgctctcattgagttgtctgtacgcaggcgtgagcgtggcaacatgtatggcaatcctacacgttggctcagctcagcaggtgcgcactggatcaacctcttcaaaggaggacgattacgaatcagatgctgcaaccattgtccagaaatgcctagaaatatacgacatgataggacaggctattagctcttctaggagagccggtggcgagcactatcagaattttcagctcctgggggcatggtgccttctcaactcattatttctcatcctcaatctcagcccaaccgcactagcagataagggcaaagaaaaggaccctctcgccgcactgcgtgtgagagatatcctcagtcggaccaaagaaggcgtgggcagcccgaaactgggtcctggcaaaggccaccagggctttggagtgctaagtgtgattctcgccaaccacgctattaagctgctgacatccctctttcaggacctgcaggttgaggcactccacaaaggctgggagacagacggcccacctgcagccctgtcaatcatggctcagagcacgtcaatacaacggatccagaggttaatcgattctgtgcctctgatgaatctgttactcacactgctgtccacctcttatcgtaaagcatgcgtgttgcagagacaaaggaagggctcgatgagttcagacgccagcgcttccaccgactctaacacctactacgaggacgacttctcttcaaccgaggaggatagcagtcaggacgacgactctgaacccatccttggacagtggttcgaggagacaattagcccatccaaggagaaggccgcaccccctccgcctccgcctccgcctcccttggaatcttctcctagagttaaaagtcccagcaagcaggccccaggcgagaagggcaacattctggctagccgtaaagatcctgaactgtttttgggacttgcctccaatatattgaactttatcacttcttctatgctgaactcccgtaataattttatcaggaattacctgtcagtttccctcagtgaacaccacatggccaccctggcctcaattattaaggaagtagataaggacggactgaaagggtccagcgacgaagaatttgccgctgccctttaccactttaaccattccctagtcacttccgaccttcagtcacctaatcttcaaaatacactgcttcaacagctgggagttgcacctttttctgaagggccatggccactgtatatacaccctcagagtcttagcgtgctgtcccgactgctcctcatatggcagcacaaagcaagtgctcaaggggatccagatgtacctgaatgtctcaaagtttgggatagattccttagcacgatgaagcagaatgcgctccaaggtgttgtgcctagtgaaacggaagacctcaatgtggaacacctccagatgcttctcctcatctttcacaatttcactgagaccggcaggagggcaatcctgtccctgtttgttcagatcatccaagagctgagcgtgaatatggacgcacagatgcgcttcgtacctctgattttggccaggctgctgttgatattcgattacctgttgcaccagtatagtaaggcccctgtctaccttttcgaacaggtgcagcacaacctgctgtccccgccattcggatgggctagcgggtcccaggactcaaactctagacgagcgacaacccccctgtaccatgggttcaaagaggtcgaggagaactggtcgaagcacttctcctctgacgctgttccccatccccgtttctactgtgtactcagtccagaagccagtgaggacgaccttaaccgacttgatagcgtggcctgtgatgtactcttctctaagttagtgaagtatgacgaactctatgcggcactgactgctctgctcgcagccggatctcaactcgacacagtgagaaggaaggagaacaagaacgtgactgccctcgaagcttgtgccctgcagtactacttcttaattctttggcgcatactcgggatccttcctccctctaaaacttacattaatcaactgagtatgaactcgcccgagatgagcgagtgtgacatcttgcacacattacgatggtctagccggcttcgcatttccagctacgtcaattggatcaaagatcatcttataaagcagggtatgaaagcagagcacgccagcagcttgttggagctggcaagcacaaccaaatgttccagcgtaaagtatgatgttgaaattgtggaggagtacttcgctcggcagatcagttctttttgtagcattgactgcaccacaatattacagttacacgagatccctagtctgcagtcaatctatactttggatgccgctatatccaaagtccaggtgtcgctggatgagcattttagcaaaatggcggcagagactgaccctcataaatcttcagaaataactaagaacttattaccagccacgctacagttgattgatacatatgccagcttcaccagggcatacctgctgcagaacttcaatgaggagggcaccactgagaaaccatctaaagaaaagttgcaggggttcgcagctgtcttggctattgggtccagtcgatgcaaagcaaacaccctgggcccaaccctggtacagaaccttcccagttccgtgcaaacagtatgcgagagttggaataacatcaacaccaacgaattccccaatatcgggtcttggaggaacgccttcgccaatgacactataccctctgagagttatatctctgccgtccaggcagcacatctggggaccctgtgctcccagtctctccctctcgctgcttcactgaaacacacgttgttgagcctggtcagattgacaggcgatctgatagtgtggtccgatgaaatgaacccccctcaggtgatccgcacactgcttcccctgctgttggaatccagcactgaaagtgtagccgagatctctagtaattcattggaaagaatactaggacctgccgagagcgatgagttcttagctagagtgtacgaaaaactgatcacaggatgttacaacatacttgcaaatcatgcagaccccaatagcggactagatgaatcaattttggaagaatgcctccaatatctggaaaaacagctggagtcctcgcaagcgcgaaaagctatggaggaattcttcagcgactccggggaactggtacagattatgatggctactgcgaacgaaaatctctccgctaagttttgcaaccgcgtcctcaaattttttacaaaattatttcagttgacagagaaaagtcccaatccatccctgttgcatctgtgcggtagcttggcacaactggcctgtgtggaacccgtcagactccaggcttggctgacacggatgacaacgagccccccaaaagactcggaccagctggacgtgattcaggagaatcgacaactcctgcagctgctgacgacttacatcgttagggagaacagccaggtaggcgaaggcgtgtgtgctgtgttgttgggcacccttactcccatggcgacagaaatgcttgccaatggcgacggtactggatttccagagctcatggtggtgatggccactttagctagtgccggtcagggggcaggacacctgcagctgcataacgccgctgtcgactggctttctaggtgtaaaaaatatctttcacagaagaacgtggttgagaagctgaatgcaaacgtgatgcatggcaaacacgtgatgatccttgagtgtacttgccatatcatgtcttatttggctgacgtgaccaatgccctttcccagagcaacggccagggtccctctcacctgtccgtggatggcgaagagagagctatcgaggtagactcagactgggtggaggaactggctgtagaagaggaagactcacaggcagaggactcggacgaggattccctttgtaataaactgtgtacgttcacaattacccagaaagagtttatgaaccagcattggtaccactgccatacttgcaaaatggtggatggagtgggtgtctgtactgtgtgtgcaaaagtatgccacaaagaccatgaaataagctatgcgaaatacggcagctttttctgcgattgtggtgccaaagaagacggctcttgtttagccctggtaaaacggactccttcaagcggcatgagctccaccatgaaggagtctgctttccagtccgagccaagaatctccgagtcactggtgcgccacgccagcaccagttctcctgcggataaggctaaagtgaccatctcggacggcaaggtggccgacgaggaaaaacctaaaaaatcatccctttgcaggaccgtagagggctgtagagaagagctgcagaatcaggctaatttctcattcgctcccctcgttttggacatgctgaactttctgatggatgccattcagaccaatttccagcaggcctccgctgttggcagctcctcaagagcccagcaggctcttagcgagttgcacaccgttgaaaaagccgtcgaaatgaccgatcaactcatggtgccaaccttgggctcccaggagggggcattcgaaaacgtccgcatgaactattctggagatcagggtcaaacgattcggcagctcatctctgctcacgtgctaagaagagttgctatgtgtgtcctttcatctcctcacgggagaagacagcacctggcagtttctcacgaaaaggggaaaattactgttttacagctgtccgcccttctcaaacaggcagactcctccaagagaaaacttaccctgacccgcttagcatctgccccagtgccctttaccgtcctcagcctcaccgggaacccgtgtaaagaggattacctggctgtttgtggcctgaaggactgtcatgtgctgacattttcaagttctgggagcgtgagtgatcatctggtgctgcacccacaactggctacaggcaactttataataaaagccgtctggcttccaggctcccagaccgagctagccattgtgacagcagattttgtgaagatatacgacctgtgcgtcgatgctctatctcctactttttactttcttctgccatctagtaagattcgcgacgtgacttttctgtttaatgaggagggaaagaacatcatcgttataatgagttctgcaggttatatctacactcagttgatggaggaagcttcctcagcccagcagggcccattttatgtcacgaatgttctcgaaattaaccacgaagatctgaaagatagtaacagccaggtggccggaggtggcgtgtcagtatattacagccacgtgctgcagatgctatttttcagctattgccaaggcaagtcattcgccgcaaccatctcccgcactactctggaggtcctccaactgtttcctataaatattaaatcgagcaatgggggttccaaaaccagtccggctctatgtcagtggtcagaggtgatgaaccatcctggcctagtgtgttgcgtgcagcagaccaccggagtgcccttagtggtaatggtcaaacccgatacctttcttattcaggagatcaaaacactgcccgctaaggctaaaattcaagacatggtggccatccgccacaccgcctgtaatgaacagcaacgaacaacaatgatcttgctctgcgaagacggcagtttgagaatctatatggcaaatgttgagaacacgtcttactggttgcagcccagtctacaacccagttctgtgatttcaatcatgaaacctgttagaaagcgcaaaaccgccactatcactactcggacatctagtcaggtgacatttccaatcgacttcttcgagcacaaccaacagctgacagatgtcgagttcggaggtaatgacttgctccaagtgtacaatgcccagcagattaaacaccggcttaacagtactggcatgtatgtggctaacactaaacctggcggttttacaatcgaaatcagcaataacaatagcaccatggtaatgacgggtatgcgcatccaaatagggacccaggcaatagaacgtgcaccgagctatattgaaatctttggacgcactatgcagctaaatctgtcccggtctcgatggttcgacttcccttttactcgggaggaagcattacaagctgataaaaagctgaacctgttcattggagctagtgtggatcccgcaggtgttactatgatcgatgccgtcaaaatatacggaaagactaaagagcagtttggttggccggatgagccccctgaggagttcccatccgctagtgtgagcaatatctgccctagcaacttaaaccagagcaacggcaccggcgactccgattccgccgctcccacgactaccagcggaacagtgctggagtccagtgagacagagtccctcacgaagctcgatcgccttgtggtaagttctctggaggccttagagtcctgttttgcagttggtccaataatcgaaaaggagcgcaacaagaacgctgcacaggagttggccaccttgctgctatccctcccggcacctgcatcagtgcagcaacagtcaaaatctcttctcgcttcgcttcatacgtctcggtcagcttaccacagccacaaggaccaagcccttctcagtaaggcggtccagtgcctgaatacgagtagcaaggaggggaaggatttagaccctgaggtgttccagagactagtgatcacagcccgaagtatagcgataatgcgacccaataacctggttcactttaccgagtccaaacttccacaaatggagacggagggcatggacgaaggcaaagagccacagaaacaactggagggtgattgttgctcattcattacccaactcgtgaaccatttctggaagctccacgcaagcaagccgaagaacgctttccttgctcctgcctgtcttcctgggcttacacacatcgaggctaccgtgaacgccctcgtggacattatccacggctactgcacttgcgagttggattgcattaatactgcctccaagatttatatgcagatgttgctgtgtcctgacccagctgtgtcctttagttgcaagcaggcattgatcagagtgctccggcctcgaaacaaacgtcgacacgtgactctgcctagttctccaaggtccaatacgccaatgggagataaagacgatgatgacgacgatgatgcagatgagaagatgcagagttctggaatccccaatgggggtcatattcgacaggagagccaggagcaaagcgaagtcgatcatggagatttcgagatggtctctgagagcatggtcttggaaaccgccgaaaatgtgaataacggtaatccatccccattagaggctctgctggctggagccgaaggcttccctccaatgctggatatcccccctgacgcagacgatgagaccatggtcgagctcgcgattgccctgagcctgcagcaggaccagcaagctcctgctagtgacgatgagggatctactgcagctactgacgggtccacgttacgtacatccccagccgatcacggcggatccgtggggtcagaatccggagggtcggccgttgattcagtggctggcgagcactccgtgtcaggcaggtctagtgcatatggagatgcgacagccgagggccaccccgcaggacctgggagcgtgtcctcgtccaccggagcaatcagcacaacaaccggccatcaggaaggagacggttccgaaggagagggagagggggagaccgaaggggatgtgcacacaagcaatcgtctgcacatggttcgcctgatgctgcttgagagattgcttcagacccttccacaattgcggaacgtgggaggggtacgcgcaatcccctacatgcaggtgatcttaatgctgacaaccgatctggacggcgaggatgaaaaggacaagggagcactagataatctcctctcccaactgattgcggagctgggcatggacaagaaggacgtcagtaaaaagaacgaaaggtcagcactaaacgaagtgcacctagtggttatgcgactgctgtcagtgttcatgtcacggaccaaaagtggttctaagagctctatttgtgagtcatccagtctgatttcttctgccaccgcggcagctttgctctcgtccggggcagtggactactgtctgcatgtcctcaagtcactgcttgaatactggaaatcccaacagaacgacgaggagccggtcgcaactagtcaattgctcaagccccatactaccagctcaccccctgatatgtcccccttctttttgcggcagtatgtcaagggacatgctgctgacgtgttcgaagcctacacacagctgctgaccgaaatggtgttgcgcctcccttaccaaattaaaaaaataaccgatacaaacagcaggatcccaccaccagtgttcgatcattcgtggttctactttctctctgagtacctgatgatacagcaaaccccatttgtgagacgccaggtacgcaagctattactgtttatttgtgggagcaaggagaaatatagacaactgcgggatctgcacaccctagactcccacgtgagaggcattaaaaagttgctggaggagcagggtattttcctgcgggcttctgtagttactgcatccagtggatctgcgcttcagtacgacactctcatctccctaatggaacatttaaaggcttgcgcagaaatcgccgctcagagaaccatcaattggcagaagttttgcataaaggacgatagtgtgctttacttcctgcttcaagtctcatttctggtggatgaaggtgtgagccctgtgctgttgcaactcttgtcatgcgcactttgcgggagcaaagtgctcgctgccctagccgcaagctctggaagtagctccgcaagtagtagtagcgcgccagtggcggcttcgtccggacaggctaccactcagtcaaaaagcagcaccaaaaaatctaaaaaagaggagaaggagaaggaaaaagacggggagacctcaggctcccaggaggaccagctttgcactgccctcgtcaaccagctcaataagtttgcagataaagagactctgatacaatttctgaggtgctttttacttgagtccaactcatcgtccgtacgttggcaggcacactgcctgacactgcacatataccgcaattcatccaaaagccagcaggaattgctgctggatctcatgtggtccatttggcccgaattgcccgcttatggcagaaaggcagcacagttcgttgacctactgggctacttcagcttaaaaacgccacagactgaaaaaaaactgaaagagtattctcagaaggccgtggagatccttaggacacagaatcacatccttactaatcatccaaactcaaatatttacaacacattgtcagggctcgtagaattcgatggctactaccttgagagtgacccatgcctagtctgcaataatcccgaagtccccttttgctatataaagttatcttctataaaagtggacacgaggtatacgacgacccaacaggtcgtcaagcttatcggatcacatactatttctaaggttaccgtgaagataggagacctcaagcgtactaaaatggtcagaaccatcaatctgtattacaataaccggaccgtgcaggccatcgtggagttaaagaacaaacctgccagatggcacaaggctaaaaaggttcagctaacaccgggacaaacagaagttaagatcgacctgccactcccgattgtcgctagtaacctgatgatagagtttgctgatttctatgaaaattaccaggcctccacagaaaccctacagtgcccacgctgctccgccagcgttcccgctaaccccggagtctgcggcaattgcggggagaacgtgtaccagtgtcataagtgtaggtccattaactacgacgaaaaggaccctttcctatgtaatgcctgcggcttttgcaaatacgcacgcttcgatttcatgctctatgccaagccctgctgcgctgtggaccctatcgagaacgaggaggatcgcaaaaaggcggtctcaaatatcaataccctgctggacaaagctgatcgagtgtatcatcagctcatgggacatagaccccaactcgagaacttactttgcaaggtgaacgaggcggcacccgaaaagccgcaagatgactctgggactgccggaggcatttcctctacatccgctagtgtaaacagatatatccttcagctggcacaggagtactgtggggattgcaagaatagttttgatgagttgtccaagattatccaaaaagtgtttgccagccgaaaagagctgctggagtatgaccttcagcagcgagaagcggctactaagtcctcccggacctcagtgcagccaacgtttaccgcctcccagtatcgtgccctctcggtgttggggtgcggccatacgtcctccactaagtgttacggctgtgccagcgcggtgactgagcactgtataaccctgttgcgggctttggctaccaatcccgcactcagacatatcctcgtgagccaaggcttaattagagagctgtttgactacaaccttcgcagaggcgcagctgctatgcgagaagaagtacggcaactcatgtgtcttctgacacgtgacaaccccgaggctacccaacaaatgaacgacctcattatcggcaaggtctccactgcactgaagggccactgggctaatccagatctagccagctccctccagtatgaaatgctgttactgaccgacagcattagtaaggaagactcgtgttgggaattaaggctccggtgtgcccttagcttgttcctgatggccgtgaatatcaagacacccgtggttgtggaaaacattacactcatgtgtctccggattctccaaaagctgatcaagcccccagctcctacctctaagaaaaataaggatgttcctgtggaggcccttaccacggtgaagccttactgtaatgagattcacgcacaggcccagctatggcttaagcgggatcccaaagccagttatgatgcctggaagaagtgcctgccaataaggggaattgacggaaatggcaaggctccatcaaagtcggagttaaggcacctttacctcacagaaaaatacgtctggagatggaaacagttcctctcccggcgaggcaaacggacaagtcccttagatctaaagctgggccacaataattggcttaggcaggtgctctttacgccagcgacacaagccgcaaggcaggccgcttgcaccatcgtggaggctcttgccaccatcccgtccaggaagcaacaggtgttagatctcttgacttcgtacctagacgaactttcaatcgcaggcgaatgtgcagctgagtaccttgccctgtaccagaagctgataactagcgctcattggaaggtgtacttagctgcaaggggcgttctgccatacgttggaaatctaattaccaaggagatcgctaggctgctagccctggaggaggccaccctgagcaccgacctgcagcagggctatgccttaaaaagtctcaccggccttctctcctcgttcgtggaagttgaaagtataaaacgccacttcaagagtcgcctcgtgggcacggtgctgaacgggtacctttgcctgagaaagctggttgtccagagaactaagctgatcgacgaaacccaggacatgttgttggaaatgcttgaggacatgaccaccggcaccgagagtgagaccaaggcctttatggccgtgtgcatagagactgccaagagatacaatcttgatgattaccgcacgccagtctttatttttgagcggctctgttccattatatatcctgaagaaaacgaggttacagagttttttgtgaccctggagaaggatcctcagcaggaggattttttgcagggtagaatgcccggaaatccatactcctctaatgaaccaggcatcgggcctctcatgcgcgacattaagaacaagatttgccaagactgcgaccttgtcgccctgctggaggacgactcaggaatggagctccttgtcaataataagatcatctctctcgatctcccggtggccgaggtctacaagaaggtatggtgcacgactaatgaaggagagcctatgcgcatagtctaccggatgcggggtctgctaggcgacgctactgaggagttcattgaaagccttgactccacaactgacgaagaggaggacgaggaggaagtatataagatggcgggagtcatggctcagtgtgggggactagagtgcatgctaaaccggctagcaggaataagagacttcaagcagggacgacacttgctcacagtcctgctgaaactcttctcttattgcgtgaaggttaaggtgaaccgccagcagttggtgaagctcgagatgaacacgttaaacgtaatgctcggaacccttaacttagctctcgtggcagagcaggagtcaaaggatagtggcggtgccgcagtcgctgagcaggtactgagtattatggagattattcttgacgagtcaaatgcggaaccactgtccgaggacaaaggaaacctacttcttacgggcgacaaagatcagctggttatgctgctcgaccagatcaatagcacctttgtccgctccaatcccagcgtactacaggggctgctgcggatcattccctaccttagcttcggagaagtggaaaagatgcaaatcttagtcgagaggttcaaaccttattgtaacttcgataaatacgacgaagatcactcaggtgacgacaaagtgtttctggactgcttttgcaaaatagccgctggcattaagaataattctaacggtcaccaactcaaagacctgatcctgcagaagggtattacccagaatgcactggactatatgaaaaagcatattccctctgccaaaaacctggatgctgatatctggaaaaagttcctcagccggcctgcgttaccctttatcctgcgtctcctgagagggctggccatccagcaccctggcacccaggtcttaattgggacggacagcatccccaacctccataagttggagcaggtgagcagcgatgagggcatcggtacactggctgaaaacctgttggaggccctgagggagcaccctgacgtcaataaaaaaatcgatgctgcccgacgcgagactagagccgagaagaaaaggatggcaatggcaatgcgacaaaaagccctggggacactgggaatgactacaaatgaaaaaggccaggttgtcacaaagactgctctcttgaagcagatggaggaattgatcgaggagccaggtctgacgtgctgtatctgccgggagggctacaaattccagccaaccaaagtgctgggaatttatactttcaccaagagggtggcactcgaggagatggagaacaagcctaggaagcaacaggggtacagcaccgtgtcgcacttcaatatagtgcactatgattgccacttagctgcagtgcggctcgcacgagggagagaagaatgggaaagtgccgcacttcagaatgccaatacgaagtgcaatgggctccttccggtttggggacctcacgtcccggagtccgcattcgcaacctgcttggcccgacataatacttacttgcaggaatgcacaggacagcgggaacccacataccagttgaatattcacgacattaagctcctattcctgcgtttcgctatggaacagagtttctccgcggacaccggaggcggaggacgtgagagcaatattcacctaatcccctatatcatacacaccgttctctacgtgctaaacactacacgggcaacttccagagaagagaagaatctgcagggattcctcgagcaacccaaagagaaatgggtggagtctgcattcgaggtcgatgggccatactattttacagtgcttgcactgcacatactcccacccgagcaatggcgcgctacgcgcgtcgaaattctgcgaaggcttctcgtgacatcacaggccagggccgtggcaccaggcggagctactcggctaaccgataaggctgtgaaagactacagtgcataccgatcctctcttttgttctgggctcttgtagatctgatttataacatgttcaagaaggtgccaacgtcaaacaccgagggcggttggagctgtagccttgccgagtatataagacacaatgatatgcccatctatgaagcggcagacaaggcccttaaaaccttccaggaagagtttatgccagtcgaaacgttctccgagtttctggacgtagctgggctactcagtgaaattacggatcccgagagcttcctcaaggatctcctgaattctgtgccctaa

SEQ ID NO: 337569 - DNA, 6176 bp, Artificial Sequence
  derived and/or modified sequence
ttggtgagactgactggcgaccttattgtctggtccgacgagatgaacccccctcaggtcatccgcaccctcctgccactcctgctggagagcagtacagagtccgtggcggagataagcagcaactctctggaaaggattttgggaccagcagagtctgacgaattcctggcccgtgtttacgaaaagttgatcaccggttgctataatatcttagcaaatcacgctgatccaaactccggtttagacgagagtatcctcgaggaatgtctgcagtacctggagaaacagctggagagctctcaggctcgaaaggccatggaggaattttttagcgacagcggcgaactcgtgcagatcatgatggccacagccaatgagaacctgtctgccaaattctgtaatagagtgctcaagttctttaccaaattatttcagcttacagagaagtccccaaacccatcactgttgcatctgtgcggttcgcttgctcaactggcatgcgtcgagcctgtcaggctgcaggcatggctgaccagaatgacaacctctcctcctaaggactcagatcaattagacgtgatccaggagaatcgacagctgttgcaacttctaacgacttatattgtgcgcgagaattcccaggtcggtgaaggggtgtgtgctgtcctgttgggtactctgacaccaatggctaccgaaatgcttgctaacggcgatggcactggtttcccagagttaatggttgttatggctacgctggcttccgctggacagggtgctgggcacctccagctacacaacgctgcagttgactggttgtctcgatgcaagaagtacctaagtcagaaaaatgttgttgaaaagctgaacgccaatgtgatgcatgggaaacatgtgatgattcttgagtgcacgtgccacatcatgtcatatttggccgacgtgacgaatgcattaagtcagtccaacggccaagggccatcccatttgagtgtcgatggcgaggaaagggctattgaggtggacagcgattgggtcgaggagcttgctgtagaagaggaggactcccaggctgaagactctgacgaggactctttatgcaacaagttatgcacgttcaccatcactcagaaggagttcatgaatcaacactggtaccattgccacacttgtaagatggtggacggggttggagtctgtaccgtgtgtgccaaagtctgtcacaaggatcatgagattagttatgcaaagtacgggtcctttttttgtgactgcggagcaaaggaagacggcagctgccttgcactggttaaaagaaccccctcttccggaatgtcatctaccatgaaggagtcagcttttcaatccgagccccgtattagtgagtcgctggtaagacacgcgagcacctccagtccggctgataaagctaaagttactatctccgatgggaaggtggccgacgaggaaaagcccaaaaagtctagcctgtgcaggactgttgaagggtgtagagaagagctgcagaatcaggcaaatttctctttcgcgcctctggtgctggatatgctgaactttctaatggacgcaattcagaccaactttcagcaggcaagtgcagtgggctcaagttcccgcgctcagcaggctctgtccgaactgcacactgtggagaaggcggtcgagatgacagaccagctcatggtgccaacattggggtcccaggaaggcgcatttgagaatgtccgaatgaactactcaggagaccagggtcaaactattcgacagctgatttccgctcatgtgttgagacgtgtggccatgtgcgtgttgtcctccccacatggccgtcgccagcatcttgctgtctcccacgaaaagggcaaaattacagtgctccagctatctgccctgcttaagcaggccgatagttccaagcgtaagcttacactgacccgtcttgcctccgcacctgtgccatttaccgtgctgtccctgacaggaaacccctgcaaggaagattatcttgccgtgtgtggcctgaaggactgtcatgtgctgacattctcatcttctggctcagtgagtgaccacctcgtgttacatccgcagctggcaaccggaaatttcataatcaaagcagtgtggctgcccggatcccagacagaactggcaatcgttactgctgactttgtgaaaatatacgacctgtgtgtcgatgccctgtcaccgactttctactttctcctcccatcctctaagatcagggacgtcacctttctgtttaatgaagaaggaaaaaatatcattgtgattatgtcctctgcagggtacatctatacccagttgatggaggaggcatcctcggcacaacagggcccattttacgttacaaacgtgctcgagattaaccacgaggacttgaaagacagtaatagccaggtcgctggcggaggcgtcagtgtgtactatagtcatgtccttcaaatgctctttttttcttactgccaaggtaaatcctttgctgctacaatatcccgaacaactctggaggtgctgcagctcttccccataaacataaagtcatccaatggcggatcaaaaacctctcccgctctgtgtcaatggagtgaagtgatgaaccacccaggccttgtctgctgcgtgcagcaaactacaggagtgcccctcgtcgtcatggtaaaacccgatacatttcttattcaggagataaagaccctgcccgctaaagccaagatacaggacatggttgccatcaggcacaccgcttgcaatgagcagcagcggacgaccatgattctcctctgtgaagatgggagtctgcggatctacatggccaatgtggagaacacatcatattggctacagccgagtcttcaaccttcctctgttataagtatcatgaaacccgtccgtaaacgaaagacagcaacaattaccactcgaacaagctcccaggtgacattccccattgatttttttgagcacaatcagcagcttactgatgtcgaatttggtggcaacgatctcctgcaggtgtacaatgcgcagcagatcaagcacaggctaaattcaaccggaatgtacgttgccaacactaagcccggtggcttcacaattgagataagcaacaacaatagtacaatggtgatgacgggcatgcgaatccaaattgggacgcaggctattgagcgagcaccatcctatatagaaatcttcggtcgaaccatgcagctcaacctctctcggtcccgctggttcgatttccctttcacaagggaagaagccctccaggcagataaaaagttgaacctgttcatcggcgcttctgtagaccctgccggagtgactatgatcgatgccgttaaaatttacggaaaaactaaagagcaattcggctggcctgatgagcctcctgaggaatttccatcggccagtgtaagcaacatctgcccatccaacctgaatcagtctaacggtaccggcgattctgactccgcagccccaaccacaacaagtggaactgtgttagagtcttcagagacagagagcctgacaaaacttgatcgcttggtcgtctcatccctggaggccctcgaatcttgctttgctgtggggcctatcatcgagaaggagaggaataaaaatgcggctcaggaattagctaccctcctgctctcccttccagcgcctgcttcagtgcagcaacagtcaaaaagtctcctggcatccctacacacttcgcggtccgcctatcactcccacaaagatcaggccctactgtctaaggcagtgcagtgcttgaatacatcatctaaagaagggaaagatctggaccccgaggtgtttcagcgactagtgatcactgccaggagtattgcaattatgcgtccaaacaacctggtgcacttcaccgagtccaaactgcctcagatggaaactgaaggcatggacgagggcaaggaacctcagaagcagttggaaggcgactgctgttcttttatcactcagttggtgaaccacttttggaagctgcatgcctccaagccgaaaaacgcctttctagcccctgcctgcctgcccggactgacccacattgaagccaccgtgaacgcattggtggatatcattcatggatattgcacctgcgaactggattgtatcaacactgcctctaagatatacatgcagatgctcctttgccccgaccccgctgtgtcctttagttgcaagcaagcactcatacgcgttctacgacccagaaataaaagacgccatgtcaccttgccaagcagtccaaggagcaatactcccatgggcgacaaagatgatgatgacgacgacgacgctgatgagaagatgcagtcttctggaattcccaatggtggccacatccggcaggaatcccaagagcagtccgaggttgatcacggagatttcgagatggtgagcgaaagcatggtgctggaaactgcagagaacgtgaacaatggaaatccaagtccgttggaggcactgctggccggtgcagaaggcttcccccctatgttggatattccaccggatgccgacgatgaaactatggtcgaactggccatcgccctctcacttcaacaagatcagcaggccccagccagcgatgacgagggctctactgcggcaacagatggcagcactctgcggacatcccccgctgatcatggcggatctgtgggcagtgagtctggcggatcagcggttgattccgtagcgggagaacattccgtaagtggacggtcatcagcatacggcgacgccaccgcagaggggcaccctgctggccctggtagtgtttctagctcgactggcgctatcagcactacaaccggtcaccaggagggagacggctctgaaggagagggcgaaggcgagaccgaaggcgatgtgcatacctctaaccggctccatatggtacgcctcatgctactggaacggctgctacaaactctgccccagctccggaacgtggggggagtcagagctatcccctacatgcaggtcattctcatgttaaccacggacctggacggggaggacgagaaagataaaggcgctctcgacaacctgctctcccaactcatagccgagttgggtatggacaagaaagatgtcagcaagaaaaatgagaggtcagctctgaatgaggtgcatcttgttgtgatgcggctcttatcagttttcatgtcacgtaccaagagtggtagtaagtcttcgatatgcgagtctagcagcctgatttcctcggccaccgctgcagccctgctgtcctccggggcagtggactattgcctgcatgttctcaagtcactgctggaatattggaaatctcaacagaacgacgaggagcccgtggctactagccaattgctgaaaccccacacaaccagtagccctcccgacatgagcccattcttcctgcgccagtatgtgaaaggacacgctgccgatgtctttgaagcgtacacccaactgctaacagagatggtgttacggctgccctatcaaatcaagaaaatcacagatacaaattcacggattccgcctcccgtcttcgatcactcgtggttctatttcctgagtgagtacctgatgatccagcaaacacccttcgtcagaagacaggtgaggaagttactgctgttcatttgtggaagcaaggagaagtatcggcaactccgggatctgcacaccctcgactcacacgtccgtgggataaagaaattgttggaagaacaaggaatctttttacgcgcatcagttgtgactgccagctctggcagtgcccttcagtatgacaccctgattagtctgatggaacatttaaaggcttgtgcagaaatagccgcacagcgtaccataaattggcaaaagttctgcattaaagacgattccgtactgtatttccttttgcaagtgtctttcttggtcgacgaaggtgtgtccccggtattgcttcagctcctgtcttgtgccctctgtgggtctaaggttctcgccgctttggcagctagctcgggatcatcatctgccagttcttcttccgcgcctgttgccgcttcttccggacaggccactactcagtctaagagttccaccaagaagagtaaaaagta

SEQ ID NO: 337570 - DNA, 15810 bp, Artificial Sequence
  derived and/or modified sequence
gaagatggcgacgagcggcggcgaagaggcggcggcagcggctccggcgccggggaccccggcaacgggggcggacacgaccccgggctgggaggtggctgtgcggcccctgctgtccgcgtcctactccgccttcgagatgaaggagttgccgcagctggtggcctcagtcatcgagagtgaatcagaaatcctgcaccatgagaagcagtacgagccattctactcatcttttgttgcactttccacacactatattacaacagtttgcagtctcattccccggaaccaacttcagtcagtggcagcagcctgtaaagttctaattgagttttctctcctgcgtctggagaatccagatgaggcttgtgctgtgtcccagaaacacttgattctcctaatcaagggcctgtgcactggctgtagccgactagatagaactgaaattatcacatttacagcaatgatgaaatccgccaagctgccccaaacagtgaagacactttcagacgtggaagatcagaaagagctggcctcaccagtaagccctgagttgaggcaaaaggaggtacagatgaattttttgaaccagctgacctcagtttttaaccctagaactgtagcatcacaacctatcagtacacagactctggtggaaggagaaaatgatgagcagtcatctacagatcaagcctcagctatcaaaaccaagaatgtgttcatagctcagaacgtggctagtcttcaagagcttggtggctcggagaagctactgcgtgtatgtttgaacctgccatatttcctacgctatatcaatcggttccaagatgcagttttagctaattccttcttcataatgcctgcaacagtagcagatgccactgctgttcgtaatggctttcattcattggtgattgatgtaactatggcattggataccctttctctacctgtgttggaacctctcaatccttctcgtctacaagatgtgacagtcctcagcctaagttgtctgtatgcaggtgtgagtgtggcaacgtgcatggccatcctccatgtgggtagtgcccagcaagtgcggacagggtccacgagctccaaagaagatgactatgaaagtgacgcagctacaattgtccagaaatgtctcgaaatctatgacatgattggacaagcaatcagcagttctcgccgggctggtggtgagcactatcagaatttccaattgctgggtgcttggtgcttgttaaacagccttttcctcatactgaacctcagtcctactgcgttggctgataaggggaaagagaaggacccactggctgccctccgagtcagagacatcctttctcgtactaaagagggagtgggctcccctaaactggggcctggaaaagggcatcagggatttggggtactctcagtaatattggcaaaccatgccatcaaactgctaacgtctctctttcaagacctacaagtggaggcccttcacaagggttgggagacagatggcccccctgcagccttgagcattatggcccagagcacctccatacagaggattcaacggctgattgactctgtcccactgatgaacctgctcttgacgttactttcaacttcctacagaaaggcatgtgtcctgcagcggcagaggaagggctccatgagcagcgatgccagcgcctccaccgactccaatacttactatgaggacgatttcagtagcacggaggaggacagcagccaagacgatgacagtgagcctattttggggcaatggtttgaggagactatttctcccagtaaagagaaagcagcacctccgcctcctcccccacctcctccactggaaagctctcctcgggttaaaagccccagtaagcaggcccctggtgagaagggcaacattctggcgagtcgcaaagatcctgagttgttcttaggtctggcttccaacattttgaacttcatcacctcttccatgctgaactctcggaacaattttatccgaaactatctgagtgtatctctttcagaacaccatatggccaccctagccagtatcatcaaggaggtggacaaagatggactcaagggttcatcagatgaagagtttgctgcagctctctatcacttcaaccactcactggtaacctctgaccttcagtcacctaacctgcagaacacactgttgcagcagctaggagtggctcctttttctgagggcccttggcccttgtacattcaccctcaaagcctctctgtgctttcacgcctcctgctcatctggcaacataaagccagtgctcaaggtgaccctgacgtcccagaatgccttaaagtttgggacaggtttttgtctacaatgaagcagaatgccctgcaaggtgtggtgcccagtgagacagaggatctgaatgtagaacacctgcagatgctcctcctcattttccacaatttcaccgagacaggccggcgggccatattgtcgctttttgtccagatcatccaggagttgagcgtcaacatggatgctcagatgcgcttcgtgccgcttatcttggctcgcctccttctcatctttgattatctgcttcatcagtactccaaagcccctgtgtatctatttgagcaggtacagcataacctgctaagtcctccctttgggtgggcaagtggatcccaggacagcaacagccgccgggcaaccactcctctctatcatggattcaaagaagtagaagaaaactggtctaagcatttctcatcagatgctgtcccacaccccagattctactgtgtcctgtccccagaagcctcagaggatgatttgaaccgacttgattctgtggcatgtgacgtccttttctccaagcttgtcaagtatgatgagctttatgctgcactgacagccctgcttgcagctgggtcccagcttgatacagttaggagaaaggaaaacaagaatgtaacagccttggaggcctgtgcccttcaatattacttcttgatactgtggaggatcctaggaattttaccaccatcaaagacttacattaaccagctatccatgaactcacctgagatgagcgaatgtgacatcttgcacactctgcgatggtcttctcggctccggatcagctcctatgtcaactggataaaggatcaccttatcaaacagggaatgaaggctgagcatgctagctcgcttctagaactggcatccaccactaagtgtagctcagtgaaatatgatgttgaaatagtagaggaatacttcgctcgacagatctcatccttctgtagtatcgactgtaccaccatcttgcagctgcatgaaattcccagtctgcagtccatctacacccttgatgccgcgatctcaaaggtccaggtctctttggatgagcatttttctaagatggctgctgagactgatcctcataagtcgtctgagattaccaagaacctacttccagccacgctgcaactcattgacacctatgcatcgttcaccagagcctatttgctgcaaaactttaatgaagagggaacaactgagaaaccttccaaggagaaactgcaaggctttgctgctgttttggctattggctctagcaggtgcaaggcaaatactctgggtccgacactggttcagaatttgccatcgtcagtgcagactgtgtgtgagtcctggaacaacatcaataccaatgaatttcccaatattggatcctggcgcaatgcctttgccaatgacaccatcccttcagagagttatattagtgcagtgcaggctgcacacctggggactctctgtagccaaagtctgcccctggctgcttccctgaagcataccctcctctcactggtcaggttgactggagatcttattgtttggtcagatgagatgaacccaccacaggtaattcggacactgctacctcttcttttggaatcaagcactgagagtgttgccgagatcagtagcaactccctggaacgcatcttgggccctgctgagtctgatgagttcttggctcgtgtttatgagaagctgatcactggttgttacaacattctggccaatcatgcagatcctaacagtggactggatgaatccatcctggaggaatgtctccagtacttggaaaagcagctggaaagtagccaggctcgtaaagctatggaggagtttttctctgacagtggagaacttgtacagatcatgatggcaacagccaatgagaacctctctgctaaattctgtaaccgagttttgaaattcttcaccaaactcttccagctgactgagaagagccctaacccgagcctgttgcatctctgtggctccctggcacaactggcctgtgtggaacctgtgcgcctgcaggcctggctcacccgcatgactacatcgcccccaaaagattctgatcagctggatgtaattcaggagaaccggcagctgctgcagttactgaccacatacattgttcgggaaaacagccaagttggggaaggtgtgtgtgctgttcttctgggcaccctgactcccatggcaacagagatgctggccaacggtgatgggactggcttccctgaacttatggttgtgatggccactctggccagtgcaggtcaaggtgctggtcaccttcagcttcataatgctgctgtggattggctgagcagatgcaagaaatacctgtcacagaagaatgtagttgaaaaactgaatgccaatgtaatgcatggaaagcatgtgatgatcttggagtgcacatgccatatcatgtcttacttggctgatgtcacgaatgccctgagccagagtaatggtcaaggcccaagtcatctctcagtggatggggaagagcgggccattgaagtagactcagactgggtggaggagttggcggtggaagaggaagattcccaggctgaggattcagatgaagattctctttgcaataaactctgcacttttacgatcacacagaaagaattcatgaaccagcattggtaccactgtcacacctgtaaaatggtggatggcgtgggtgtctgcacagtgtgtgctaaggtgtgccacaaggatcatgagatttcctatgccaagtatggatccttcttctgtgactgtggagccaaggaagatggcagctgtttggctctggtgaagagaactcctagcagtggcatgagctctaccatgaaggagtcggcatttcagagtgaacccaggatttcagagagtctagtgcgtcatgccagcacctcctcgccagctgacaaagccaaggttaccatcagtgatggaaaggttgctgacgaagagaagcccaagaagagcagcctctgccgcacagtagagggctgccgggaggaattacagaaccaggccaatttctccttcgctcctctcgtgttagacatgcttaatttccttatggatgccattcagaccaacttccagcaagcttcagccgtcgggagcagcagccgtgctcagcaagccctcagtgagctacacactgtggagaaggcagtggagatgacagaccagctgatggttcccaccttagggtcccaggaaggtgcctttgagaatgtgcggatgaattacagtggagaccagggccagaccatccggcagctgatcagtgctcatgtgctcaggcgggtggctatgtgtgtgctctcctctccccatgggcgccgccaacatttggctgtcagccatgagaagggcaagatcaccgttctgcagctctctgcactcctgaagcaagcagattccagcaaaaggaagttaactctgacccgcttggcttctgccccagttccttttactgtgttgagcctcacaggaaatccctgcaaggaagactacttggcggtttgtgggctaaaggactgtcatgtgctcacctttagtagctcaggctctgtttcggatcacttggttttgcaccctcagttggcaacggggaacttcatcatcaaagccgtgtggttacctggttcacagaccgagttagcaattgtcaccgcagactttgttaagatttatgacctgtgtgttgatgccttgagtccaaccttctattttctcctgccaagctcaaagataagagatgttaccttccttttcaatgaggagggaaagaacatcattgttataatgtcttcggctgggtacatctatactcagcttatggaagaggccagcagtgcccagcagggacccttctatgtcactaatgtgttggaaatcaatcatgaggacctgaaggacagtaacagccaggtggcgggcggtggtgtgtccgtgtactactcccacgtgttgcagatgttgttcttcagctattgtcaaggcaaatcattcgcagccaccatcagcaggacaaccctggaggtgttgcaactcttccccatcaacatcaaaagttccaatggtggcagtaagacttctcctgctctttgccagtggtctgaggtgatgaaccaccctggcttggtgtgctgtgtccagcaaactacaggggtgccgctggtagttatggtgaaaccagacacttttcttatccaggagattaagactcttcctgctaaagcgaagatccaagacatggttgctattaggcacacggcctgcaatgagcagcagcggacaacaatgattctgctgtgtgaggatggcagcctgcgcatttacatggccaacgtggagaacacctcctactggctgcagccatccctgcagcccagcagtgtcatcagcatcatgaagcctgttcgaaagcgcaaaacagctacaatcacaacccgcacgtctagccaggtgactttccccattgacttttttgaacacaaccagcagctgacagatgtggagtttggtggtaacgacctcctacaggtctataatgcacaacagataaaacaccggctgaattccactggcatgtatgtggccaacaccaagcccggaggcttcaccattgagattagtaacaacaatagcactatggtgatgacaggcatgcggatccagattgggactcaagcaatagaacgggccccgtcatatatcgagatcttcggcagaactatgcagctcaacctgagtcgctcacgctggtttgacttccccttcaccagagaagaagccctgcaggctgataagaagctgaacctcttcattggggcctcggtggatccagcaggtgtcaccatgatagatgctgtaaaaatttatggcaagactaaggagcagtttggctggcctgatgagcccccagaagaattcccttctgcctctgtcagcaacatctgcccttcaaatctgaaccagagcaacggcactggagatagcgactcagctgcccccactacgaccagtggaactgtcctggagagttctgaaactgagtccctaaccaagctggaccggctggttgtgagttctttagaagccctggaaagctgctttgccgttggcccaatcatcgagaaggagagaaacaagaatgctgctcaggagctggccactttgctgttgtccctgccagcacctgccagtgtccagcagcagtccaagagccttctggccagcctgcacaccagccgctcggcctaccacagccacaaggatcaggccttgctgagcaaagctgtgcagtgtctcaacacatctagcaaagagggcaaggatttggaccctgaggtgttccagaggctagtgatcacagctcgctccattgccatcatgcgccccaacaaccttgtccactttacggagtcaaagctgccccagatggaaacagaaggaatggatgaagggaaggaaccgcagaagcagttggaaggagattgctgtagtttcatcacccagcttgtgaaccacttctggaaactccatgcatccaaacccaagaatgccttcttggcacctgcctgccttccaggactaactcatattgaagctactgtcaatgctctggtggacatcatccatggctactgtacctgtgagctggattgtattaacacagcatccaagatctacatgcagatgctcttgtgtcctgatcctgctgtgagcttctcttgtaaacaagctctaattcgagtcctaaggcccaggaacaaacggagacatgtgactttaccctcttcccctcgaagcaacactccaatgggagacaaggatgatgatgacgatgatgatgcagatgagaaaatgcagtcatcagggatcccgaatggtggtcacatccgtcaggaaagccaggaacagagtgaggtggaccatggagattttgagatggtgtctgagtcgatggtcctggagacagctgaaaatgtcaacaatggcaacccctctcccctggaggccctgctggcaggcgcagagggcttcccccccatgctggacatcccacctgatgcagatgacgagaccatggttgaactagccattgccctgagcctgcagcaggaccaacaagctccagcctcagacgacgagggcagtacagcagcgacagatggttctacccttcggacctctcctgctgaccacggtggtagtgtgggctcggagagcgggggcagtgcagtggactcagtggctggcgagcacagtgtatctggccggagcagtgcttatggcgatgctacagctgaggggcatccggctggaccaggaagtgtcagctcaagcactggagccatcagcaccaccactgggcaccaggagggagatggctccgagggagaaggagaaggagaaactgaaggagatgtccacactagcaacaggctgcacatggtccgtctaatgctgttggagagattactgcagaccctgcctcaattacgaaacgttggcggtgtccgggccatcccatacatgcaggtcattctaatgctcactacagatctggatggagaagatgagaaagacaagggggccctagacaacctgctctcccagcttattgctgagttgggtatggataaaaaggatgtctccaagaagaatgagcgcagcgccctgaatgaagtccatctggtagtaatgagactcctgagtgtcttcatgtcccgcaccaaatctggatccaagtcttccatatgtgagtcatcttccctcatctccagtgccacagcagcagctctactgagctctggggctgtggactactgcctgcacgtgctcaaatcactgctggaatattggaagagccaacagaatgacgaggagcctgtggctaccagccagttgctgaaaccacatactacctcctccccacctgacatgagcccattctttctccgccagtatgtgaagggtcatgctgctgatgtgtttgaggcctatactcagcttctaacagaaatggtactgaggcttccttaccaaatcaaaaagattactgacaccaattctcgaatcccacctcctgtctttgaccactcgtggttttactttctctccgagtacctcatgatccagcagactccatttgtgcgccgtcaagtccgcaaacttctgctcttcatctgtggatccaaagagaagtaccgccagctccgggatttgcacaccctggactctcacgtgcgtgggatcaagaagctgctagaagagcaggggatattcctccgggcaagtgtggttacagccagctcaggctccgccttgcaatatgacacactcatcagcctgatggagcacctgaaagcctgtgcagagattgccgcccagcgaaccatcaactggcagaaattctgcatcaaagatgactccgtcctgtacttcctcctccaagtcagtttccttgtggatgagggcgtgtccccagtgctgctgcaactgctctcctgtgctctgtgcggcagcaaggtgctcgctgcactggcagcctcttcgggatcctccagtgcttcttcctcctcagcccctgtggctgccagttctggacaagccacaacacagtccaagtcttccactaaaaagagcaagaaagaagaaaaagaaaaggagaaagatggtgagacctctggcagccaggaggaccagctgtgcacagctctggtgaaccagctgaacaaatttgccgataaggaaaccctgatccagttcctgcgttgtttcctgttagagtccaattcttcctcggtgcgctggcaggcccactgtctgacactgcacatctacagaaattccagcaaatctcaacaggagctcctgctagatctgatgtggtccatctggccagaactcccagcctatggtcgtaaggctgcccagtttgtggacctactaggatatttctccctgaaaactccacaaacagagaagaagttgaaggagtattcacagaaggctgtggagattctgcggactcaaaaccatattcttaccaaccaccccaactcgaacatttataacactttgtctggcttagtggagtttgatggctattacctggagagcgatccctgcctggtgtgtaataacccggaagtaccgttctgttatatcaagctgtcttccattaaagtggacacgcggtacaccaccacccagcaggttgtgaagctcattggcagtcacaccatcagcaaagtgacagtgaaaatcggggatctgaaacggaccaagatggtgcggaccatcaacctgtattataacaaccgaaccgtgcaggccatcgtggagttgaaaaacaagccagctcgctggcacaaagccaagaaggttcagctgacccctggacagacagaggtgaagattgacctgccgttgcccattgtggcctccaatctgatgattgagtttgcagacttctatgaaaactaccaggcctccacagagaccctgcagtgccctcgctgtagtgcctcggtccctgccaacccaggagtctgtggcaactgtggagagaatgtgtaccagtgtcacaaatgcagatccatcaactacgatgaaaaggatcccttcctctgcaatgcctgtggcttctgtaaatatgcccgcttcgacttcatgctctatgccaagccttgctgtgcagtggatcccattgagaatgaagaagaccggaagaaggctgtatccaacatcaatacacttttggacaaagctgatcgagtgtatcatcagctgatgggacaccggccacagctggagaacctgctctgcaaagtgaatgaggcagctccagaaaagccacaggatgactcaggaacagcagggggcatcagctccacttctgccagtgtgaatcgttacatcctgcagttggctcaggagtattgtggagactgcaagaactcttttgatgaactctccaaaatcatccagaaagtctttgcttcgcgcaaagagttgttggaatatgacctacagcagagggaagcagccactaaatcatcccggacctccgtgcagcccacattcactgccagccagtaccgtgccttatccgtcctgggctgtggccacacatcctccaccaagtgctatggctgcgcctcggctgtcacagaacattgtatcacactacttcgggccctggccaccaacccagccttgaggcacatccttgtctcccagggccttatccgggagctctttgattataatcttcgccgaggggctgcggccatgcgggaggaggtccgccagctcatgtgcctcctaactcgagacaacccagaagccacccaacagatgaatgacctgattattggcaaggtctccacagccctgaagggccactgggccaaccccgatctggcaagtagcctgcagtatgaaatgctgctgctgacggattctatctccaaggaggacagctgctgggagctccggttacgctgtgctctcagccttttcctcatggctgtgaacattaagactcctgtggtggttgaaaacattaccctcatgtgcctgaggatcttgcagaagctgataaaaccacctgctcccactagcaagaagaacaaggatgtccccgttgaggccctcaccacggtgaagccatactgcaatgagatccatgcccaggctcaactgtggctcaagagagaccccaaggcatcctatgatgcctggaagaagtgtcttcctatcagagggatagatggcaatgggaaagcccccagcaaatcagagctccgccatctctatttgactgagaagtatgtgtggaggtggaaacagttcctgagtcgtcgggggaagaggacctcccccttggatctcaaactggggcataacaactggctgcgacaagtgcttttcactccagcaacgcaggccgcacggcaggcagcctgtaccattgtggaagctctagccaccattcccagccgcaagcagcaggtcctggacctgcttaccagttacctggatgagctgagcatagctggggagtgtgcagctgagtacctggctctctaccagaagctcatcacttctgcgcactggaaagtctacttggcagctcggggagtcctaccctatgtgggcaacctcatcaccaaggaaatagctcgtctgctggccctggaggaggctaccctgagtaccgatctgcagcagggttatgcccttaaaagtctcacaggccttctctcctcctttgttgaggtggaatccatcaaaagacattttaaaagtcgcttggtgggtactgtgctgaatggatacctgtgcttgcggaagctggtggtgcagaggaccaagctgatcgatgagacgcaggacatgctgctggagatgctggaggacatgaccacaggtacagaatcagaaaccaaggccttcatggctgtgtgcattgagacagccaagcgctacaatctggatgactaccggaccccggtgttcatcttcgagaggctctgcagcatcatttatcctgaggagaatgaagtcactgagttctttgtgaccctggagaaggatccccaacaagaagacttcttacagggcaggatgcctgggaacccgtatagcagcaatgagccaggcatcgggccgctgatgagggatataaagaacaagatttgccaggactgtgacttagtggccctcctggaagatgacagtggcatggagcttctagtgaacaataaaatcattagtttggaccttcctgtggctgaagtttacaagaaagtctggtgtaccacgaatgagggagagcccatgaggattgtttatcgtatgcgggggctgctgggcgatgccacagaggagttcattgagtccctggactctactacagatgaagaagaagatgaagaagaagtgtataaaatggctggtgtgatggcccagtgtgggggcctggaatgcatgcttaacagactcgcagggatcagagatttcaagcagggacgccaccttctaacagtgctactgaaattgttcagttactgcgtgaaggtgaaagtcaaccggcagcaactggtcaaactggaaatgaacaccttgaacgtcatgctggggaccctaaacctggcccttgtagctgaacaagaaagcaaggacagtgggggtgcagctgtggctgagcaggtgcttagcatcatggagatcattctagatgagtccaatgctgagcccctgagtgaggacaagggcaacctcctcctgacaggtgacaaggatcaactggtgatgctcttggaccagatcaacagcacctttgttcgctccaaccccagtgtgctccagggcctgcttcgcatcatcccgtacctttcctttggagaggtggagaaaatgcagatcttggtggagcgattcaaaccatactgcaactttgataaatatgatgaagatcacagtggtgatgataaagtcttcctggactgcttctgtaaaatagctgctggcatcaagaacaacagcaatgggcaccagctgaaggatctgattctccagaaggggatcacccagaatgcacttgactacatgaaaaagcacatccctagcgccaagaatttggatgccgacatctggaaaaagtttttgtctcgcccagccttgccatttatcctaaggctgcttcggggcctggccatccagcaccctggcacccaggttctgattggaactgattccatcccgaacctgcataagctggagcaggtgtccagtgatgagggcattgggaccttggcagagaacctgctggaagccctgcgggaacaccctgacgtaaacaagaagattgacgcagcccgcagggagacccgggcagagaagaagcgcatggccatggcaatgaggcagaaggccctgggcaccctgggcatgacgacaaatgaaaagggccaggtcgtgaccaagacagcactcctgaagcagatggaagagctgatcgaggagcctggcctcacgtgctgcatctgcagggagggatacaagttccagcccacaaaggtcctgggcatttataccttcacgaagcgggtagccttggaggagatggagaataagccccggaaacagcagggctacagcaccgtgtcccacttcaacattgtgcactacgactgccatctggctgccgtcaggttggctcgaggccgggaagagtgggagagtgccgccctgcagaatgccaacaccaagtgcaacgggctccttccggtctggggacctcatgtccctgaatcagcttttgccacttgcttggcaagacacaacacttacctccaggaatgtacaggccagcgggagcccacgtatcagctcaacatccatgacatcaaactgctcttcctgcgcttcgccatggagcagtcgttcagcgcagacactggcgggggcggccgggagagcaacatccacctgatcccgtacatcattcacactgtgctttacgtcctgaacacaacccgagcaacttcccgagaagagaagaacctccaaggctttctggaacagcccaaggagaagtgggtggagagtgcctttgaagtggacgggccctactatttcacagtcttggcccttcacatcctgccccctgagcagtggagagccacacgtgtggaaatcttgcggaggctgttggtgacctcgcaggctcgggcagtggctccaggtggagccaccaggctgacagataaggcagtgaaggactattccgcttaccgttcttcccttctcttttgggccctcgtcgatctcatttacaacatgtttaagaaggtgcctaccagtaacacagagggaggctggtcctgctctctcgctgagtacatccgccacaacgacatgcccatctacgaagctgccgacaaagccctgaaaaccttccaggaggagttcatgccagtggagaccttctcagagttcctcgatgtggccggtcttttatcagaaatcaccgatccagagagcttcctgaaggacctgttgaactcagtcccctgaccaccacacagcagctgcggcggcgaagacgaagctggcttgccttccaccctctgttctccctccttgtgcattaagttccctccgcgggatgctgcattgttaccccgccctcccctctctcatttttcttggtgtggcttggggtttttaggcttcctgttttatctcgtgtgtgtggtgcaccagctatgaggttgtctgtaacccaagccatcaaagggcctgtacatacctaggagccatgagttgtcccggccagcttcatacttgagtgtgcacatcttgagaaataaacaagtgacttaacacacattgaaaaggaa

SEQ ID NO: 337571 - DNA, 6175 bp, Artificial Sequence
  derived and/or modified sequence
ctggtcaggttgactggagatcttattgtttggtcagatgagatgaacccaccacaggtaattcggacactgctacctcttcttttggaatcaagcactgagagtgttgccgagatcagtagcaactccctggaacgcatcttgggccctgctgagtctgatgagttcttggctcgtgtttatgagaagctgatcactggttgttacaacattctggccaatcatgcagatcctaacagtggactggatgaatccatcctggaggaatgtctccagtacttggaaaagcagctggaaagtagccaggctcgtaaagctatggaggagtttttctctgacagtggagaacttgtacagatcatgatggcaacagccaatgagaacctctctgctaaattctgtaaccgagttttgaaattcttcaccaaactcttccagctgactgagaagagccctaacccgagcctgttgcatctctgtggctccctggcacaactggcctgtgtggaacctgtgcgcctgcaggcctggctcacccgcatgactacatcgcccccaaaagattctgatcagctggatgtaattcaggagaaccggcagctgctgcagttactgaccacatacattgttcgggaaaacagccaagttggggaaggtgtgtgtgctgttcttctgggcaccctgactcccatggcaacagagatgctggccaacggtgatgggactggcttccctgaacttatggttgtgatggccactctggccagtgcaggtcaaggtgctggtcaccttcagcttcataatgctgctgtggattggctgagcagatgcaagaaatacctgtcacagaagaatgtagttgaaaaactgaatgccaatgtaatgcatggaaagcatgtgatgatcttggagtgcacatgccatatcatgtcttacttggctgatgtcacgaatgccctgagccagagtaatggtcaaggcccaagtcatctctcagtggatggggaagagcgggccattgaagtagactcagactgggtggaggagttggcggtggaagaggaagattcccaggctgaggattcagatgaagattctctttgcaataaactctgcacttttacgatcacacagaaagaattcatgaaccagcattggtaccactgtcacacctgtaaaatggtggatggcgtgggtgtctgcacagtgtgtgctaaggtgtgccacaaggatcatgagatttcctatgccaagtatggatccttcttctgtgactgtggagccaaggaagatggcagctgtttggctctggtgaagagaactcctagcagtggcatgagctctaccatgaaggagtcggcatttcagagtgaacccaggatttcagagagtctagtgcgtcatgccagcacctcctcgccagctgacaaagccaaggttaccatcagtgatggaaaggttgctgacgaagagaagcccaagaagagcagcctctgccgcacagtagagggctgccgggaggaattacagaaccaggccaatttctccttcgctcctctcgtgttagacatgcttaatttccttatggatgccattcagaccaacttccagcaagcttcagccgtcgggagcagcagccgtgctcagcaagccctcagtgagctacacactgtggagaaggcagtggagatgacagaccagctgatggttcccaccttagggtcccaggaaggtgcctttgagaatgtgcggatgaattacagtggagaccagggccagaccatccggcagctgatcagtgctcatgtgctcaggcgggtggctatgtgtgtgctctcctctccccatgggcgccgccaacatttggctgtcagccatgagaagggcaagatcaccgttctgcagctctctgcactcctgaagcaagcagattccagcaaaaggaagttaactctgacccgcttggcttctgccccagttccttttactgtgttgagcctcacaggaaatccctgcaaggaagactacttggcggtttgtgggctaaaggactgtcatgtgctcacctttagtagctcaggctctgtttcggatcacttggttttgcaccctcagttggcaacggggaacttcatcatcaaagccgtgtggttacctggttcacagaccgagttagcaattgtcaccgcagactttgttaagatttatgacctgtgtgttgatgccttgagtccaaccttctattttctcctgccaagctcaaagataagagatgttaccttccttttcaatgaggagggaaagaacatcattgttataatgtcttcggctgggtacatctatactcagcttatggaagaggccagcagtgcccagcagggacccttctatgtcactaatgtgttggaaatcaatcatgaggacctgaaggacagtaacagccaggtggcgggcggtggtgtgtccgtgtactactcccacgtgttgcagatgttgttcttcagctattgtcaaggcaaatcattcgcagccaccatcagcaggacaaccctggaggtgttgcaactcttccccatcaacatcaaaagttccaatggtggcagtaagacttctcctgctctttgccagtggtctgaggtgatgaaccaccctggcttggtgtgctgtgtccagcaaactacaggggtgccgctggtagttatggtgaaaccagacacttttcttatccaggagattaagactcttcctgctaaagcgaagatccaagacatggttgctattaggcacacggcctgcaatgagcagcagcggacaacaatgattctgctgtgtgaggatggcagcctgcgcatttacatggccaacgtggagaacacctcctactggctgcagccatccctgcagcccagcagtgtcatcagcatcatgaagcctgttcgaaagcgcaaaacagctacaatcacaacccgcacgtctagccaggtgactttccccattgacttttttgaacacaaccagcagctgacagatgtggagtttggtggtaacgacctcctacaggtctataatgcacaacagataaaacaccggctgaattccactggcatgtatgtggccaacaccaagcccggaggcttcaccattgagattagtaacaacaatagcactatggtgatgacaggcatgcggatccagattgggactcaagcaatagaacgggccccgtcatatatcgagatcttcggcagaactatgcagctcaacctgagtcgctcacgctggtttgacttccccttcaccagagaagaagccctgcaggctgataagaagctgaacctcttcattggggcctcggtggatccagcaggtgtcaccatgatagatgctgtaaaaatttatggcaagactaaggagcagtttggctggcctgatgagcccccagaagaattcccttctgcctctgtcagcaacatctgcccttcaaatctgaaccagagcaacggcactggagatagcgactcagctgcccccactacgaccagtggaactgtcctggagagttctgaaactgagtccctaaccaagctggaccggctggttgtgagttctttagaagccctggaaagctgctttgccgttggcccaatcatcgagaaggagagaaacaagaatgctgctcaggagctggccactttgctgttgtccctgccagcacctgccagtgtccagcagcagtccaagagccttctggccagcctgcacaccagccgctcggcctaccacagccacaaggatcaggccttgctgagcaaagctgtgcagtgtctcaacacatctagcaaagagggcaaggatttggaccctgaggtgttccagaggctagtgatcacagctcgctccattgccatcatgcgccccaacaaccttgtccactttacggagtcaaagctgccccagatggaaacagaaggaatggatgaagggaaggaaccgcagaagcagttggaaggagattgctgtagtttcatcacccagcttgtgaaccacttctggaaactccatgcatccaaacccaagaatgccttcttggcacctgcctgccttccaggactaactcatattgaagctactgtcaatgctctggtggacatcatccatggctactgtacctgtgagctggattgtattaacacagcatccaagatctacatgcagatgctcttgtgtcctgatcctgctgtgagcttctcttgtaaacaagctctaattcgagtcctaaggcccaggaacaaacggagacatgtgactttaccctcttcccctcgaagcaacactccaatgggagacaaggatgatgatgacgatgatgatgcagatgagaaaatgcagtcatcagggatcccgaatggtggtcacatccgtcaggaaagccaggaacagagtgaggtggaccatggagattttgagatggtgtctgagtcgatggtcctggagacagctgaaaatgtcaacaatggcaacccctctcccctggaggccctgctggcaggcgcagagggcttcccccccatgctggacatcccacctgatgcagatgacgagaccatggttgaactagccattgccctgagcctgcagcaggaccaacaagctccagcctcagacgacgagggcagtacagcagcgacagatggttctacccttcggacctctcctgctgaccacggtggtagtgtgggctcggagagcgggggcagtgcagtggactcagtggctggcgagcacagtgtatctggccggagcagtgcttatggcgatgctacagctgaggggcatccggctggaccaggaagtgtcagctcaagcactggagccatcagcaccaccactgggcaccaggagggagatggctccgagggagaaggagaaggagaaactgaaggagatgtccacactagcaacaggctgcacatggtccgtctaatgctgttggagagattactgcagaccctgcctcaattacgaaacgttggcggtgtccgggccatcccatacatgcaggtcattctaatgctcactacagatctggatggagaagatgagaaagacaagggggccctagacaacctgctctcccagcttattgctgagttgggtatggataaaaaggatgtctccaagaagaatgagcgcagcgccctgaatgaagtccatctggtagtaatgagactcctgagtgtcttcatgtcccgcaccaaatctggatccaagtcttccatatgtgagtcatcttccctcatctccagtgccacagcagcagctctactgagctctggggctgtggactactgcctgcacgtgctcaaatcactgctggaatattggaagagccaacagaatgacgaggagcctgtggctaccagccagttgctgaaaccacatactacctcctccccacctgacatgagcccattctttctccgccagtatgtgaagggtcatgctgctgatgtgtttgaggcctatactcagcttctaacagaaatggtactgaggcttccttaccaaatcaaaaagattactgacaccaattctcgaatcccacctcctgtctttgaccactcgtggttttactttctctccgagtacctcatgatccagcagactccatttgtgcgccgtcaagtccgcaaacttctgctcttcatctgtggatccaaagagaagtaccgccagctccgggatttgcacaccctggactctcacgtgcgtgggatcaagaagctgctagaagagcaggggatattcctccgggcaagtgtggttacagccagctcaggctccgccttgcaatatgacacactcatcagcctgatggagcacctgaaagcctgtgcagagattgccgcccagcgaaccatcaactggcagaaattctgcatcaaagatgactccgtcctgtacttcctcctccaagtcagtttccttgtggatgagggcgtgtccccagtgctgctgcaactgctctcctgtgctctgtgcggcagcaaggtgctcgctgcactggcagcctcttcgggatcctccagtgcttcttcctcctcagcccctgtggctgccagttctggacaagccacaacacagtccaagtcttccactaaaaagagcaagaaag

SEQ ID NO: 337572 - protein, 5176 aa, Artificial Sequence
  derived and/or modified sequence
MATSGGEEAAAAAPAPGTPATGADTTPGWEVAVRPLLSASYSAFEMKELPQLVASVIESESEILHHEKQYEPFYSSFVALSTHYITTVCSLIPRNQLQSVAAACKVLIEFSLLRLENPDEACAVSQKHLILLIKGLCTGCSRLDRTEIITFTAMMKSAKLPQTVKTLSDVEDQKELASPVSPELRQKEVQMNFLNQLTSVFNPRTVASQPISTQTLVEGENDEQSSTDQASAIKTKNVFIAQNVASLQELGGSEKLLRVCLNLPYFLRYINRFQDAVLANSFFIMPATVADATAVRNGFHSLVIDVTMALDTLSLPVLEPLNPSRLQDVTVLSLSCLYAGVSVATCMAILHVGSAQQVRTGSTSSKEDDYESDAATIVQKCLEIYDMIGQAISSSRRAGGEHYQNFQLLGAWCLLNSLFLILNLSPTALADKGKEKDPLAALRVRDILSRTKEGVGSPKLGPGKGHQGFGVLSVILANHAIKLLTSLFQDLQVEALHKGWETDGPPAALSIMAQSTSIQRIQRLIDSVPLMNLLLTLLSTSYRKACVLQRQRKGSMSSDASASTDSNTYYEDDFSSTEEDSSQDDDSEPILGQWFEETISPSKEKAAPPPPPPPPPLESSPRVKSPSKQAPGEKGNILASRKDPELFLGLASNILNFITSSMLNSRNNFIRNYLSVSLSEHHMATLASIIKEVDKDGLKGSSDEEFAAALYHFNHSLVTSDLQSPNLQNTLLQQLGVAPFSEGPWPLYIHPQSLSVLSRLLLIWQHKASAQGDPDVPECLKVWDRFLSTMKQNALQGVVPSETEDLNVEHLQMLLLIFHNFTETGRRAILSLFVQIIQELSVNMDAQMRFVPLILARLLLIFDYLLHQYSKAPVYLFEQVQHNLLSPPFGWASGSQDSNSRRATTPLYHGFKEVEENWSKHFSSDAVPHPRFYCVLSPEASEDDLNRLDSVACDVLFSKLVKYDELYAALTALLAAGSQLDTVRRKENKNVTALEACALQYYFLILWRILGILPPSKTYINQLSMNSPEMSECDILHTLRWSSRLRISSYVNWIKDHLIKQGMKAEHASSLLELASTTKCSSVKYDVEIVEEYFARQISSFCSIDCTTILQLHEIPSLQSIYTLDAAISKVQVSLDEHFSKMAAETDPHKSSEITKNLLPATLQLIDTYASFTRAYLLQNFNEEGTTEKPSKEKLQGFAAVLAIGSSRCKANTLGPTLVQNLPSSVQTVCESWNNINTNEFPNIGSWRNAFANDTIPSESYISAVQAAHLGTLCSQSLPLAASLKHTLLSLVRLTGDLIVWSDEMNPPQVIRTLLPLLLESSTESVAEISSNSLERILGPAESDEFLARVYEKLITGCYNILANHADPNSGLDESILEECLQYLEKQLESSQARKAMEEFFSDSGELVQIMMATANENLSAKFCNRVLKFFTKLFQLTEKSPNPSLLHLCGSLAQLACVEPVRLQAWLTRMTTSPPKDSDQLDVIQENRQLLQLLTTYIVRENSQVGEGVCAVLLGTLTPMATEMLANGDGTGFPELMVVMATLASAGQGAGHLQLHNAAVDWLSRCKKYLSQKNVVEKLNANVMHGKHVMILECTCHIMSYLADVTNALSQSNGQGPSHLSVDGEERAIEVDSDWVEELAVEEEDSQAEDSDEDSLCNKLCTFTITQKEFMNQHWYHCHTCKMVDGVGVCTVCAKVCHKDHEISYAKYGSFFCDCGAKEDGSCLALVKRTPSSGMSSTMKESAFQSEPRISESLVRHASTSSPADKAKVTISDGKVADEEKPKKSSLCRTVEGCREELQNQANFSFAPLVLDMLNFLMDAIQTNFQQASAVGSSSRAQQALSELHTVEKAVEMTDQLMVPTLGSQEGAFENVRMNYSGDQGQTIRQLISAHVLRRVAMCVLSSPHGRRQHLAVSHEKGKITVLQLSALLKQADSSKRKLTLTRLASAPVPFTVLSLTGNPCKEDYLAVCGLKDCHVLTFSSSGSVSDHLVLHPQLATGNFIIKAVWLPGSQTELAIVTADFVKIYDLCVDALSPTFYFLLPSSKIRDVTFLFNEEGKNIIVIMSSAGYIYTQLMEEASSAQQGPFYVTNVLEINHEDLKDSNSQVAGGGVSVYYSHVLQMLFFSYCQGKSFAATISRTTLEVLQLFPINIKSSNGGSKTSPALCQWSEVMNHPGLVCCVQQTTGVPLVVMVKPDTFLIQEIKTLPAKAKIQDMVAIRHTACNEQQRTTMILLCEDGSLRIYMANVENTSYWLQPSLQPSSVISIMKPVRKRKTATITTRTSSQVTFPIDFFEHNQQLTDVEFGGNDLLQVYNAQQIKHRLNSTGMYVANTKPGGFTIEISNNNSTMVMTGMRIQIGTQAIERAPSYIEIFGRTMQLNLSRSRWFDFPFTREEALQADKKLNLFIGASVDPAGVTMIDAVKIYGKTKEQFGWPDEPPEEFPSASVSNICPSNLNQSNGTGDSDSAAPTTTSGTVLERLVVSSLEALESCFAVGPIIEKERNKNAAQELATLLLSLPAPASVQQQSKSLLASLHTSRSAYHSHKDQALLSKAVQCLNTSSKEGKDLDPEVFQRLVITARSIAIMRPNNLVHFTESKLPQMETDCFFPRCACWSLGIVGILIGAPLETPSPEGMDEGKEPQKQLEGDCCSFITQLVNHFWKLHASKPKNAFLAPACLPGLTHIEATVNALVDIIHGYCTCELDCINTASKIYMQMLLCPDPAVSFSCKQALIRVLRPRNKRRHVTLPSSPRSNTPMGDKDDDDDDDADEKMQSSGIPNGGHIRQESQEQSEVDHGDFEMVSESMVLETAENVNNGNPSPLEALLAGAEGFPPMLDIPPDADDETMVELAIALSLQQDQQAPASDDEGSTAATDGSTLRTSPADHGGSVGSESGGSAVDSVAGEHSVSGRSSAYGDATAEGHPAGPGSVSSSTGAISTTTGHQEGDGSEGEGEGETEGDVHTSNRLHMVRLMLLERLLQTLPQLRNVGGVRAIPYMQVILMLTTDLDGEDEKDKGALDNLLSQLIAELGMDKKDVSKKNERSALNEVHLVVMRLLSVFMSRTKSGSKSSICESSSLISSATAAALLSSGAVDYCLHVLKSLLEYWKSQQNDEEPVATSQLLKPHTTSSPPDMSPFFLRQYVKGHAADVFEAYTQLLTEMVLRLPYQIKKITDTNSRIPPPVFDHSWFYFLSEYLMIQQTPFVRRQVRKLLLFICGSKEKYRQLRDLHTLDSHVRGIKKLLEEQGIFLRASVVTASSGSALQYDTLISLMEHLKACAEIAAQRTINWQKFCIKDDSVLYFLLQVSFLVDEGVSPVLLQLLSCALCGSKVLAALAASSGSSSASSSSAPVAASSGQATTQSKSSTKKSKKEEKEKEKDGETSGSQEDQLCTALVNQLNKFADKETLIQFLRCFLLESNSSSVRWQAHCLTLHIYRNSSKSQQELLLDLMWSIWPELPAYGRKAAQFVDLLGYFSLKTPQTEKKLKEYSQKAVEILRTQNHILTNHPNSNIYNTLSGLVEFDGYYLESDPCLVCNNPEVPFCYIKLSSIKVDTRYTTTQQVVKLIGSHTISKVTVKIGDLKRTKMVRTINLYYNNRTVQAIVELKNKPARWHKAKKVQLTPGQTEVKIDLPLPIVASNLMIEFADFYENYQASTETLQCPRCSASVPANPGVCGNCGENVYQCHKCRSINYDEKDPFLCNACGFCKYARFDFMLYAKPCCAVDPIENEEDRKKAVSNINTLLDKADRVYHQLMGHRPQLENLLCKVNEAAPEKPQDDSGTAGGISSTSASVNRYILQLAQEYCGDCKNSFDELSKIIQKVFASRKELLEYDLQQREAATKSSRTSVQPTFTASQYRALSVLGCGHTSSTKCYGCASAVTEHCITLLRALATNPALRHILVSQGLIRELFDYNLRRGAAAMREEVRQLMCLLTRDNPEATQQMNDLIIGKVSTALKGHWANPDLASSLQYEMLLLTDSISKEDSCWELRLRCALSLFLMAVNIKTPVVVENITLMCLRILQKLIKPPAPTSKKNKDVPVEALTTVKPYCNEIHAQAQLWLKRDPKASYDAWKKCLPIRGIDGNGKAPSKSELRHLYLTEKYVWRWKQFLSRRGKRTSPLDLKLGHNNWLRQVLFTPATQAARQAACTIVEALATIPSRKQQVLDLLTSYLDELSIAGECAAEYLALYQKLITSAHWKVYLAARGVLPYVGNLITKEIARLLALEEATLSTDLQQGYALKSLTGLLSSFVEVESIKRHFKSRLVGTVLNGYLCLRKLVVQRTKLIDETQDMLLEMLEDMTTGTESETKAFMAVCIETAKRYNLDDYRTPVFIFERLCSIIYPEENEVTEFFVTLEKDPQQEDFLQGRMPGNPYSSNEPGIGPLMRDIKNKICQDCDLVALLEDDSGMELLVNNKIISLDLPVAEVYKKVWCTTNEGEPMRIVYRMRGLLGDATEEFIESLDSTTDEEEDEEEVYKMAGVMAQCGGLECMLNRLAGIRDFKQGRHLLTVLLKLFSYCVKVKVNRQQLVKLEMNTLNVMLGTLNLALVAEQESKDSGGAAVAEQVLSIMEIILDESNAEPLSEDKGNLLLTGDKDQLVMLLDQINSTFVRSNPSVLQGLLRIIPYLSFGEVEKMQILVERFKPYCNFDKYDEDHSGDDKVFLDCFCKIAAGIKNNSNGHQLKDLILQKGITQNALDYMKKHIPSAKNLDADIWKKFLSRPALPFILRLLRGLAIQHPGTQVLIGTDSIPNLHKLEQVSSDEGIGTLAENLLEALREHPDVNKKIDAARRETRAEKKRMAMAMRQKALGTLGMTTNEKGQVVTKTALLKQMEELIEEPGLTCCICREGYKFQPTKVLGIYTFTKRVALEEMENKPRKQQGYSTVSHFNIVHYDCHLAAVRLARGREEWESAALQNANTKCNGLLPVWGPHVPESAFATCLARHNTYLQECTGQREPTYQLNIHDIKLLFLRFAMEQSFSADTGGGGRESNIHLIPYIIHTVLYVLNTTRATSREEKNLQGFLEQPKEKWVESAFEVDGPYYFTVLALHILPPEQWRATRVEILRRLLVTSQARAVAPGGATRLTDKAVKDYSAYRSSLLFWALVDLIYNMFKKVPTSNTEGGWSCSLAEYIRHNDMPIYEAADKALKTFQEEFMPVETFSEFLDVAGLLSEITDPESFLKDLLNSVP

SEQ ID NO: 337573 - protein, 984 aa, Artificial Sequence
  derived and/or modified sequence
DFPFTREEALQADKKLNLFIGASVDPAGVTMIDAVKIYGKTKEQFGWPDEPPEEFPSASVSNICPSNLNQSNGTGDSDSAAPTTTSGTVLERLVVSSLEALESCFAVGPIIEKERNKNAAQELATLLLSLPAPASVQQQSKSLLASLHTSRSAYHSHKDQALLSKAVQCLNTSSKEGKDLDPEVFQRLVITARSIAIMRPNNLVHFTESKLPQMETDCFFPRCACWSLGIVGILIGAPLETPSPEGMDEGKEPQKQLEGDCCSFITQLVNHFWKLHASKPKNAFLAPACLPGLTHIEATVNALVDIIHGYCTCELDCINTASKIYMQMLLCPDPAVSFSCKQALIRVLRPRNKRRHVTLPSSPRSNTPMGDKDDDDDDDADEKMQSSGIPNGGHIRQESQEQSEVDHGDFEMVSESMVLETAENVNNGNPSPLEALLAGAEGFPPMLDIPPDADDETMVELAIALSLQQDQQAPASDDEGSTAATDGSTLRTSPADHGGSVGSESGGSAVDSVAGEHSVSGRSSAYGDATAEGHPAGPGSVSSSTGAISTTTGHQEGDGSEGEGEGETEGDVHTSNRLHMVRLMLLERLLQTLPQLRNVGGVRAIPYMQVILMLTTDLDGEDEKDKGALDNLLSQLIAELGMDKKDVSKKNERSALNEVHLVVMRLLSVFMSRTKSGSKSSICESSSLISSATAAALLSSGAVDYCLHVLKSLLEYWKSQQNDEEPVATSQLLKPHTTSSPPDMSPFFLRQYVKGHAADVFEAYTQLLTEMVLRLPYQIKKITDTNSRIPPPVFDHSWFYFLSEYLMIQQTPFVRRQVRKLLLFICGSKEKYRQLRDLHTLDSHVRGIKKLLEEQGIFLRASVVTASSGSALQYDTLISLMEHLKACAEIAAQRTINWQKFCIKDDSVLYFLLQVSFLVDEGVSPVLLQLLSCALCGSKVLAALAASSGSSSASSSSAPVAASSGQATTQSKSSTKKSKKEEKE

SEQ ID NO: 337574 - DNA, 15531 bp, Artificial Sequence
  derived and/or modified sequence
atggccaccagcggcggcgaggaggccgccgccgccgcccccgcccccggcacccccgccaccggcgccgacaccacccccggctgggaggtggccgtgagacccctgctgagcgccagctacagcgccttcgagatgaaggagctgccccagctggtggccagcgtgatcgagagcgagagcgagatcctgcaccacgagaagcagtacgagcccttctacagcagcttcgtggccctgagcacccactacatcaccaccgtgtgcagcctgatccccagaaaccagctgcagagcgtggccgccgcctgcaaggtgctgatcgagttcagcctgctgagactggagaaccccgacgaggcctgcgccgtgagccagaagcacctgatcctgctgatcaagggcctgtgcaccggctgcagcagactggacagaaccgagatcatcaccttcaccgccatgatgaagagcgccaagctgccccagaccgtgaagaccctgagcgacgtggaggaccagaaggagctggccagccccgtgagccccgagctgagacagaaggaggtgcagatgaacttcctgaaccagctgaccagcgtgttcaaccccagaaccgtggccagccagcccatcagcacccagaccctggtggagggcgagaacgacgagcagagcagcaccgaccaggccagcgccatcaagaccaagaacgtgttcatcgcccagaacgtggccagcctgcaggagctgggcggcagcgagaagctgctgagagtgtgcctgaacctgccctacttcctgagatacatcaacagattccaggacgccgtgctggccaacagcttcttcatcatgcccgccaccgtggccgacgccaccgccgtgagaaacggcttccacagcctggtgatcgacgtgaccatggccctggacaccctgagcctgcccgtgctggagcccctgaaccccagcagactgcaggacgtgaccgtgctgagcctgagctgcctgtacgccggcgtgagcgtggccacctgcatggccatcctgcacgtgggcagcgcccagcaggtgagaaccggcagcaccagcagcaaggaggacgactacgagagcgacgccgccaccatcgtgcagaagtgcctggagatctacgacatgatcggccaggccatcagcagcagcagaagagccggcggcgagcactaccagaacttccagctgctgggcgcctggtgcctgctgaacagcctgttcctgatcctgaacctgagccccaccgccctggccgacaagggcaaggagaaggaccccctggccgccctgagagtgagagacatcctgagcagaaccaaggagggcgtgggcagccccaagctgggccccggcaagggccaccagggcttcggcgtgctgagcgtgatcctggccaaccacgccatcaagctgctgaccagcctgttccaggacctgcaggtggaggccctgcacaagggctgggagaccgacggcccccccgccgccctgagcatcatggcccagagcaccagcatccagagaatccagagactgatcgacagcgtgcccctgatgaacctgctgctgaccctgctgagcaccagctacagaaaggcctgcgtgctgcagagacagagaaagggcagcatgagcagcgacgccagcgccagcaccgacagcaacacctactacgaggacgacttcagcagcaccgaggaggacagcagccaggacgacgacagcgagcccatcctgggccagtggttcgaggagaccatcagccccagcaaggagaaggccgcccccccccccccccccccccccccccccctggagagcagccccagagtgaagagccccagcaagcaggcccccggcgagaagggcaacatcctggccagcagaaaggaccccgagctgttcctgggcctggccagcaacatcctgaacttcatcaccagcagcatgctgaacagcagaaacaacttcatcagaaactacctgagcgtgagcctgagcgagcaccacatggccaccctggccagcatcatcaaggaggtggacaaggacggcctgaagggcagcagcgacgaggagttcgccgccgccctgtaccacttcaaccacagcctggtgaccagcgacctgcagagccccaacctgcagaacaccctgctgcagcagctgggcgtggcccccttcagcgagggcccctggcccctgtacatccacccccagagcctgagcgtgctgagcagactgctgctgatctggcagcacaaggccagcgcccagggcgaccccgacgtgcccgagtgcctgaaggtgtgggacagattcctgagcaccatgaagcagaacgccctgcagggcgtggtgcccagcgagaccgaggacctgaacgtggagcacctgcagatgctgctgctgatcttccacaacttcaccgagaccggcagaagagccatcctgagcctgttcgtgcagatcatccaggagctgagcgtgaacatggacgcccagatgagattcgtgcccctgatcctggccagactgctgctgatcttcgactacctgctgcaccagtacagcaaggcccccgtgtacctgttcgagcaggtgcagcacaacctgctgagcccccccttcggctgggccagcggcagccaggacagcaacagcagaagagccaccacccccctgtaccacggcttcaaggaggtggaggagaactggagcaagcacttcagcagcgacgccgtgccccaccccagattctactgcgtgctgagccccgaggccagcgaggacgacctgaacagactggacagcgtggcctgcgacgtgctgttcagcaagctggtgaagtacgacgagctgtacgccgccctgaccgccctgctggccgccggcagccagctggacaccgtgagaagaaaggagaacaagaacgtgaccgccctggaggcctgcgccctgcagtactacttcctgatcctgtggagaatcctgggcatcctgccccccagcaagacctacatcaaccagctgagcatgaacagccccgagatgagcgagtgcgacatcctgcacaccctgagatggagcagcagactgagaatcagcagctacgtgaactggatcaaggaccacctgatcaagcagggcatgaaggccgagcacgccagcagcctgctggagctggccagcaccaccaagtgcagcagcgtgaagtacgacgtggagatcgtggaggagtacttcgccagacagatcagcagcttctgcagcatcgactgcaccaccatcctgcagctgcacgagatccccagcctgcagagcatctacaccctggacgccgccatcagcaaggtgcaggtgagcctggacgagcacttcagcaagatggccgccgagaccgacccccacaagagcagcgagatcaccaagaacctgctgcccgccaccctgcagctgatcgacacctacgccagcttcaccagagcctacctgctgcagaacttcaacgaggagggcaccaccgagaagcccagcaaggagaagctgcagggcttcgccgccgtgctggccatcggcagcagcagatgcaaggccaacaccctgggccccaccctggtgcagaacctgcccagcagcgtgcagaccgtgtgcgagagctggaacaacatcaacaccaacgagttccccaacatcggcagctggagaaacgccttcgccaacgacaccatccccagcgagagctacatcagcgccgtgcaggccgcccacctgggcaccctgtgcagccagagcctgcccctggccgccagcctgaagcacaccctgctgagcctggtgagactgaccggcgacctgatcgtgtggagcgacgagatgaaccccccccaggtgatcagaaccctgctgcccctgctgctggagagcagcaccgagagcgtggccgagatcagcagcaacagcctggagagaatcctgggccccgccgagagcgacgagttcctggccagagtgtacgagaagctgatcaccggctgctacaacatcctggccaaccacgccgaccccaacagcggcctggacgagagcatcctggaggagtgcctgcagtacctggagaagcagctggagagcagccaggccagaaaggccatggaggagttcttcagcgacagcggcgagctggtgcagatcatgatggccaccgccaacgagaacctgagcgccaagttctgcaacagagtgctgaagttcttcaccaagctgttccagctgaccgagaagagccccaaccccagcctgctgcacctgtgcggcagcctggcccagctggcctgcgtggagcccgtgagactgcaggcctggctgaccagaatgaccaccagcccccccaaggacagcgaccagctggacgtgatccaggagaacagacagctgctgcagctgctgaccacctacatcgtgagagagaacagccaggtgggcgagggcgtgtgcgccgtgctgctgggcaccctgacccccatggccaccgagatgctggccaacggcgacggcaccggcttccccgagctgatggtggtgatggccaccctggccagcgccggccagggcgccggccacctgcagctgcacaacgccgccgtggactggctgagcagatgcaagaagtacctgagccagaagaacgtggtggagaagctgaacgccaacgtgatgcacggcaagcacgtgatgatcctggagtgcacctgccacatcatgagctacctggccgacgtgaccaacgccctgagccagagcaacggccagggccccagccacctgagcgtggacggcgaggagagagccatcgaggtggacagcgactgggtggaggagctggccgtggaggaggaggacagccaggccgaggacagcgacgaggacagcctgtgcaacaagctgtgcaccttcaccatcacccagaaggagttcatgaaccagcactggtaccactgccacacctgcaagatggtggacggcgtgggcgtgtgcaccgtgtgcgccaaggtgtgccacaaggaccacgagatcagctacgccaagtacggcagcttcttctgcgactgcggcgccaaggaggacggcagctgcctggccctggtgaagagaacccccagcagcggcatgagcagcaccatgaaggagagcgccttccagagcgagcccagaatcagcgagagcctggtgagacacgccagcaccagcagccccgccgacaaggccaaggtgaccatcagcgacggcaaggtggccgacgaggagaagcccaagaagagcagcctgtgcagaaccgtggagggctgcagagaggagctgcagaaccaggccaacttcagcttcgcccccctggtgctggacatgctgaacttcctgatggacgccatccagaccaacttccagcaggccagcgccgtgggcagcagcagcagagcccagcaggccctgagcgagctgcacaccgtggagaaggccgtggagatgaccgaccagctgatggtgcccaccctgggcagccaggagggcgccttcgagaacgtgagaatgaactacagcggcgaccagggccagaccatcagacagctgatcagcgcccacgtgctgagaagagtggccatgtgcgtgctgagcagcccccacggcagaagacagcacctggccgtgagccacgagaagggcaagatcaccgtgctgcagctgagcgccctgctgaagcaggccgacagcagcaagagaaagctgaccctgaccagactggccagcgcccccgtgcccttcaccgtgctgagcctgaccggcaacccctgcaaggaggactacctggccgtgtgcggcctgaaggactgccacgtgctgaccttcagcagcagcggcagcgtgagcgaccacctggtgctgcacccccagctggccaccggcaacttcatcatcaaggccgtgtggctgcccggcagccagaccgagctggccatcgtgaccgccgacttcgtgaagatctacgacctgtgcgtggacgccctgagccccaccttctacttcctgctgcccagcagcaagatcagagacgtgaccttcctgttcaacgaggagggcaagaacatcatcgtgatcatgagcagcgccggctacatctacacccagctgatggaggaggccagcagcgcccagcagggccccttctacgtgaccaacgtgctggagatcaaccacgaggacctgaaggacagcaacagccaggtggccggcggcggcgtgagcgtgtactacagccacgtgctgcagatgctgttcttcagctactgccagggcaagagcttcgccgccaccatcagcagaaccaccctggaggtgctgcagctgttccccatcaacatcaagagcagcaacggcggcagcaagaccagccccgccctgtgccagtggagcgaggtgatgaaccaccccggcctggtgtgctgcgtgcagcagaccaccggcgtgcccctggtggtgatggtgaagcccgacaccttcctgatccaggagatcaagaccctgcccgccaaggccaagatccaggacatggtggccatcagacacaccgcctgcaacgagcagcagagaaccaccatgatcctgctgtgcgaggacggcagcctgagaatctacatggccaacgtggagaacaccagctactggctgcagcccagcctgcagcccagcagcgtgatcagcatcatgaagcccgtgagaaagagaaagaccgccaccatcaccaccagaaccagcagccaggtgaccttccccatcgacttcttcgagcacaaccagcagctgaccgacgtggagttcggcggcaacgacctgctgcaggtgtacaacgcccagcagatcaagcacagactgaacagcaccggcatgtacgtggccaacaccaagcccggcggcttcaccatcgagatcagcaacaacaacagcaccatggtgatgaccggcatgagaatccagatcggcacccaggccatcgagagagcccccagctacatcgagatcttcggcagaaccatgcagctgaacctgagcagaagcagatggttcgacttccccttcaccagagaggaggccctgcaggccgacaagaagctgaacctgttcatcggcgccagcgtggaccccgccggcgtgaccatgatcgacgccgtgaagatctacggcaagaccaaggagcagttcggctggcccgacgagccccccgaggagttccccagcgccagcgtgagcaacatctgccccagcaacctgaaccagagcaacggcaccggcgacagcgacagcgccgcccccaccaccaccagcggcaccgtgctggagagactggtggtgagcagcctggaggccctggagagctgcttcgccgtgggccccatcatcgagaaggagagaaacaagaacgccgcccaggagctggccaccctgctgctgagcctgcccgcccccgccagcgtgcagcagcagagcaagagcctgctggccagcctgcacaccagcagaagcgcctaccacagccacaaggaccaggccctgctgagcaaggccgtgcagtgcctgaacaccagcagcaaggagggcaaggacctggaccccgaggtgttccagagactggtgatcaccgccagaagcatcgccatcatgagacccaacaacctggtgcacttcaccgagagcaagctgccccagatggagaccgactgcttcttccccagatgcgcctgctggagcctgggcatcgtgggcatcctgatcggcgcccccctggagacccccagccccgagggcatggacgagggcaaggagccccagaagcagctggagggcgactgctgcagcttcatcacccagctggtgaaccacttctggaagctgcacgccagcaagcccaagaacgccttcctggcccccgcctgcctgcccggcctgacccacatcgaggccaccgtgaacgccctggtggacatcatccacggctactgcacctgcgagctggactgcatcaacaccgccagcaagatctacatgcagatgctgctgtgccccgaccccgccgtgagcttcagctgcaagcaggccctgatcagagtgctgagacccagaaacaagagaagacacgtgaccctgcccagcagccccagaagcaacacccccatgggcgacaaggacgacgacgacgacgacgacgccgacgagaagatgcagagcagcggcatccccaacggcggccacatcagacaggagagccaggagcagagcgaggtggaccacggcgacttcgagatggtgagcgagagcatggtgctggagaccgccgagaacgtgaacaacggcaaccccagccccctggaggccctgctggccggcgccgagggcttcccccccatgctggacatcccccccgacgccgacgacgagaccatggtggagctggccatcgccctgagcctgcagcaggaccagcaggcccccgccagcgacgacgagggcagcaccgccgccaccgacggcagcaccctgagaaccagccccgccgaccacggcggcagcgtgggcagcgagagcggcggcagcgccgtggacagcgtggccggcgagcacagcgtgagcggcagaagcagcgcctacggcgacgccaccgccgagggccaccccgccggccccggcagcgtgagcagcagcaccggcgccatcagcaccaccaccggccaccaggagggcgacggcagcgagggcgagggcgagggcgagaccgagggcgacgtgcacaccagcaacagactgcacatggtgagactgatgctgctggagagactgctgcagaccctgccccagctgagaaacgtgggcggcgtgagagccatcccctacatgcaggtgatcctgatgctgaccaccgacctggacggcgaggacgagaaggacaagggcgccctggacaacctgctgagccagctgatcgccgagctgggcatggacaagaaggacgtgagcaagaagaacgagagaagcgccctgaacgaggtgcacctggtggtgatgagactgctgagcgtgttcatgagcagaaccaagagcggcagcaagagcagcatctgcgagagcagcagcctgatcagcagcgccaccgccgccgccctgctgagcagcggcgccgtggactactgcctgcacgtgctgaagagcctgctggagtactggaagagccagcagaacgacgaggagcccgtggccaccagccagctgctgaagccccacaccaccagcagcccccccgacatgagccccttcttcctgagacagtacgtgaagggccacgccgccgacgtgttcgaggcctacacccagctgctgaccgagatggtgctgagactgccctaccagatcaagaagatcaccgacaccaacagcagaatccccccccccgtgttcgaccacagctggttctacttcctgagcgagtacctgatgatccagcagacccccttcgtgagaagacaggtgagaaagctgctgctgttcatctgcggcagcaaggagaagtacagacagctgagagacctgcacaccctggacagccacgtgagaggcatcaagaagctgctggaggagcagggcatcttcctgagagccagcgtggtgaccgccagcagcggcagcgccctgcagtacgacaccctgatcagcctgatggagcacctgaaggcctgcgccgagatcgccgcccagagaaccatcaactggcagaagttctgcatcaaggacgacagcgtgctgtacttcctgctgcaggtgagcttcctggtggacgagggcgtgagccccgtgctgctgcagctgctgagctgcgccctgtgcggcagcaaggtgctggccgccctggccgccagcagcggcagcagcagcgccagcagcagcagcgcccccgtggccgccagcagcggccaggccaccacccagagcaagagcagcaccaagaagagcaagaaggaggagaaggagaaggagaaggacggcgagaccagcggcagccaggaggaccagctgtgcaccgccctggtgaaccagctgaacaagttcgccgacaaggagaccctgatccagttcctgagatgcttcctgctggagagcaacagcagcagcgtgagatggcaggcccactgcctgaccctgcacatctacagaaacagcagcaagagccagcaggagctgctgctggacctgatgtggagcatctggcccgagctgcccgcctacggcagaaaggccgcccagttcgtggacctgctgggctacttcagcctgaagaccccccagaccgagaagaagctgaaggagtacagccagaaggccgtggagatcctgagaacccagaaccacatcctgaccaaccaccccaacagcaacatctacaacaccctgagcggcctggtggagttcgacggctactacctggagagcgacccctgcctggtgtgcaacaaccccgaggtgcccttctgctacatcaagctgagcagcatcaaggtggacaccagatacaccaccacccagcaggtggtgaagctgatcggcagccacaccatcagcaaggtgaccgtgaagatcggcgacctgaagagaaccaagatggtgagaaccatcaacctgtactacaacaacagaaccgtgcaggccatcgtggagctgaagaacaagcccgccagatggcacaaggccaagaaggtgcagctgacccccggccagaccgaggtgaagatcgacctgcccctgcccatcgtggccagcaacctgatgatcgagttcgccgacttctacgagaactaccaggccagcaccgagaccctgcagtgccccagatgcagcgccagcgtgcccgccaaccccggcgtgtgcggcaactgcggcgagaacgtgtaccagtgccacaagtgcagaagcatcaactacgacgagaaggaccccttcctgtgcaacgcctgcggcttctgcaagtacgccagattcgacttcatgctgtacgccaagccctgctgcgccgtggaccccatcgagaacgaggaggacagaaagaaggccgtgagcaacatcaacaccctgctggacaaggccgacagagtgtaccaccagctgatgggccacagaccccagctggagaacctgctgtgcaaggtgaacgaggccgcccccgagaagccccaggacgacagcggcaccgccggcggcatcagcagcaccagcgccagcgtgaacagatacatcctgcagctggcccaggagtactgcggcgactgcaagaacagcttcgacgagctgagcaagatcatccagaaggtgttcgccagcagaaaggagctgctggagtacgacctgcagcagagagaggccgccaccaagagcagcagaaccagcgtgcagcccaccttcaccgccagccagtacagagccctgagcgtgctgggctgcggccacaccagcagcaccaagtgctacggctgcgccagcgccgtgaccgagcactgcatcaccctgctgagagccctggccaccaaccccgccctgagacacatcctggtgagccagggcctgatcagagagctgttcgactacaacctgagaagaggcgccgccgccatgagagaggaggtgagacagctgatgtgcctgctgaccagagacaaccccgaggccacccagcagatgaacgacctgatcatcggcaaggtgagcaccgccctgaagggccactgggccaaccccgacctggccagcagcctgcagtacgagatgctgctgctgaccgacagcatcagcaaggaggacagctgctgggagctgagactgagatgcgccctgagcctgttcctgatggccgtgaacatcaagacccccgtggtggtggagaacatcaccctgatgtgcctgagaatcctgcagaagctgatcaagccccccgcccccaccagcaagaagaacaaggacgtgcccgtggaggccctgaccaccgtgaagccctactgcaacgagatccacgcccaggcccagctgtggctgaagagagaccccaaggccagctacgacgcctggaagaagtgcctgcccatcagaggcatcgacggcaacggcaaggcccccagcaagagcgagctgagacacctgtacctgaccgagaagtacgtgtggagatggaagcagttcctgagcagaagaggcaagagaaccagccccctggacctgaagctgggccacaacaactggctgagacaggtgctgttcacccccgccacccaggccgccagacaggccgcctgcaccatcgtggaggccctggccaccatccccagcagaaagcagcaggtgctggacctgctgaccagctacctggacgagctgagcatcgccggcgagtgcgccgccgagtacctggccctgtaccagaagctgatcaccagcgcccactggaaggtgtacctggccgccagaggcgtgctgccctacgtgggcaacctgatcaccaaggagatcgccagactgctggccctggaggaggccaccctgagcaccgacctgcagcagggctacgccctgaagagcctgaccggcctgctgagcagcttcgtggaggtggagagcatcaagagacacttcaagagcagactggtgggcaccgtgctgaacggctacctgtgcctgagaaagctggtggtgcagagaaccaagctgatcgacgagacccaggacatgctgctggagatgctggaggacatgaccaccggcaccgagagcgagaccaaggccttcatggccgtgtgcatcgagaccgccaagagatacaacctggacgactacagaacccccgtgttcatcttcgagagactgtgcagcatcatctaccccgaggagaacgaggtgaccgagttcttcgtgaccctggagaaggacccccagcaggaggacttcctgcagggcagaatgcccggcaacccctacagcagcaacgagcccggcatcggccccctgatgagagacatcaagaacaagatctgccaggactgcgacctggtggccctgctggaggacgacagcggcatggagctgctggtgaacaacaagatcatcagcctggacctgcccgtggccgaggtgtacaagaaggtgtggtgcaccaccaacgagggcgagcccatgagaatcgtgtacagaatgagaggcctgctgggcgacgccaccgaggagttcatcgagagcctggacagcaccaccgacgaggaggaggacgaggaggaggtgtacaagatggccggcgtgatggcccagtgcggcggcctggagtgcatgctgaacagactggccggcatcagagacttcaagcagggcagacacctgctgaccgtgctgctgaagctgttcagctactgcgtgaaggtgaaggtgaacagacagcagctggtgaagctggagatgaacaccctgaacgtgatgctgggcaccctgaacctggccctggtggccgagcaggagagcaaggacagcggcggcgccgccgtggccgagcaggtgctgagcatcatggagatcatcctggacgagagcaacgccgagcccctgagcgaggacaagggcaacctgctgctgaccggcgacaaggaccagctggtgatgctgctggaccagatcaacagcaccttcgtgagaagcaaccccagcgtgctgcagggcctgctgagaatcatcccctacctgagcttcggcgaggtggagaagatgcagatcctggtggagagattcaagccctactgcaacttcgacaagtacgacgaggaccacagcggcgacgacaaggtgttcctggactgcttctgcaagatcgccgccggcatcaagaacaacagcaacggccaccagctgaaggacctgatcctgcagaagggcatcacccagaacgccctggactacatgaagaagcacatccccagcgccaagaacctggacgccgacatctggaagaagttcctgagcagacccgccctgcccttcatcctgagactgctgagaggcctggccatccagcaccccggcacccaggtgctgatcggcaccgacagcatccccaacctgcacaagctggagcaggtgagcagcgacgagggcatcggcaccctggccgagaacctgctggaggccctgagagagcaccccgacgtgaacaagaagatcgacgccgccagaagagagaccagagccgagaagaagagaatggccatggccatgagacagaaggccctgggcaccctgggcatgaccaccaacgagaagggccaggtggtgaccaagaccgccctgctgaagcagatggaggagctgatcgaggagcccggcctgacctgctgcatctgcagagagggctacaagttccagcccaccaaggtgctgggcatctacaccttcaccaagagagtggccctggaggagatggagaacaagcccagaaagcagcagggctacagcaccgtgagccacttcaacatcgtgcactacgactgccacctggccgccgtgagactggccagaggcagagaggagtgggagagcgccgccctgcagaacgccaacaccaagtgcaacggcctgctgcccgtgtggggcccccacgtgcccgagagcgccttcgccacctgcctggccagacacaacacctacctgcaggagtgcaccggccagagagagcccacctaccagctgaacatccacgacatcaagctgctgttcctgagattcgccatggagcagagcttcagcgccgacaccggcggcggcggcagagagagcaacatccacctgatcccctacatcatccacaccgtgctgtacgtgctgaacaccaccagagccaccagcagagaggagaagaacctgcagggcttcctggagcagcccaaggagaagtgggtggagagcgccttcgaggtggacggcccctactacttcaccgtgctggccctgcacatcctgccccccgagcagtggagagccaccagagtggagatcctgagaagactgctggtgaccagccaggccagagccgtggcccccggcggcgccaccagactgaccgacaaggccgtgaaggactacagcgcctacagaagcagcctgctgttctgggccctggtggacctgatctacaacatgttcaagaaggtgcccaccagcaacaccgagggcggctggagctgcagcctggccgagtacatcagacacaacgacatgcccatctacgaggccgccgacaaggccctgaagaccttccaggaggagttcatgcccgtggagaccttcagcgagttcctggacgtggccggcctgctgagcgagatcaccgaccccgagagcttcctgaaggacctgctgaacagcgtgccctag

SEQ ID NO: 337575 - DNA, 2955 bp, Artificial Sequence
  derived and/or modified sequence
gacttccccttcaccagagaggaggccctgcaggccgacaagaagctgaacctgttcatcggcgccagcgtggaccccgccggcgtgaccatgatcgacgccgtgaagatctacggcaagaccaaggagcagttcggctggcccgacgagccccccgaggagttccccagcgccagcgtgagcaacatctgccccagcaacctgaaccagagcaacggcaccggcgacagcgacagcgccgcccccaccaccaccagcggcaccgtgctggagagactggtggtgagcagcctggaggccctggagagctgcttcgccgtgggccccatcatcgagaaggagagaaacaagaacgccgcccaggagctggccaccctgctgctgagcctgcccgcccccgccagcgtgcagcagcagagcaagagcctgctggccagcctgcacaccagcagaagcgcctaccacagccacaaggaccaggccctgctgagcaaggccgtgcagtgcctgaacaccagcagcaaggagggcaaggacctggaccccgaggtgttccagagactggtgatcaccgccagaagcatcgccatcatgagacccaacaacctggtgcacttcaccgagagcaagctgccccagatggagaccgactgcttcttccccagatgcgcctgctggagcctgggcatcgtgggcatcctgatcggcgcccccctggagacccccagccccgagggcatggacgagggcaaggagccccagaagcagctggagggcgactgctgcagcttcatcacccagctggtgaaccacttctggaagctgcacgccagcaagcccaagaacgccttcctggcccccgcctgcctgcccggcctgacccacatcgaggccaccgtgaacgccctggtggacatcatccacggctactgcacctgcgagctggactgcatcaacaccgccagcaagatctacatgcagatgctgctgtgccccgaccccgccgtgagcttcagctgcaagcaggccctgatcagagtgctgagacccagaaacaagagaagacacgtgaccctgcccagcagccccagaagcaacacccccatgggcgacaaggacgacgacgacgacgacgacgccgacgagaagatgcagagcagcggcatccccaacggcggccacatcagacaggagagccaggagcagagcgaggtggaccacggcgacttcgagatggtgagcgagagcatggtgctggagaccgccgagaacgtgaacaacggcaaccccagccccctggaggccctgctggccggcgccgagggcttcccccccatgctggacatcccccccgacgccgacgacgagaccatggtggagctggccatcgccctgagcctgcagcaggaccagcaggcccccgccagcgacgacgagggcagcaccgccgccaccgacggcagcaccctgagaaccagccccgccgaccacggcggcagcgtgggcagcgagagcggcggcagcgccgtggacagcgtggccggcgagcacagcgtgagcggcagaagcagcgcctacggcgacgccaccgccgagggccaccccgccggccccggcagcgtgagcagcagcaccggcgccatcagcaccaccaccggccaccaggagggcgacggcagcgagggcgagggcgagggcgagaccgagggcgacgtgcacaccagcaacagactgcacatggtgagactgatgctgctggagagactgctgcagaccctgccccagctgagaaacgtgggcggcgtgagagccatcccctacatgcaggtgatcctgatgctgaccaccgacctggacggcgaggacgagaaggacaagggcgccctggacaacctgctgagccagctgatcgccgagctgggcatggacaagaaggacgtgagcaagaagaacgagagaagcgccctgaacgaggtgcacctggtggtgatgagactgctgagcgtgttcatgagcagaaccaagagcggcagcaagagcagcatctgcgagagcagcagcctgatcagcagcgccaccgccgccgccctgctgagcagcggcgccgtggactactgcctgcacgtgctgaagagcctgctggagtactggaagagccagcagaacgacgaggagcccgtggccaccagccagctgctgaagccccacaccaccagcagcccccccgacatgagccccttcttcctgagacagtacgtgaagggccacgccgccgacgtgttcgaggcctacacccagctgctgaccgagatggtgctgagactgccctaccagatcaagaagatcaccgacaccaacagcagaatccccccccccgtgttcgaccacagctggttctacttcctgagcgagtacctgatgatccagcagacccccttcgtgagaagacaggtgagaaagctgctgctgttcatctgcggcagcaaggagaagtacagacagctgagagacctgcacaccctggacagccacgtgagaggcatcaagaagctgctggaggagcagggcatcttcctgagagccagcgtggtgaccgccagcagcggcagcgccctgcagtacgacaccctgatcagcctgatggagcacctgaaggcctgcgccgagatcgccgcccagagaaccatcaactggcagaagttctgcatcaaggacgacagcgtgctgtacttcctgctgcaggtgagcttcctggtggacgagggcgtgagccccgtgctgctgcagctgctgagctgcgccctgtgcggcagcaaggtgctggccgccctggccgccagcagcggcagcagcagcgccagcagcagcagcgcccccgtggccgccagcagcggccaggccaccacccagagcaagagcagcaccaagaagagcaagaaggaggagaaggagtag

SEQ ID NO: 337576 - DNA, 15531 bp, Artificial Sequence
  derived and/or modified sequence
atggctacgagtggaggtgaggaggcagccgccgcagcccctgccccaggtaccccggccacgggggccgacaccacccctggctgggaggtcgctgttcgtcccctgttgagtgcttcctactcggccttcgaaatgaaagaactgccccagctcgtggcaagtgtgatagaatcagagtctgagatactgcaccatgagaagcagtatgaacctttttattcgtcatttgtcgctctgagcacccattatattactacagtttgctcgttaattcctaggaatcagctgcagtccgtcgcagccgcatgtaaggtgctgatagagttctccttgttgcggctagagaaccccgatgaggcctgcgctgtgtctcaaaaacacctgattctccttattaaagggctgtgcaccggatgtagcagactggacagaacagagatcataaccttcactgctatgatgaagagtgcaaagctcccacaaacagtgaagactctctccgacgtggaagatcagaaggagctcgccagcccagtttctccagaactccgccagaaagaagtccagatgaacttcttaaaccagcttacatctgtatttaacccaaggacagtagcgagccagcccatctcaactcaaactctcgtggaaggagagaatgatgagcagagctcaacggatcaggcctctgctatcaaaaccaaaaatgtcttcattgcgcaaaacgtagcatcactgcaggagctggggggctccgagaaactcttacgggtatgtctgaacctcccctatttcttgcgttacattaatcggtttcaggacgctgtccttgcaaacagtttttttatcatgccggctacagtggcagatgccaccgcagtgcgcaacggatttcactccctggttattgacgtgactatggctctggatacactctcactgccagttctggaaccgctgaacccatcaaggcttcaggacgtcacagttctgtcgctttcctgcttatacgccggcgtttctgtggcgacgtgtatggctatactgcatgtaggatcggcgcagcaggtccgtacgggaagtacttcttccaaagaggacgattacgagagtgacgctgccacaatcgtgcagaagtgtcttgagatctatgacatgattggccaggcaatctcaagctctcgccgggctggtggagaacactaccaaaattttcaactcctgggggcctggtgcttgctcaactcactgttcctgatcctgaacctatcgcccacagctctggccgacaagggaaaggaaaaagatccattggccgctctaagagtgcgagacatactgtcaagaacgaaggaaggcgtgggatctcccaagttggggcccgggaaggggcatcaagggttcggagtactgtccgttattctggcaaaccatgcgataaagctgcttacctctctctttcaagatctgcaggtagaggccttgcacaaaggatgggagacagacggaccgcccgccgctctttccatcatggcccagtccaccagtattcagcgtattcaacggctcattgattcagtgcccctgatgaacctgttactcacattgctctcaacctcctaccgcaaggcctgcgtcctccagaggcagcgcaaaggatccatgagtagcgatgcgtccgcttctactgacagcaacacttactacgaggacgacttctcgagcaccgaagaagattctagccaagacgatgacagcgaaccaattttgggacagtggtttgaagagacgatctccccaagtaaggagaaggccgctccaccccccccacccccccccccccccttagagtcctcacccagggttaaaagtccatccaaacaggcaccgggtgaaaaaggtaatatcctggcctctaggaaggatcctgaactgtttctgggcctggcaagcaacattctgaatttcattacatcctctatgttgaactcgcgtaacaactttattcgcaactacctgtccgtatcattgagtgaacatcacatggcaacactagcttctatcatcaaggaggttgacaaagacgggttaaagggctctagtgacgaagaatttgccgcggccctataccactttaaccacagtctcgtgactagtgatctccagtcacctaacctccagaataccttgctgcagcagttaggggtggcacccttttccgaggggccttggccactttatattcacccgcagtctttaagcgtcctgagccgcctgctcctgatctggcagcacaaggccagtgcacaaggggatccagacgtgcctgaatgcctgaaagtttgggacagattcctttcaaccatgaaacagaatgcccttcaaggggtggtcccttccgagaccgaagacctgaatgttgagcacctgcagatgctcctcctaatttttcataattttacagagactgggaggagagcaatcctgagtttattcgtgcaaattattcaggagctctcggtcaacatggatgcacagatgagatttgttccattgatcctggctcgtctcttattaatcttcgattacctcctgcatcaatactccaaagcacccgtgtatctttttgagcaggtccagcacaaccttctgagtccacccttcgggtgggcttcaggcagtcaggattcaaattcccgccgggccacaactccactctatcatggtttcaaggaggtcgaagagaactggtcaaagcatttcagctctgatgctgtgccccaccctcggttctattgcgtactgtctcctgaagcctctgaggacgacttgaacaggctggatagcgtggcgtgcgatgttttgttctcaaaattggtgaagtacgatgaactctatgccgcacttacagcgctgttggcagccgggagccagttggataccgtccgtcgaaaagaaaacaagaatgtcacagcactggaagcttgcgcattgcaatattatttcctcatcctttggcgcattttgggcatcctacccccctctaaaacatacattaatcagttgagcatgaatagtccagagatgtccgagtgtgatattctgcataccctgcgctggagcagccggctccgtatatcaagctatgtgaattggattaaggaccatctgataaaacagggaatgaaagcagaacacgcctcttcactgctagagttggcctcgacaactaaatgttcaagtgttaagtacgatgttgagattgtggaggaatacttcgcacggcaaatctcctctttttgctctatcgattgcaccaccatactgcagcttcacgaaatcccaagtcttcaatccatctatactctggacgctgccattagcaaagttcaggtgagccttgacgaacatttcagcaagatggctgctgagacggacccacacaagagtagcgagatcaccaaaaacctcctccccgctaccctgcagctgattgacacctacgcttctttcacccgcgcttacctgttgcagaactttaacgaggaaggcacgacagagaagccatccaaggagaagctgcagggtttcgcagcagtgcttgcgatcggttcatcgaggtgtaaagctaacacacttggtccaacactcgttcagaatctgccgagctccgtgcagactgtatgtgaatcctggaataacatcaacacaaatgagttcccaaatatcggcagctggagaaatgccttcgccaacgatacaatcccctccgagtcctatataagcgccgttcaggctgcacatctcgggaccctatgctcccagtcgctgccattagctgcctcactgaagcatactttgctgagcttggtgcggctcactggagatctgattgtttggagtgacgagatgaaccccccacaggtgatccgcaccctgttgcccctattattagaaagtagcacagagtccgtggcagagattagtagtaactcactggaacgcatcctaggaccagccgagtctgatgaatttttggcccgcgtctacgagaaacttatcactgggtgttacaacatactagccaaccatgcagaccctaattccggcctcgacgaaagtatcctggaggaatgtctgcagtacctcgagaagcaactcgaatcaagccaggcccgcaaggctatggaagagttcttctccgattctggggaactggtgcagattatgatggccaccgcgaacgagaatctgagcgccaagttctgtaacagagtgctcaaatttttcactaagctgttccagctgactgagaaatctccaaacccctcactattacatctgtgtggaagcttggcacagctggcctgtgtggagcctgtgaggcttcaagcctggctgaccaggatgactacgtcccctccaaaagactccgaccagttagacgtgattcaagagaatcggcaattattacagctccttaccacctacattgtgcgcgaaaacagccaggttggagaaggcgtctgtgcagtgttgcttggcaccctgacaccgatggcgaccgagatgctggctaacggggacggtactggctttcctgagcttatggtggtgatggccacgctcgcatccgcggggcagggtgcaggccatcttcagcttcacaatgctgcagttgattggctgtctcgatgcaagaagtacctgagccagaagaacgtggtggagaagctcaatgcaaatgtgatgcatggcaagcatgtgatgattctcgagtgcacttgccacataatgagctatctagctgacgtaacaaatgctctgagtcagtcaaatgggcagggccccagccatttgagtgtggatggggaggagcgagcgatcgaagtggactctgattgggttgaggagctggccgtggaagaggaggatagccaagcagaagacagtgatgaagatagtttgtgtaacaaactttgcacctttacgattactcaaaaagaatttatgaaccagcactggtaccactgtcatacctgtaagatggtggatggggtgggggtctgtactgtctgcgcaaaagtttgccacaaggatcatgagatttcatacgcaaagtatggatcctttttctgcgactgcggcgccaaagaggacggcagttgtttggcactggtcaagaggacacccagcagtggtatgtcttctaccatgaaggagagcgcttttcaaagcgaacctaggattagcgagagcctggtgcgacacgctagtaccagcagcccagccgataaggcaaaagtgacaatctcggacggcaaggtcgccgacgaggaaaaacccaaaaaaagttctctctgccgcaccgtggagggatgccgcgaggagctacagaaccaagccaattttagcttcgccccgctggttttggacatgttgaattttttgatggatgccatccagaccaatttccagcaggcctcagcggtgggatcttcctccagagcccaacaggctctgtcggagcttcacaccgttgaaaaagcagtcgagatgacagatcagctgatggtgcctacccttggctctcaggaaggcgcatttgagaatgttaggatgaattattccggggaccaggggcagactatcagacagctgattagtgcccacgtcctgcgcagggtggccatgtgcgttctgagtagcccccatggccgccggcagcatttagcagtttcccacgaaaagggaaaaattacagtgctccagctgtccgcacttttgaaacaagccgactcttcaaagaggaagctcactcttacccgtcttgcttccgctcccgtgcccttcacagtcctgagcctcaccgggaacccatgtaaggaggactacttagccgtgtgcggactcaaggactgtcatgtactcacattttcttcaagcggcagcgtaagcgatcatctggtgctccacccacagcttgccactggtaatttcattatcaaggccgtgtggctcccaggctctcagaccgagttggctattgtgaccgcagactttgtgaagatatacgatctgtgtgtcgacgccctcagtcctacattttattttctgttgccgtcatctaaaatcagggatgttaccttcctgtttaacgaagagggcaaaaatatcattgtgatcatgtcgtcggccggatatatctatactcagctgatggaggaggcgtcttccgcacagcaggggccattctatgtaaccaatgtgctggaaatcaaccacgaagacctgaaggatagtaatagccaggtggcaggtggcggggtatcagtttattattctcatgtgttgcagatgttatttttctcgtattgtcagggcaagtccttcgctgcaaccatctctcggactactcttgaggtgctgcaactatttcctattaacatcaagagcagtaacggcgggtcgaaaacctccccagccctgtgtcagtggagcgaggtgatgaatcacccaggtcttgtgtgttgcgtgcaacagactactggcgtgccgcttgttgtgatggtgaaaccagacacatttctcattcaggagatcaagacgctccccgcaaaagcgaagattcaagatatggtcgcaattcggcacactgcctgtaatgaacagcagcgtactactatgatactgctgtgcgaagacggttcacttagaatctacatggctaatgtggaaaacacaagttactggctgcagccctccttgcaaccgagtagcgtgatctctatcatgaagccagttcgcaagcgtaagaccgccacgataaccacgcgcacgtcctcacaggtgacatttcctatagacttcttcgaacataaccagcaactgactgacgtcgaatttggggggaacgatcttctccaggtttacaacgcacaacagattaaacaccggctgaacagcaccggaatgtacgtcgccaacaccaagccaggaggatttaccattgagattagtaacaataatagtaccatggtaatgaccgggatgcggatccagataggcactcaggcaattgagcgcgccccatcctatatcgaaatattcgggaggacgatgcagctcaaccttagccgcagcagatggttcgacttcccattcacgagagaagaggcactgcaggccgacaagaaactgaacctgtttattggggcatccgtagaccccgccggcgtcaccatgatcgatgctgtgaagatctatgggaagacaaaagagcaatttggatggcccgatgaaccacccgaggaattcccatctgctagtgtgagtaatatctgtccaagtaacctcaaccagtcgaacggaacaggcgactcagatagcgccgccccaaccaccacttctggaaccgtgttagaaaggttggtggtcagcagcctggaagctctggagagctgtttcgcagtcggccctattatagagaaagagaggaacaagaacgcggctcaagagctggccacgctcctgctgagtctcccagccccagccagcgtgcaacagcagtctaaatctttactggcgtcccttcacaccagcaggagcgcctatcacagtcacaaggatcaagctcttctctctaaggccgtgcaatgcctgaatacaagcagcaaagaaggcaaggacctggatcctgaagtgtttcagcggctggtaatcactgctcgcagtatcgcaattatgcgtccaaacaacctcgtccattttaccgaatccaagttaccacagatggaaaccgattgttttttccctcggtgcgcctgttggtcgctcgggattgttggaatcctgattggcgccccacttgagaccccttctcctgagggcatggacgagggcaaggagccacaaaaacagttggaaggagactgctgtagctttattacgcagctcgtcaatcacttctggaaacttcacgctagcaagcccaagaacgcctttctcgctccagcatgcctacccggcctcacccacatagaagccacagtgaatgctctcgtcgacatcatccacggctactgcacttgcgaattggattgtattaatactgccagcaagatctatatgcagatgctgctttgtccggaccccgcagtttcattctcctgcaagcaggccttaattagagtgttgcggccgaggaataaaaggcgccatgtaacgctgccttcctcgcccagatcaaacactcccatgggagataaggatgatgatgatgatgacgacgcggacgaaaagatgcagtcctctgggattcctaacgggggccatatccgacaggagagccaggagcaatccgaggtggaccacggtgatttcgaaatggtctccgagtctatggttctagaaaccgccgaaaatgtaaacaatggcaacccatcacctttggaagctttgctggccggagctgaaggttttcctcccatgcttgacatcccacctgatgcagatgatgagacaatggtggagctagctattgcactgtctttacaacaggaccagcaggcaccagcgtcagatgatgaggggagtaccgctgccacagatgggtcaaccttgcgtacgtcaccagccgaccatggcggtagtgtaggttcggagagtggcgggtctgcggtggactcggtagctggagagcactctgttagcggcaggtcttctgcctatggagacgctaccgccgaagggcatcccgccggccctgggagcgtttccagtagtacgggagctatctcaactactactggccatcaggaaggcgatggatccgagggcgagggagaaggcgagactgagggagatgtccatacaagtaacagactccatatggtgagactgatgctattagagcggttgctgcagaccctcccccaattgaggaacgttggcggtgtgagagctattccttatatgcaggttatattgatgctgacgactgatctggacggggaggacgagaaggataagggggctctagacaaccttcttagtcagttgatcgctgaattgggaatggataagaaagacgtaagcaagaagaacgaacgcagcgctctgaacgaggtccacctcgtcgtgatgcgactattaagcgtttttatgagccgaacgaagagcggctctaagtctagtatctgtgagtcctcttctctgatcagctcagctacagcggcagcactactcagttcaggcgctgtggactactgcctccatgtcctcaaaagtttactggaatattggaaatcccagcagaatgatgaggagccagttgcaacgtcccagctcctgaagcctcacactactagctcaccaccagatatgagtccctttttcctgcgacaatatgtcaaggggcacgctgcagacgtgttcgaagcctacacgcagctccttactgaaatggtcttgagattgccatatcaaattaagaagataacagacaccaattcacgaattccgcctcccgtttttgaccattcttggttttatttcttgagcgagtacctgatgatccagcagactccctttgtaaggcggcaggtgaggaagctgttgttatttatctgtggctctaaggagaagtaccgccagctgagggacctgcacacgctcgacagtcacgtcagaggcattaaaaaactgctcgaagagcagggtatctttctgagggcttccgttgttactgctagttcaggatcagctcttcagtatgatacccttatcagtttgatggaacatttaaaggcctgtgctgagatagccgctcaacggacaattaactggcagaagttctgtattaaggatgactcagtgctctactttttgctgcaggtttcgttcctcgtggacgaaggagtttccccagtattgctgcagctcctgtcttgcgccctgtgtggctcaaaagtcctcgccgcacttgcagcgtccagcggttcatctagtgccagcagctcctcggcgcctgttgcagcatcttccgggcaggccactactcagagcaagagctccaccaaaaaatcaaagaaggaggaaaaagagaaggagaaggatggcgaaacgagcgggtcccaggaggaccaactatgtacggccctggtcaatcaactgaataagttcgccgacaaggaaacacttatacagttccttcgatgttttctgctggaatcaaacagttcctctgtccgttggcaggcacattgcctgaccttacacatttatagaaattcttctaagtcccaacaggagctgttgttagacctcatgtggtcaatttggcctgaactgccagcttacggcaggaaggcagcccagtttgtcgacctcctgggatatttttcactgaaaacaccccaaacagaaaaaaaactgaaagagtacagtcagaaagccgtggaaatccttagaacacaaaatcacatcctcaccaatcacccgaacagcaacatttacaatactttaagcggtctggtggaatttgatggttactatttggagtctgatccctgtctagtttgtaataatccagaggtccctttttgttacatcaagctgagcagcattaaggtcgacacccgttacaccaccacacagcaggtcgtgaagttaatcgggtcgcataccatctccaaagttaccgttaaaattggggaccttaaacgcaccaagatggtgaggacaatcaatctgtattacaacaataggactgtacaggcaattgtcgagttaaagaataaaccggccagatggcataaagctaagaaagtccaactgactcctggccaaacagaggtgaagatagacctaccgttaccaattgtagcatcaaatctgatgattgaatttgctgatttctatgagaactaccaggcctctaccgagacactgcagtgcccaagatgtagcgctagcgtgcctgccaacccaggcgtgtgtggtaactgtggagaaaacgtgtaccagtgccacaaatgtcggtccattaactacgatgaaaaagatcccttcttgtgcaacgcttgtggattctgtaaatacgcgaggttcgacttcatgctctatgcaaagccctgttgcgccgtcgaccctatcgagaacgaggaagacaggaagaaagcagtgagtaacatcaacactttgctggataaagccgatcgggtttaccatcagctcatggggcaccgcccacagctggagaacctcctctgtaaggtaaatgaagcagcccccgagaaacctcaggacgatagcgggacagcaggtggaatttctagcaccagcgccagtgttaacagatacatcctacaactggcgcaggagtactgcggggactgtaagaactccttcgacgagctgagtaagattatccagaaagtctttgcttccaggaaggagcttcttgaatatgacctacagcaaagggaggccgctactaagtcttcccgaacttccgtccaacccaccttcaccgctagtcaatatcgagctctgagtgtactgggatgcggccatacttctagtaccaaatgttacggctgtgcttccgcagtgactgagcactgtatcacactgttacgggccctggctaccaacccagcccttcgccacatattggtgtcccagggactgatcagagagctttttgattacaacctcagacgcggcgccgctgccatgagagaggaggtgcgccagcttatgtgtttacttacgcgcgataatcccgaagcgacccagcagatgaacgatttgattatcggaaaggtaagcacggctctgaagggccattgggccaatcccgacctggcttccagtctccaatacgagatgctcctactgacagattccattagcaaagaggatagctgctgggagttaagactgcgctgcgcccttagcttgttcctgatggccgtgaacatcaagaccccagttgtagtggagaatattacgctgatgtgcctacgcattctccagaaattgataaaaccccctgcccctacatctaagaagaacaaggatgttcccgtggaggccctgacaactgttaaaccttattgtaacgagattcatgcgcaagcccagctttggcttaaacgcgatcccaaagcttcttatgatgcatggaaaaaatgtctgccaatccgcggtatcgacggaaacggcaaggctcctagcaaatccgaattaaggcacctgtatctgaccgaaaaatacgtgtggcgctggaaacagttcctttcaaggcgtggtaagagaacctcccccctggacctgaagctggggcacaataattggcttagacaggtcctgtttacaccagcgacgcaggcagcccgtcaagcggcatgtacaatcgtcgaggcgttagcaaccatcccgtcaagaaagcagcaggttcttgacctactgactagctatttggacgagttgtcaattgcaggagagtgcgcagccgaatatctggcgctctaccagaagcttatcacatcggctcactggaaggtctacctcgccgctaggggggtgctgccttacgtaggaaacctgatcactaaggagattgcgcgattactcgccttagaggaggctaccctgtctacagacttacagcaggggtatgctcttaagtctcttacaggattgttaagctcgttcgtcgaagtggaatcgatcaaaagacattttaagagccgcctggtgggcacagtactcaatggctatttatgccttcggaagctggtcgtccagaggaccaagctgatcgacgaaacccaagacatgctgctcgagatgttggaggacatgaccaccggcaccgagagtgagacaaaggctttcatggctgtgtgtatcgagaccgctaaacgctataacctggatgattaccgcacaccagtttttatatttgaaaggctttgttcgataatctatccagaagagaacgaagtcactgaattctttgtgactctagagaaggatccgcagcaagaagatttcctccaggggcgcatgcccggcaacccgtacagttccaatgaacccggcatcggccctcttatgagggacattaagaacaaaatttgccaggactgtgacttagttgctttattggaggatgattcaggtatggaattactcgtgaacaacaaaattatctctctcgatctgcccgtcgcagaggtgtacaaaaaggtctggtgtaccaccaatgaaggcgagcccatgcggattgtgtaccgcatgaggggcttgttgggcgatgcaactgaagagttcatagaatcacttgactcaaccacggatgaagaagaggatgaggaggaggtgtataaaatggcaggtgttatggcacaatgcggcggactggagtgcatgttaaatcgtctggctgggataagggacttcaagcaagggagacatttgttaactgtgctgctgaaactgttctcatactgtgtaaaggtcaaagtcaatagacagcagttggtgaagctggagatgaacacgttgaacgtcatgctgggcactttgaacctggcactggtggcagagcaggaatcaaaagacagcggtggcgcagccgttgctgagcaggtgctgtccatcatggagatcatactggatgagagtaatgccgagcctctgtctgaagataagggcaacttgctattgactggcgacaaggaccagttggtcatgctccttgaccagattaactcgacatttgtacgctcaaaccccagtgtgcttcagggcctgttacgcattatcccgtaccttagcttcggagaagtggagaagatgcagatccttgtcgagaggttcaaaccctattgtaatttcgacaaatatgatgaagaccactccggggacgataaggtctttctggactgtttttgcaagattgctgccggcatcaaaaacaacagtaatggacaccagctcaaggatctgatattgcagaaaggcatcacccagaatgccctagactacatgaagaagcacataccatcagccaaaaaccttgatgcagacatctggaagaaatttctgagtcggcccgcactgcccttcatactgcgccttctcaggggacttgctattcagcaccccgggacacaagttctaatcggtaccgacagtattccgaatttgcataaactcgagcaggtttcgagtgacgaagggatcgggaccttggccgagaacctgcttgaagcactgcgagaacacccagacgttaataagaagatcgacgccgccaggcgcgagacacgagctgaaaaaaagcgcatggctatggccatgcgtcagaaggcacttggtaccttgggtatgaccacaaatgagaagggccaggtcgtgactaaaactgcgctgcttaaacaaatggaagaactgatcgaggagccaggtctgacatgttgtatctgtagggaaggatataaatttcagcccacaaaggtgcttgggatctatacatttaccaaaagagtggccctcgaagagatggagaacaagccccggaaacagcagggctattccacagtgagccattttaacatagttcattatgactgccatcttgcagccgtcaggttggccagaggaagagaggagtgggaatccgctgcattacaaaatgcaaacaccaagtgcaatggcctgctgccagtttggggcccacacgtgcccgagtcggcctttgccacgtgcctggctcgacacaacacatatcttcaggagtgtacaggccagagggagccaacttatcagttgaatattcacgacataaaactgcttttcctgaggtttgccatggagcagagcttttcagcagatactggtgggggcggtagagagagtaacattcaccttattccttatataatacacaccgtgctctacgtgctcaatacgactcgtgccaccagcagagaggagaaaaacctccaagggtttctggaacagcccaaggaaaaatgggtggagtccgcctttgaggttgacggcccttattactttaccgtcttggctctgcatattctgcctccggagcagtggagggccacacgcgtcgagattctccggcgattgctggtgaccagtcaggcgagagccgtggcaccagggggggctaccaggctgacggacaaagccgtgaaggactactccgcgtaccgctcgagcctgctgttttgggccttggtggacctcatttacaatatgttcaagaaggtgccgacttcaaatactgaaggcgggtggtcttgttcactcgccgagtacataaggcataacgacatgccaatttatgaggcggctgataaggcacttaaaacctttcaggaagaatttatgcccgtcgagactttctcagagttcctcgacgtggcgggtcttcttagcgagatcactgaccctgaaagctttctgaaagacctgctgaattccgtcccctag

SEQ ID NO: 337577 - DNA, 2955 bp, Artificial Sequence
  derived and/or modified sequence
gacttcccgtttactcgggaagaggcattacaggccgacaagaaactcaacctattcattggagcgagcgtagacccagccggcgtcaccatgatcgatgccgtgaagatctacggtaaaaccaaggaacagtttggctggccagacgagcctcccgaggagtttccctccgccagcgttagcaacatctgcccatcaaacttgaatcagtccaacggtaccggcgacagcgactccgcggcacccactaccacgagtgggacagttcttgaacgcctggtcgtgtcttcactggaggcattagagtcctgcttcgctgtgggacccattattgagaaggagcgtaataaaaatgcagcacaggaactggctaccctgcttctctccttgccagcccctgcctccgtccagcagcagtctaaatctctcctggcatctttgcatacctcacgcagtgcttaccactcacacaaggaccaagctttgctgtccaaagccgtccagtgcttgaatacctcatccaaagagggaaaggatctggatcctgaggttttccaacggctcgttatcaccgctcgttccatcgctattatgcgcccgaacaacctcgttcactttacagaaagtaagctgccacaaatggagacggactgttttttcccacgatgcgcctgttggagcctcggcatcgtaggcattttgatcggggctccccttgagacaccatcccctgagggtatggatgagggtaaggagcctcagaaacagcttgagggagactgctgtagcttcatcactcagctggttaaccatttttggaagcttcatgcttccaagcccaagaatgcatttcttgctccggcctgccttcccggtctcacacacatagaagcaaccgtgaacgcactggttgatattattcacgggtactgtacctgtgaattggactgtatcaatacggcctcaaagatttatatgcagatgctgctgtgtcctgatcctgcagtttccttctcttgtaagcaggccctgatccgagttctgcggccaaggaacaagaggcgacacgtcactcttcccagtagccctaggtcaaacacccccatgggggataaagatgacgatgatgacgatgacgctgacgagaagatgcaatcctctggaatcccaaatgggggacacatacgacaggagtcccaggagcagtcagaggtcgatcacggggacttcgagatggtttcagaaagtatggtactggagaccgccgaaaatgtgaataacggcaacccttcacccctggaggccctgttggcaggtgccgagggcttcccccctatgctcgatatcccccctgacgccgacgatgaaacaatggtggaattggctattgcactctcacttcagcaggaccagcaggcccccgcatccgatgatgaaggctcgactgccgctacagacggtagtacacttcggacatcaccggcggaccatggtgggtcagttggttcagaatcaggaggctccgccgtggatagtgtggctggcgaacattcagtttcaggaagatccagcgcctatggtgatgctactgcggagggtcaccccgccggcccaggttctgtgagtagcagcacaggagcaatttccaccactactggtcaccaggaaggagacgggtctgagggtgaaggggagggggaaacggagggcgacgttcatacgagcaatagactgcacatggtgagactgatgctgcttgaaagactgctgcagactctgcctcagctgcgtaatgtgggcggggtgcgtgctataccttacatgcaagttattctgatgctcactacggatctggatggcgaggatgagaaggataaaggagccctggacaacctgctgtcccaactgattgccgaacttggaatggacaaaaaggacgtgtccaaaaagaacgagaggagcgcactcaacgaagtgcacctggtcgtcatgcgcctgctgtccgtttttatgagtagaacgaagtctgggtctaagagttctatatgcgagtcaagctctttgatatcctctgccacagccgccgctctactgagctcaggcgctgtggactattgcctccacgtgctaaaaagcctgctagagtattggaaatcacagcagaacgatgaagaaccagtggctacctctcagctgttgaagccccatactacctcatcccctccagacatgagcccctttttcctccgtcaatacgtgaaaggacacgctgccgatgtcttcgaagcttacactcagctcctgacggagatggttctgaggctcccttatcaaatcaaaaaaatcaccgatacaaactcacggattccaccaccggttttcgaccatagctggttttacttcttgtccgagtatctcatgattcagcaaacaccatttgttagaagacaggttcgcaaactcttactgtttatatgcggctctaaagaaaagtacaggcagctgagagaccttcatacattagatagccatgtgagaggcattaaaaagctcttagaagagcagggcatctttctccgggcgagcgtggttaccgcttcaagcggttcagccttgcagtacgacactcttatcagtctgatggagcatctcaaagcctgtgctgagatagccgcacagcgcactatcaactggcagaaattctgcattaaagatgattctgtcctatactttctactccaggttagctttttggtggatgaaggtgtgtcccctgtgctcctacagctgctgagctgcgccctctgtggcagtaaggtccttgccgcactggctgccagtagcggctctagttcagctagttcttccagcgcgccagtggccgcttcatctggccaggctacaacccagagcaagagctctaccaaaaagtcaaagaaggaggaaaaggagtag

SEQ ID NO: 337578 - DNA, 15531 bp, Artificial Sequence
  derived and/or modified sequence
atggccaccagcggcggggaggaggccgctgctgctgccccagcccctggcaccccagccactggagctgacaccaccccaggctgggaggtggccgtgcggcccctgctgagcgccagctacagcgcctttgagatgaaggagctgccccagctggtggcctctgtgattgaaagtgaaagtgagatcctgcaccacgagaagcagtatgagcccttctacagcagctttgtggccctgagcacccactacatcaccaccgtgtgcagcctcatccccaggaaccagctgcagagcgtggccgccgcctgcaaggtgctgattgagttcagcctgctgcggctggagaacccagatgaggcctgtgctgtgtcccagaagcacctgatcctgctgatcaagggcctgtgcaccggctgcagccggctggacagaacagagatcatcaccttcaccgccatgatgaagagcgccaagctgccccagacagtgaagaccctgagtgatgtggaggaccagaaggagctggccagccctgtgtccccagagctgcggcagaaggaggtgcagatgaacttcctgaaccagctgacctctgtgttcaaccccaggacagtggccagccagcccatcagcacccagaccctggtggagggggagaatgatgagcagagcagcacagaccaggccagcgccatcaagaccaagaatgtgttcatcgcccagaatgtggccagcctgcaggagctgggcggcagcgagaagctgctgcgggtgtgcctgaacctgccctacttcctgcgctacatcaaccgcttccaggatgctgtgctggccaacagcttcttcatcatgcctgccaccgtggctgatgccacagctgtgagaaatggcttccacagcctggtgattgatgtgaccatggccctggacaccctgagcctgcctgtgctggagcccctgaaccccagccggctgcaggatgtgacagtgctgagcctgagctgcctgtatgccggcgtgtctgtggccacctgcatggccatcctgcacgtgggcagcgcccagcaggtgaggacaggcagcaccagcagcaaagaagatgattatgaaagtgatgctgccaccatcgtgcagaagtgcctggagatctatgacatgattggccaggccatcagcagcagccggcgggccggcggggagcactaccagaacttccagctgctgggcgcctggtgcctgctgaacagcctcttcctgatcctgaacctgagccccacagccctggccgacaagggcaaggagaaggaccccctggccgccctgcgggtgcgggacatcctgagcaggaccaaggagggcgtgggcagccccaagctgggccctgggaagggccaccagggctttggagtgctgagcgtcatcctggccaaccacgccatcaagctgctgaccagcctcttccaggacctgcaggtggaggccctgcacaagggctgggagacagatggccccccagctgccctgagcatcatggcccagagcaccagcatccagaggatccagaggctgattgattctgtgcccctgatgaacctgctgctgaccctgctgagcaccagctacaggaaggcctgtgtgctgcagaggcagaggaagggctccatgagcagtgatgccagcgccagcacagacagcaacacctactatgaagatgacttcagcagcacagaggaggacagcagccaggatgatgattctgagcccatcctgggccagtggtttgaggagaccatcagccccagcaaggagaaggccgcccctcctcctcctcctcctcctccacccctggagagcagcccccgggtgaagagccccagcaagcaggcccctggagagaagggcaacatcctggccagcaggaaggaccctgagctgttcctgggcctggccagcaacatcctgaacttcatcaccagctccatgctgaacagcaggaacaacttcatccggaactacctgtctgtgtccctgtctgagcaccacatggccaccctggccagcatcatcaaggaggtggacaaggatggcctgaagggcagcagtgatgaggagtttgctgctgccctgtaccacttcaaccacagcctggtgaccagtgacctgcagagccccaacctgcagaacaccctgctgcagcagctgggcgtggcccccttcagcgagggcccctggcccctgtacatccacccccagagcctgtctgtgctgagccggctgctgctgatctggcagcacaaggccagcgcccagggcgaccctgatgtgcctgagtgcctgaaggtgtgggaccgcttcctgagcaccatgaagcagaatgccctgcagggcgtggtgcccagcgagacagaggacctgaatgtggagcacctgcagatgctgctgctgatcttccacaacttcacagagaccggccggcgggccatcctgagcctgtttgtgcagatcatccaggagctgtctgtgaacatggatgcccagatgagatttgtgcccctcatcctggcccggctgctgctgatctttgactacctgctgcaccagtacagcaaggcccctgtgtacctgtttgagcaggtgcagcacaacctgctgagccccccatttggctgggccagcggcagccaggacagcaacagcagaagagccaccacccccctgtaccacggcttcaaggaggtggaggagaactggagcaagcacttcagcagtgatgctgtgccccacccccgcttctactgtgtgctgagccctgaggcctctgaagatgacctgaaccggctggacagcgtggcctgtgatgtgctcttcagcaagctggtgaagtatgatgagctgtatgctgccctgacagccctgctggccgccggcagccagctggacacagtgcggaggaaagaaaacaagaatgtgacagccctggaggcctgtgccctgcagtactacttcctgatcctgtggaggatcctgggcatcctgccccccagcaagacctacatcaaccagctgtccatgaacagccctgagatgtctgaatgtgacatcctgcacaccctgcgctggagcagccggctgcgcatcagcagctatgtgaactggatcaaggaccacctgatcaagcagggcatgaaggccgagcacgccagcagcctgctggagctggccagcaccaccaagtgcagctctgtgaagtatgatgtggagatcgtggaggagtactttgcccggcagatcagcagcttctgcagcattgactgcaccaccatcctgcagctgcacgagatccccagcctgcagagcatctacaccctggatgctgccatcagcaaggtgcaggtgtccctggatgagcacttcagcaagatggctgctgagacagacccccacaagagcagcgagatcaccaagaacctgctgcctgccaccctgcagctgattgacacctacgccagcttcacccgggcctacctgctgcagaacttcaatgaggagggcaccacagagaagcccagcaaggagaagctgcagggctttgctgctgtgctggccatcggcagcagccgctgcaaggccaacaccctgggccccaccctggtgcagaacctgcccagctctgtgcagacagtgtgtgagagctggaacaacatcaacaccaatgagttccccaacatcggctcctggagaaatgcctttgccaatgacaccatccccagcgagagctacatctctgctgtgcaggccgcccacctgggcaccctgtgcagccagagcctgcccctggccgccagcctgaagcacaccctgctgagcctggtgcggctgactggagacctgattgtgtggagcgatgagatgaaccccccccaggtgatccgcaccctgctgcccctgctgctggagagcagcacagaatctgtggccgagatcagcagcaacagcctggagcgcatcctgggccctgctgagagtgatgagttcctggcccgggtgtatgagaagctgatcaccggctgctacaacatcctggccaaccacgccgaccccaacagcggcctggatgagagcatcctggaggagtgcctgcagtacctggagaagcagctggagagcagccaggccaggaaggccatggaggagttcttcagtgacagcggggagctggtgcagatcatgatggccacagccaatgaaaacctgagcgccaagttctgcaacagagtgctgaagttcttcaccaagctgttccagctgacagagaagagccccaaccccagcctgctgcacctgtgtggcagcctggcccagctggcctgtgtggagcctgtgcggctgcaggcctggctgaccaggatgaccaccagcccccccaaggacagcgaccagctggatgtgatccaggagaaccggcagctgctgcagctgctgaccacctacatcgtgcgggagaacagccaggtgggggagggcgtgtgtgctgtgctgctgggcaccctgacccccatggccacagagatgctggccaatggagatggcaccggcttccctgagctgatggtggtgatggccaccctggccagcgctggccagggcgccggccacctgcagctgcacaatgctgctgtggactggctgagccgctgcaagaagtacctgagccagaagaatgtggtggagaagctgaatgccaacgtgatgcacggcaagcacgtgatgatcctggagtgcacctgccacatcatgagctacctggctgatgtgaccaatgccctgagccagagcaatggccagggccccagccacctgtctgtggatggagaggagcgggccatcgaggtggacagcgactgggtggaggagctggccgtggaggaggaggacagccaggccgaggacagtgatgaggacagcctgtgcaacaagctgtgcaccttcaccatcacccagaaggagttcatgaaccagcactggtaccactgccacacctgcaagatggtggatggagtgggcgtgtgcaccgtgtgtgccaaggtgtgccacaaggaccacgagatctcctatgccaagtatggcagcttcttctgtgactgtggggccaaggaggatggcagctgcctggccctggtgaagaggacccccagcagcggcatgagcagcaccatgaaggagagcgccttccagagcgagccccgcatcagcgagagcctggtgagacatgccagcaccagcagccctgctgacaaggccaaggtgaccatcagtgatggcaaggtggctgatgaggagaagcccaagaagagcagcctgtgcaggacagtggagggctgccgggaggagctgcagaaccaggccaacttctcctttgcccccctggtgctggacatgctgaacttcctgatggatgccatccagaccaacttccagcaggccagcgctgtgggcagcagcagccgggcccagcaggccctgtctgagctgcacacagtggagaaggctgtggagatgacagaccagctgatggtgcccaccctgggcagccaggagggcgcctttgaaaatgtgaggatgaactacagcggggaccagggccagaccatccggcagctgatcagcgcccacgtgctgcggcgggtggccatgtgtgtgctgagcagcccccacggccggcggcagcacctggccgtgtcccatgagaagggcaagatcaccgtgctgcagctgagcgccctgctgaagcaggccgacagcagcaagaggaagctgaccctgacccggctggccagcgcccctgtgcccttcaccgtgctgagcctgaccggcaacccctgcaaggaggactacctggccgtgtgtggcctgaaggactgccacgtgctgaccttcagcagcagcggctctgtgtctgaccacctggtgctgcacccccagctggccaccggcaacttcatcatcaaggctgtgtggctgcccggcagccagacagagctggccatcgtgacagctgactttgtgaagatctatgacctgtgtgtggatgccctgagccccaccttctacttcctgctgcccagcagcaagatcagagatgtgaccttcctgttcaatgaggagggcaagaacatcatcgtcatcatgagcagcgctggctacatctacacccagctgatggaggaggccagcagcgcccagcagggccccttctacgtgaccaacgtgctggagatcaaccacgaggacctgaaggacagcaacagccaggtggccggcggcggcgtgtctgtgtactacagccacgtgctgcagatgctgttcttctcctactgccagggcaagagctttgctgccaccatcagcaggaccaccctggaggtgctgcagctgttccccatcaacatcaagagcagcaatggaggcagcaagaccagccctgccctgtgccagtggagcgaggtgatgaaccaccctggcctggtgtgctgcgtgcagcagaccaccggggtgcccctggtggtgatggtgaagccagacaccttcctgatccaggagatcaagaccctgcctgccaaggccaagatccaggacatggtggccatccgccacacagcctgcaatgagcagcagaggaccaccatgatcctgctgtgtgaagatggcagcctgcgcatctacatggccaacgtggagaacaccagctactggctgcagcccagcctgcagcccagcagcgtcatcagcatcatgaagcctgtgaggaagaggaagacagccaccatcaccaccaggaccagcagccaggtgaccttccccatcgacttctttgagcacaaccagcagctgacagatgtggagtttggaggaaatgacctgctgcaggtgtacaatgcccagcagatcaagcaccggctgaacagcacaggcatgtatgtggccaacaccaagccaggcggcttcaccatcgagatcagcaacaacaacagcaccatggtgatgacaggcatgaggatccagatcggcacccaggccatcgagcgggcccccagctacatcgagatctttggaagaaccatgcagctgaacctgagccgcagccgctggtttgacttccccttcacccgggaggaggccctgcaggccgacaagaagctgaacctcttcatcggggcctctgtggaccctgctggggtgaccatgattgatgctgtgaagatctacggcaagaccaaggagcagtttggctggccagatgagcccccagaggagttccccagcgcctctgtgagcaacatctgccccagcaacctgaaccagagcaatggaactggagacagcgacagcgctgcccccaccaccaccagcggcaccgtgctggagcggctggtggtgagcagcctggaggccctggagagctgctttgctgtgggccccatcatcgagaaggagaggaacaagaatgctgcccaggagctggccaccctgctgctgagcctgcctgccccagcctctgtgcagcagcagagcaagagcctgctggccagcctgcacaccagccgcagcgcctaccacagccacaaggaccaggccctgctgagcaaggctgtgcagtgcctgaacaccagcagcaaggagggcaaggacctggaccctgaggtgttccagaggctggtgatcacagcccggagcatcgccatcatgaggcccaacaacctggtgcacttcacagagagcaagctgccccagatggagacagactgcttcttcccccgctgtgcctgctggagcctgggcatcgtgggcatcctgattggagcccccctggagacccccagccctgagggcatggatgagggcaaggagccccagaagcagctggagggggactgctgcagcttcatcacccagctggtgaaccacttctggaagctgcacgccagcaagcccaagaatgccttcctggccccagcctgcctgcccggcctgacccacatcgaggccaccgtgaatgccctggtggacatcatccacggctactgcacctgtgagctggactgcatcaacacagccagcaagatctacatgcagatgctgctgtgcccagaccctgctgtgtccttcagctgcaagcaggccctgatccgggtgctgcggcccaggaacaagagaagacatgtgaccctgcccagcagccccaggagcaacacccccatgggagacaaggatgatgatgatgatgatgatgctgatgagaagatgcagagcagcggcatccccaacggcggccacatccggcaggagagccaggagcagagcgaggtggaccacggggactttgagatggtgtctgagagcatggtgctggagacagcagaaaatgtgaacaacggcaaccccagccccctggaggccctgctggccggggctgagggcttcccccccatgctggacatccccccagatgctgatgatgagaccatggtggagctggccatcgccctgagcctgcagcaggaccagcaggccccagccagtgatgatgagggcagcacagctgccacagatggcagcaccctgcggaccagccctgctgaccacggcggctctgtgggcagcgagagcggcggcagcgctgtggacagcgtggccggggagcacagcgtgtctggccgcagcagcgcctatggagatgccacagctgagggccaccctgctggccctggctctgtgagcagcagcactggagccatcagcaccaccaccggccaccaggagggagatggcagcgagggggagggggagggggagacagaaggagatgtgcacaccagcaaccggctgcacatggtgcggctgatgctgctggagcggctgctgcagaccctgccccagctgagaaatgtgggcggcgtgcgggccatcccctacatgcaggtgatcctgatgctgaccacagacctggatggagaagatgagaaggacaagggggccctggacaacctgctgagccagctgattgctgagctgggcatggacaagaaggatgtgtccaagaagaatgaaagaagtgccctgaatgaggtgcacctggtggtgatgaggctgctgtctgtgttcatgagcaggaccaagagcggcagcaagagcagcatctgtgagagcagcagcctcatcagcagcgccacagctgctgccctgctgagcagtggagctgtggactactgcctgcacgtgctgaagagcctgctggagtactggaagagccagcagaatgatgaggagcctgtggccaccagccagctgctgaagccccacaccaccagcagccccccagacatgagccccttcttcctgcggcagtatgtgaagggccacgccgcagatgtgtttgaggcctacacccagctgctgacagagatggtgctgcggctgccctaccagatcaagaagatcacagacaccaacagccgcatccccccacctgtgtttgaccacagctggttctacttcctgtctgagtacctgatgatccagcagaccccatttgtgcggcggcaggtgaggaagctgctgctcttcatctgtggcagcaaggagaagtaccggcagctgcgggacctgcacaccctggacagccacgtgcggggcatcaagaagctgctggaggagcagggcatcttcctgcgggcctctgtggtgacagccagcagcggcagcgccctgcagtatgacaccctcatcagcctgatggagcacctgaaggcctgtgccgagattgctgcccagaggaccatcaactggcagaagttctgcatcaaggatgacagcgtgctgtacttcctgctgcaggtgtccttcctggtggatgaaggagtgtcccctgtgctgctgcagctgctgagctgtgccctgtgtggcagcaaggtgctggccgccctggccgccagcagcggcagcagcagcgccagcagcagcagcgcccctgtggccgccagcagcggccaggccaccacccagagcaagagcagcaccaagaagagcaagaaggaggagaaggagaaggagaaggatggagagaccagcggcagccaggaggaccagctgtgcacagccctggtgaaccagctgaacaagtttgctgacaaggagaccctcatccagttcctgcgctgcttcctgctggagagcaacagcagctctgtgcgctggcaggcccactgcctgaccctgcacatctacagaaacagcagcaagagccagcaggagctgctgctggacctgatgtggagcatctggccagagctgcctgcctacggcaggaaggccgcccagtttgtggacctgctgggctacttcagcctgaagaccccccagacagagaagaagctgaaggagtacagccagaaggctgtggagatcctgcggacccagaaccacatcctgaccaaccaccccaacagcaacatctacaacaccctgagcggcctggtggagtttgatggctactacctggagagtgacccctgcctggtgtgcaacaaccctgaggtgcccttctgctacatcaagctgagcagcatcaaggtggacacccgctacaccaccacccagcaggtggtgaagctgattggcagccacaccatcagcaaggtgacagtgaagattggagacctgaagaggaccaagatggtgaggaccatcaacctgtactacaacaacagaacagtgcaggccatcgtggagctgaagaacaagccagcccgctggcacaaggccaagaaggtgcagctgaccccaggccagacagaggtgaagattgacctgcccctgcccatcgtggccagcaacctgatgattgaatttgctgacttctatgagaactaccaggccagcacagagaccctgcagtgcccccgctgcagcgcctctgtgcctgccaaccctggggtgtgtggcaactgtggggagaatgtgtaccagtgccacaagtgccgcagcatcaactatgatgagaaggaccccttcctgtgcaatgcctgtggcttctgcaagtatgccaggtttgacttcatgctgtatgccaagccctgctgtgctgtggaccccattgaaaatgaggaggacaggaagaaggctgtgagcaacatcaacaccctgctggacaaggctgacagagtgtaccaccagctgatgggccaccggccccagctggagaacctgctgtgcaaggtgaatgaagctgcccctgagaagccccaggatgacagcggcacagctgggggcatcagcagcaccagcgcctctgtgaaccgctacatcctgcagctggcccaggagtactgtggggactgcaagaacagctttgatgagctgagcaagatcatccagaaggtgtttgccagcaggaaggagctgctggagtatgacctgcagcagcgggaggccgccaccaagagcagcaggacctctgtgcagcccaccttcaccgccagccagtaccgggccctgtctgtgctgggctgcggccacaccagcagcaccaagtgctacggctgtgccagcgctgtgacagagcactgcatcaccctgctgcgggccctggccaccaacccagccctgcggcacatcctggtgtcccagggcctcatccgggagctgtttgactacaacctgcggagaggagctgctgccatgagggaggaggtgcggcagctgatgtgcctgctgacccgggacaaccctgaggccacccagcagatgaatgacctgatcatcggcaaggtgtccacagccctgaagggccactgggccaacccagacctggccagcagcctgcagtatgagatgctgctgctgacagacagcatcagcaaagaagacagctgctgggagctgcggctgcgctgtgccctgagcctcttcctgatggctgtgaacatcaagacccctgtggtggtggagaacatcaccctgatgtgcctgcgcatcctgcagaagctgatcaagcccccagcccccaccagcaagaagaacaaggatgtgcctgtggaggccctgaccaccgtgaagccctactgcaatgagatccacgcccaggcccagctgtggctgaagagggaccccaaggccagctatgatgcctggaagaagtgcctgcccatccggggcattgatggaaatggcaaggcccccagcaagtctgagctgcggcacctgtacctgacagagaagtatgtgtggcgctggaagcagttcctgagccggcggggcaagaggaccagccccctggacctgaagctgggccacaacaactggctgcggcaggtgctcttcaccccagccacccaggccgcccggcaggccgcctgcaccatcgtggaggccctggccaccatccccagcaggaagcagcaggtgctggacctgctgaccagctacctggatgagctgagcattgctggagaatgtgccgctgagtacctggccctgtaccagaagctgatcaccagcgcccactggaaggtgtacctggccgcccggggcgtgctgccctacgtgggcaacctgatcaccaaggagatcgcccggctgctggccctggaggaggccaccctgagcacagacctgcagcagggctacgccctgaagagcctgaccggcctgctgagcagctttgtggaggtggagagcatcaagaggcacttcaagagccggctggtgggcaccgtgctgaatggctacctgtgcctgaggaagctggtggtgcagaggaccaagctgattgatgagacccaggacatgctgctggagatgctggaggacatgaccactggaacagaaagtgagaccaaggccttcatggctgtgtgcattgaaacagccaagcgctacaacctggatgactaccgcacccctgtgttcatctttgagcggctgtgcagcatcatctacccagaggagaatgaggtgacagagttctttgtgaccctggagaaggacccccagcaggaggacttcctgcagggccgcatgcctggcaacccctacagcagcaatgagcccggcatcggccccctgatgagggacatcaagaacaagatctgccaggactgtgacctggtggccctgctggaggatgattctggcatggagctgctggtgaacaacaagatcatcagcctggacctgcctgtggccgaggtgtacaagaaggtgtggtgcaccaccaatgaaggagagcccatgagaattgtgtacaggatgaggggcctgctgggagatgccacagaggagttcatcgagagcctggacagcaccacagatgaggaggaggatgaggaggaggtgtacaagatggccggcgtgatggcccagtgtggcggcctggagtgcatgctgaaccggctggccggcatccgggacttcaagcagggccgccacctgctgactgtgctgctgaagctgttctcctactgtgtgaaggtgaaggtgaaccggcagcagctggtgaagctggagatgaacaccctgaatgtgatgctgggcaccctgaacctggccctggtggccgagcaggagagcaaggacagcggcggcgctgctgtggccgagcaggtgctgagcatcatggagatcatcctggatgagagcaatgctgagcccctgtctgaagataaaggaaacctgctgctgactggagacaaggaccagctggtgatgctgctggaccagatcaacagcacctttgtgcgcagcaaccccagcgtgctgcagggcctgctgcgcatcatcccctacctgagctttggagaggtggagaagatgcagatcctggtggagcgcttcaagccctactgcaactttgacaagtatgatgaggaccacagcggagatgacaaggtgttcctggactgcttctgcaagattgctgctggcatcaagaacaacagcaatggccaccagctgaaggacctgatcctgcagaagggcatcacccagaatgccctggactacatgaagaagcacatccccagcgccaagaacctggatgctgacatctggaagaagttcctgagcaggcctgccctgcccttcatcctgcggctgctgcggggcctggccatccagcaccctggcacccaggtgctgattggaacagacagcatccccaacctgcacaagctggagcaggtgtccagtgatgagggcatcggcaccctggccgagaacctgctggaggccctgcgggagcacccagatgtgaacaagaagattgatgctgcccggcgggagaccagggctgagaagaagaggatggccatggccatgaggcagaaggccctgggcaccctgggcatgaccaccaatgagaagggccaggtggtgaccaagacagccctgctgaagcagatggaggagctgattgaggagcccggcctgacctgctgcatctgccgggagggctacaagttccagcccaccaaggtgctgggcatctacaccttcaccaagagggtggccctggaggagatggagaacaagcccaggaagcagcagggctacagcacagtgagccacttcaacatcgtgcactatgactgccacctggccgctgtgcggctggcccggggccgggaggagtgggagagcgctgccctgcagaatgccaacaccaagtgcaatggcctgctgcctgtgtggggcccccacgtgcctgagagcgcctttgccacctgcctggcccggcacaacacctacctgcaggagtgcaccggccagcgggagcccacctaccagctgaacatccatgacatcaagctgctcttcctgcgctttgccatggagcagagcttctctgctgacacaggaggcggcggccgggagagcaacatccacctgatcccctacatcatccacacagtgctgtatgtgctgaacaccacccgggccaccagccgggaggagaagaacctgcagggcttcctggagcagcccaaggagaagtgggtggagagcgcctttgaggtggatggcccctactacttcaccgtgctggccctgcacatcctgcccccagagcagtggagggccaccagggtggagatcctgcggcggctgctggtgaccagccaggcccgggctgtggcccctgggggcgccacccggctgacagacaaggctgtgaaggactacagcgcctaccgcagcagcctgctcttctgggccctggtggacctgatctacaacatgttcaagaaggtgcccaccagcaacacagagggcggctggagctgcagcctggccgagtacatccgccacaatgacatgcccatctatgaggccgctgacaaggccctgaagaccttccaggaggagttcatgcctgtggagaccttcagcgagttcctggatgtggccggcctgctgtctgagatcacagatcctgagagcttcctgaaggacctgctgaacagcgtgccctag

SEQ ID NO: 337579 - DNA, 2955 bp, Artificial Sequence
  derived and/or modified sequence
gacttccccttcacccgggaggaggccctgcaggccgacaagaagctgaacctcttcatcggggcctctgtggaccctgctggggtgaccatgattgatgctgtgaagatctacggcaagaccaaggagcagtttggctggccagatgagcccccagaggagttccccagcgcctctgtgagcaacatctgccccagcaacctgaaccagagcaatggcaccggggacagcgacagcgctgcccccaccaccaccagcggcaccgtgctggagcggctggtggtgagcagcctggaggccctggagagctgctttgctgtgggccccatcatcgagaaggagaggaacaagaatgctgcccaggagctggccaccctgctgctgagcctgcctgccccagcctctgtgcagcagcagagcaagagcctgctggccagcctgcacaccagccgcagcgcctaccacagccacaaggaccaggccctgctgagcaaggctgtgcagtgcctgaacaccagcagcaaggagggcaaggacctggaccctgaggtgttccagaggctggtgatcacagcccggagcatcgccatcatgaggcccaacaacctggtgcacttcacagagagcaagctgccccagatggagacagactgcttcttcccccgctgtgcctgctggagcctgggcatcgtgggcatcctgattggagcccccctggagacccccagccctgagggcatggatgagggcaaggagccccagaagcagctggagggggactgctgcagcttcatcacccagctggtgaaccacttctggaagctgcacgccagcaagcccaagaatgccttcctggccccagcctgcctgcccggcctgacccacatcgaggccaccgtgaatgccctggtggacatcatccacggctactgcacctgtgagctggactgcatcaacacagccagcaagatctacatgcagatgctgctgtgcccagaccctgctgtgtccttcagctgcaagcaggccctgatccgggtgctgcggcccaggaacaagagaagacatgtgaccctgcccagcagccccaggagcaacacccccatgggagacaaggatgatgatgatgatgatgatgctgatgagaagatgcagagcagcggcatccccaatggaggccacatccggcaggagagccaggagcagagcgaggtggaccatggagactttgagatggtgtctgagagcatggtgctggagacagcagaaaatgtgaacaatggaaaccccagccccctggaggccctgctggccggggctgagggcttcccccccatgctggacatccccccagatgctgatgatgagaccatggtggagctggccatcgccctgagcctgcagcaggaccagcaggccccagccagtgatgatgagggcagcacagctgccacagatggcagcaccctgcggaccagccctgctgaccatggaggctctgtgggcagcgagagcggcggcagcgctgtggacagcgtggccggggagcacagcgtgtctggccgcagcagcgcctatggagatgccacagctgagggccaccctgctggccctggctctgtgagcagcagcactggagccatcagcaccaccaccggccaccaggagggagatggcagcgagggggagggggagggggagacagaaggagatgtgcacaccagcaaccggctgcacatggtgcggctgatgctgctggagcggctgctgcagaccctgccccagctgagaaatgtgggcggcgtgcgggccatcccctacatgcaggtgatcctgatgctgaccacagacctggatggagaagatgagaaggacaagggggccctggacaacctgctgagccagctgattgctgagctgggcatggacaagaaggatgtgtccaagaagaatgaaagaagtgccctgaatgaggtgcacctggtggtgatgaggctgctgagcgtcttcatgagcaggaccaagagcggcagcaagagcagcatctgtgagagcagcagcctcatcagcagcgccacagctgctgccctgctgagcagcggggctgtggactactgcctgcacgtgctgaagagcctgctggagtactggaagagccagcagaatgatgaggagcctgtggccaccagccagctgctgaagccccacaccaccagcagccccccagacatgagccccttcttcctgcggcagtatgtgaagggccatgctgctgatgtgtttgaggcctacacccagctgctgacagagatggtgctgcggctgccctaccagatcaagaagatcacagacaccaacagccgcatccccccacctgtgtttgaccacagctggttctacttcctgtctgagtacctgatgatccagcagaccccatttgtgcggcggcaggtgaggaagctgctgctcttcatctgtggcagcaaggagaagtaccggcagctgcgggacctgcacaccctggacagccacgtgcggggcatcaagaagctgctggaggagcagggcatcttcctgcgggcctctgtggtgacagccagcagcggcagcgccctgcagtatgacaccctcatcagcctgatggagcacctgaaggcctgtgccgagattgctgcccagaggaccatcaactggcagaagttctgcatcaaggatgattctgtgctgtacttcctgctgcaggtgtccttcctggtggatgagggcgtgtcccctgtgctgctgcagctgctgagctgtgccctgtgtggcagcaaggtgctggccgccctggccgccagcagcggcagcagcagcgccagcagcagcagcgcccctgtggccgccagcagcggccaggccaccacccagagcaagagcagcaccaagaagagcaagaaggaggagaaggagtag

SEQ ID NO: 337580 - DNA, 15531 bp, Artificial Sequence
  derived and/or modified sequence
atggccaccagcggcggcgaggaggccgccgccgccgcccccgcccccggcactcccgccaccggcgcagacacaacacccggatgggaagttgcagtccgccccctgctgagcgcctcttattccgcatttgaaatgaaagagttgcctcagttggttgcctctgttatagaaagtgagtctgagattcttcatcacgaaaaacagtacgagcctttttactcgagctttgtggcactgagtacccactatataaccaccgtgtgttcactcattccacgaaaccaactgcagagtgtcgccgccgcatgtaaggtcttgatcgagttttctctcctccgactagaaaaccccgatgaggcgtgcgccgtgtcgcagaagcacctgatcttactgatcaagggtctgtgtacaggatgttctagactggaccggaccgagatcattaccttcactgcaatgatgaaatcagcaaaactgccccaaaccgtgaaaactttgtcagacgttgaggaccagaaggagctggcgtcacctgtgtcaccagagttgagacaaaaggaagttcagatgaattttctgaaccagcttacatcagtgtttaaccctcgaaccgtggctagccagcctatctcgacacagaccctggtcgagggtgagaacgacgagcagagctccaccgaccaggcctctgctattaagacaaagaacgtattcatagctcagaatgtggcttctctacaagagctcggcggttcagagaagctcctgagagtctgtcttaacttgccatattttttacgctacattaatcggttccaagatgcagtgctcgcaaactcatttttcattatgcctgccaccgtcgccgatgccaccgccgtaaggaatggatttcattctctcgtgatcgatgtcacaatggcgctggacactctgtccctgcctgttctggaacccttaaacccttctcgcctgcaagacgtcactgtcttgtcgttgtcctgcctgtatgcaggcgtcagtgtcgccacttgtatggccattctgcacgtgggttcagcccaacaggtgcgaaccggttccactagttcaaaggaagacgattatgagtctgatgccgctacaattgtccagaagtgtctagagatctatgatatgattgggcaggcaatttctagttcccgacgggccggaggagagcattatcaaaatttccagttactgggcgcatggtgcctcctcaacagcctgtttttgatcctaaatttatcaccgacagccctcgccgataagggcaaagagaaggaccctctggccgctctgcgtgtgcgggacattcttagtagaaccaaagaaggggtcgggtcccctaagttggggcctggaaaaggtcatcagggcttcggagtcttgtctgttattctggctaaccacgccatcaagctcctgacaagcttgtttcaagacctgcaagtagaggccctgcacaaagggtgggagacagacggccctcctgccgctcttagcataatggcacagtccactagcatccaacgtatccagagactgatagactctgtgcccctaatgaaccttttgctgacccttctctcaacttcgtataggaaagcctgcgtcctgcaacgccagagaaaaggtagtatgagtagcgacgccagcgcatctaccgattccaacacatactacgaggatgactttagctcaaccgaagaggatagcagtcaggacgatgactcggagccaattctcggacagtggtttgaggagactatttctccatcaaaagaaaaggctgcccccccacctccacctccgccgccgccactggagtcctcaccgagggtgaagagcccatcgaaacaggctccaggcgaaaaggggaacatcctggcaagccgcaaggatcctgagttgttcttaggcttggccagcaacatattaaactttatcacatctagtatgctcaacagccgtaataactttattaggaattacttatccgtgagtctctccgagcaccatatggctacactggctagcatcattaaggaggttgataaggatgggttaaagggatcaagtgatgaagaatttgccgctgccttgtatcattttaatcactcgttggtgacctcagatcttcagtcaccaaatctccagaataccctgctgcagcaacttggagttgctcccttttccgagggcccttggccactgtatattcaccctcagagtcttagcgtactgtcaagacttcttctgatctggcagcataaagcatccgcccagggcgaccccgatgtccctgagtgtctgaaggtgtgggacagattcctgagcactatgaagcaaaacgctttgcaaggtgtcgttccttcagagacggaggatctgaatgtcgagcatctccagatgcttctacttatattccataacttcaccgaaactggccgtagggccatactaagcctgtttgtgcagattatccaggagttaagcgtcaatatggacgctcaaatgcgctttgtgcctctgatactggctagactgcttctgatcttcgactatctgctacaccagtatagtaaggccccagtttacctctttgagcaagtccagcataatctgctgagcccaccctttggatgggcaagcggttctcaggacagtaacagtcgcagggccaccactcctctataccacggattcaaggaggttgaggaaaactggtccaaacacttcagcagcgacgccgtcccacacccgagattttattgcgtactgtctccggaagcctctgaggacgatttgaatcggctcgactcagttgcgtgcgacgtgctgttttcaaaacttgtgaagtatgatgaactttacgctgctctgacagctctgctggctgccggatcacaattggacacagtgcgccgtaaagagaacaagaatgttacagccttggaagcctgtgccttacaatactactttttgatcctgtggcggattctcggtatccttcccccatcaaaaacatacatcaatcagctcagcatgaactccccggagatgtcggaatgcgatattctgcacacgctaagatggagctctcggcttagaatttccagttatgtgaactggataaaggaccacctcattaagcaaggtatgaaggcagaacatgcgagttctctattagagctggcctcgactactaagtgtagcagcgttaaatatgatgtcgagatcgtggaggagtacttcgccagacagatctcgagtttctgtagcatcgactgcacaaccatcctccaactccatgaaattccgagtctgcagtccatttataccctggacgctgcaatctcaaaagttcaggtctcattggacgaacacttctctaagatggctgcagaaaccgacccacacaaaagctccgagatcacaaaaaaccttctgcccgccactctgcagcttattgatacatatgcgtcattcactagggcgtacttgctgcaaaacttcaatgaggaggggaccaccgaaaaaccatctaaggagaaacttcaagggttcgcagcagtgctagcgataggcagttccagatgtaaggctaacactctcgggcccaccttggttcaaaacctgccatcttcagtgcagacggtttgtgaaagctggaataacattaacaccaacgagttcccaaacatcggctcttggcggaatgccttcgcgaacgatactatcccatccgagtcctatataagtgccgtgcaggctgctcatctcggcacactttgcagccagagcctacctttggcagcttcacttaaacataccctgttgagcctagttcgcctgaccggggatttgattgtctggtctgatgaaatgaacccgccccaggtgatacggacacttctaccgttacttttggagagtagtacggaatctgtggcggagatctctagcaatagcctggaaagaattctggggcctgcggagtctgacgagtttctggcccgtgtttatgagaaactgattaccggctgttacaatatcctggccaatcacgccgaccctaactccggcctcgacgagtccatactggaggagtgtctgcagtacctggagaaacagctggaaagttcccaggctcggaaagctatggaggagtttttctccgactcaggcgagcttgtgcagatcatgatggcaactgccaatgagaatctctctgccaagttctgcaatagggtcctcaagttctttacaaaactcttccaactgactgaaaaaagccccaaccccagtctactccatctttgcggcagcttggctcaacttgcctgtgtggaaccagtccgtttgcaggcctggctcacacgtatgactaccagcccgccaaaagacagcgaccaactggacgttatccaggaaaaccggcaattgctacagctgctcactacatatattgtgagagaaaattcccaggtgggagagggagtgtgtgcagtactactgggaaccttaacccccatggccactgagatgttggccaacggagacggcaccggttttccagagctgatggtggtcatggctaccctggcatccgccggccaaggcgccgggcacctgcagctgcataatgcagcagtggactggctgagtcggtgcaagaagtacctgtcccagaagaatgtggttgagaagctgaacgcaaacgtgatgcatggaaagcacgtgatgatactcgagtgtacttgccacatcatgagctacctcgcagacgtaactaacgcactctctcaatctaatgggcagggtccctctcacctcagcgtcgacggcgaggaacgtgctattgaagtggattccgattgggtcgaagaactcgccgttgaagaggaagacagccaggcagaggactcggatgaggatagtctctgtaataaattatgcacttttaccattacccagaaagaattcatgaatcagcactggtaccattgccacacttgtaaaatggtggacggggtcggggtgtgcacagtgtgcgcaaaagtatgccataaagatcatgagatctcatacgctaaatatggctccttcttctgtgactgcggggctaaagaggatgggagctgtcttgctctggttaagcgcacaccaagcagcggaatgagctcgactatgaaagaatcagcctttcagagcgaaccaagaatcagcgagagcttggtgcggcatgcctctacgagtagtcccgccgacaaggctaaagtcactatcagcgacggcaaagtagcggacgaggagaagccaaagaagtccagtctatgtcggacagtggaggggtgtagggaggagctgcagaaccaggctaacttttccttcgcccccctcgtcctagatatgctgaactttttgatggatgctatacagacgaacttccaacaggcaagtgcagtcgggagtagttctagggcacagcaggcactgtctgaactacataccgtagagaaggccgtcgaaatgaccgatcaactgatggtgcccactctcggtagccaggaaggtgcctttgaaaacgtacgcatgaattattcaggcgaccagggtcagactattaggcagttgatctctgctcacgtccttcgacgagttgccatgtgtgtgctaagcagccctcatggtcggcggcagcacctcgcggtgtcacacgagaaggggaaaataactgtattgcagctgagtgcactgctcaagcaggcagattctagcaagagaaagttaaccctgacacgcctggcttcagcccccgtcccgttcactgtgttgagcctgaccgggaacccttgtaaggaagattacctcgcagtgtgcggtctcaaagattgtcacgtcctaacgttcagttcgagcggcagtgtctccgatcatctggtactacatccacagctagccaccggaaatttcataatcaaggctgtctggctgccgggaagtcagacagagctggctatcgtaactgccgattttgtcaagatttatgacctgtgtgtggacgcattgagccccacgttttactttctactgccgtccagcaaaattcgcgatgttacgttcctctttaacgaggaagggaagaacataatagtgatcatgagcagcgccggatacatttatacccagctgatggaggaagccagcagcgcacaacagggcccgttctatgtaacaaatgtgctcgagataaaccatgaagacctgaaagatagtaattcccaagtggcaggtggcggcgtgagcgtgtactactcacacgtgcttcaaatgctgttctttagttactgtcagggaaaatccttcgctgctaccatttccagaacgaccctagaagtcctgcagttgttcccaataaacataaagtcatccaatggcggtagcaagacaagccctgccttgtgtcagtggtctgaggtaatgaatcatcccggtttagtctgctgcgtgcagcagaccactggggtccctctggtggttatggttaaaccggacaccttcctgatccaagaaatcaaaactctgcccgcgaaagccaaaatacaggatatggtagcaatcagacacaccgcttgcaatgaacaacaacgcacgacgatgatcctcctttgcgaagatggcagcctgcgcatctacatggctaacgtggaaaacacatcttattggctgcagccatcactgcagcctagctcagtcatcagtataatgaaacctgttcgcaaaaggaaaactgctactattaccacaagaacttccagccaggtgacattccccattgacttttttgaacacaatcagcagctgacggatgttgagttcggcggcaatgatctgctgcaggtgtacaatgcacagcagatcaagcaccggctgaactctaccgggatgtacgtggctaacactaaaccaggggggtttacgatcgaaatatccaataataattccacaatggtgatgacaggcatgaggattcagataggtactcaggccatcgaaagagcgccttcgtacatcgagatctttggtagaacaatgcagctgaaccttagtaggtctagatggttcgacttccccttcaccagggaggaagctcttcaggctgacaagaaacttaacctttttatcggtgcttccgtggatcctgccggggtgaccatgatcgatgctgtgaagatctatggcaagacgaaggagcagtttggatggcctgacgagccgcccgaggagtttcccagcgcgtcagtttcaaacatttgccccagcaaccttaatcaatctaatgggacaggcgacagtgactccgcggctcctaccactacttcgggcactgtgctggaacgactggtagtgagctctctagaggcacttgagtcttgtttcgctgtgggtccgattattgagaaggagcggaacaagaacgctgcacaagagctcgctactctgttactgagcctgccggccccggcgagcgttcaacagcagagtaagagcctgttagcatccttgcatacctcccgtagcgcctatcattcgcacaaggaccaggcactgctgtccaaagcggtgcagtgtcttaatacaagttccaaggaggggaaggatctcgatcctgaagtgttccagcggctggtgattacagctcggagtatcgcaattatgcgccctaacaatctcgtgcatttcaccgagagcaaattaccccaaatggagaccgattgtttcttcccccggtgcgcgtgttggtctctcggcatagtggggatattaatcggagcacctctggaaactcctagcccagagggcatggacgaaggaaaggagccccagaagcaactggaaggagactgctgctcttttatcacacagctggtgaaccacttctggaagctgcatgcctctaagcccaaaaatgcttttttggcaccagcctgtctccccggtcttacccacattgaagccacagtgaacgccctggtggacatcatccacggatactgcacatgcgagttggactgtatcaatactgcatcaaaaatctacatgcagatgttactctgtcctgaccccgcagttagtttttcctgcaagcaggccctaatcagggtcctccgtcctcgtaacaaaagacggcatgtgacgctgccatccagtccccgctcaaacacgcctatgggcgacaaagatgatgatgatgacgatgacgcggatgagaagatgcagtcttccggcatccctaatggtgggcacatccggcaggagtctcaggaacagagtgaagtggaccatggagattttgaaatggtctctgagtccatggtcctagaaactgccgaaaatgtgaataatggcaacccctccccgttagaagctctactagctggagctgaaggatttcctccaatgctcgatatccctcccgacgccgatgatgagaccatggtggaactggctatagctctgtcacttcaacaggatcagcaggcccccgcttctgacgacgagggatccaccgcggctaccgacggatctacattacgcacatcccccgccgatcatgggggaagcgtgggtagcgagtcaggaggttccgcagttgacagcgtcgccggtgagcactccgtgagtggaagaagttccgcctacggtgacgcaactgccgagggacatcccgccggcccgggctcggtaagctcatccacgggggccatatccaccacaacaggccatcaggagggcgacgggagtgaaggggaaggagaaggggaaaccgagggcgatgtgcacacctccaaccggctgcacatggtcagactcatgttattggaaagattattgcaaactctgccacagctgcgcaatgtgggaggcgtccgggcgatcccttatatgcaggtcattctgatgcttacgacagacctcgatggagaggacgaaaaagataagggggctctggacaacctgctctcccagcttattgccgaactcggcatggacaagaaagacgtctccaagaagaacgagcggtcagccctaaacgaagtgcacctggtggtgatgcgcctgttaagcgttttcatgtcacggaccaaatcaggttcgaaatcctccatatgtgagagttcctctcttatctcttccgccactgctgctgccctcctgtcttcaggagcagtcgactattgtttacatgttcttaaatctttgttagagtattggaagtctcaacagaacgatgaggagcccgtcgctactagtcagttgctgaaacctcacaccacatctagccctcccgacatgagtccattctttttgaggcagtatgtgaaaggccacgctgccgatgtcttcgaagcttatactcagttgctcacagagatggtgctgagattaccctaccagattaagaaaattacggacacaaattctaggatcccgccacctgtgtttgatcattcatggttctacttcttatcagagtatctcatgattcagcagacaccttttgtcagaagacaggtccgcaagctgctcctgttcatctgcgggagcaaggaaaaataccgacagcttcgcgatctgcacacgttggatagtcacgtgagaggcattaagaagttacttgaggaacaagggatttttctccgggcaagcgtggtgactgcatcctcgggatccgcattacagtacgacacacttatcagcctgatggaacatcttaaggcttgtgctgagatagccgcacaacgaactattaactggcaaaagttttgcattaaggacgacagcgtgctgtattttctgctacaagtcagtttcctggtggatgagggagtgtcacccgttctgctgcaattacttagctgtgcactttgtggatcaaaagtcctggcagcccttgccgcgtctagtggcagttccagtgcaagttccagttcagctccagtcgcagcaagtagtgggcaggcgactacacagagtaaaagcagtaccaagaagtccaagaaggaggagaaggagaaggagaaagacggagagacgtctgggtctcaggaggaccaattgtgtactgctcttgtcaatcagctgaacaagtttgcggataaggaaaccctgatccagtttttgcgatgttttctgttagagtccaacagttcctcggtgcgatggcaagcccactgcctgaccttacacatctaccggaatagctctaagtcgcagcaagagctgttgttggatctgatgtggagcatttggcccgagctgcccgcctatggaaggaaggcagctcagtttgtagatctgctggggtactttagcctgaagacccctcagacagagaaaaagctgaaagagtactcccagaaagctgtggaaattctaagaacccagaaccacatcctaaccaaccaccctaattccaatatttataataccctttctgggctggttgagtttgacggctactatctggaatccgacccctgccttgtctgcaacaaccctgaagtgccattctgttacattaagctgagctctatcaaggttgatactcgatatacaacaacgcagcaagttgtcaaactcatcggcagccacaccatctcgaaggtaaccgtaaagattggagatctgaagaggactaagatggtgcgcactattaatctttattataataaccggacagtgcaggctattgtcgaactgaagaacaagcccgccagatggcataaggccaaaaaggttcagctcacccctggccagacagaggtcaaaatcgacttgcccctcccaattgtggctagtaacctcatgatagagttcgcagatttctacgagaattaccaagcctccaccgagacattacaatgccccaggtgctccgcttcggtcccagctaaccccggcgtctgtggtaactgtggggaaaatgtgtatcaatgtcataaatgtcggagcatcaattatgacgagaaggatccgttcctttgcaatgcgtgcggattctgtaagtatgcacgtttcgactttatgttatacgcaaagccgtgctgcgcagtggacccaattgagaatgaggaagaccgcaagaaggcagtttccaatattaataccctgctagataaagccgatcgggtttaccaccagctcatgggccatagaccgcagctggaaaacctgctctgtaaggtgaacgaggctgcgccggaaaagcctcaggacgactccggaactgccggtgggatctcgtccacatccgcttcagtgaaccgctacattctccaactggctcaggagtattgcggagattgtaaaaactcatttgacgaattaagtaagattatacagaaggtctttgcatctagaaaggagcttttggaatatgacttgcagcagcgtgaggcggctacgaaatcttcccggacttctgtgcagccaacatttaccgcgagccaatacagagccctgagcgtactagggtgcggtcacacttcctctactaagtgctatggctgcgcctccgctgttaccgaacattgcattaccctgctaagggctttggcgactaacccagcccttaggcatattctcgtgagtcagggactgatcagggagttgtttgattacaatctgcgacggggcgccgctgctatgcgagaggaagtgcgccagctgatgtgcctgctgacacgggacaaccccgaggctacacagcagatgaatgatcttattatcggcaaggtctctaccgccttgaaggggcactgggccaaccccgacctggcctcaagccttcaatacgaaatgcttctcttgacggattcgatttctaaagaggattcctgttgggagctgagattaagatgcgccttgtcgctgtttttgatggccgttaacattaagactcccgtggtggtggagaacatcacgctgatgtgcctgagaatcctgcagaaacttataaagccgccggctcctacatctaaaaagaataaggacgtcccagtggaagccctcaccacggtgaaaccctactgtaacgagatccatgcgcaagcccagctttggctcaaaagagatccaaaagcatcctacgatgcctggaagaaatgcctcccaatcagggggatcgatggtaatggaaaggcccccagtaaatcggagctgagacatctgtatctgaccgaaaaatacgtttggcgctggaagcaatttctttctagacgaggtaaacgtacaagcccattggatctgaaactcggacacaacaattggctgcgccaagtactttttacacctgccactcaagctgcccgtcaggccgcctgcactattgtggaggcattagcgactataccttccagaaaacagcaggttctggatctattgacgtcttacctggatgaattgtccatagccggggagtgtgccgccgaatacctggccctgtaccagaaactcataacttctgctcattggaaagtctacctggcagcacggggagtcttaccatacgtaggcaaccttatcactaaagagatcgccaggctcctggctctcgaggaggccaccctcagtacagatctgcagcaggggtacgccctcaagtcactaaccgggctcctgagttcattcgtggaagttgaaagcataaagcgacacttcaaatcccggctcgtcggcacagtgcttaacggttatctgtgtctccgtaaattagttgtgcaacgcactaaactgatcgacgagacgcaagacatgctgctcgaaatgttggaagacatgactactggaactgaatccgagaccaaggcttttatggctgtatgcatagaaacggccaagagatacaatctcgacgactaccgaacccccgttttcattttcgaaaggctgtgtagcattatctaccctgaggaaaatgaggttaccgaattctttgtgaccctcgaaaaggaccctcagcaagaagacttcctgcagggcaggatgccggggaacccgtacagctccaatgagccggggataggaccgttaatgagagacatcaagaataagatctgccaggactgtgatctggtagcacttctggaggacgacagcgggatggagctgttagtcaacaataaaatcatttctctagacctgccagtagcagaagtgtataagaaggtatggtgtacaaccaacgaaggggaaccaatgagaatagtgtataggatgagagggctcctgggcgacgccaccgaagagtttattgagtccttggacagcaccactgacgaggaggaagatgaagaagaggtgtataagatggcaggagtcatggcacagtgtggtggcctcgagtgcatgcttaacaggttggccggcatcagggactttaagcagggccgccacctgctgacagtgctcctcaagctcttttcctactgtgtgaaagttaaagtgaacagacagcaattggttaagctggaaatgaacacgctgaatgtcatgttggggactttgaatctagcactggtggcagaacaggagagtaaggacagtggtggggctgccgtggctgagcaggtactgagtataatggagatcattttggatgagtctaacgccgagccactgtccgaggataaaggaaatttgctgctgaccggagataaagaccagctggtaatgctgctcgaccaaataaattcaacctttgtgagaagcaacccatctgttttgcagggattgcttaggattattccatatctgagtttcggtgaggtggagaagatgcagattctggtcgaaagatttaaaccttattgcaacttcgataaatatgatgaggaccactcaggggatgacaaagtcttcttggattgtttctgtaaaatcgcagcaggcattaaaaataactctaatggccaccagctgaaggacttgattttacaaaagggcatcacccagaacgcattggactatatgaaaaagcacattccttccgccaagaatctagatgccgacatttggaaaaaattcctatcacggccggcactgccatttatattgcgtctcttacgtggcctggccattcagcatcctggtactcaagttctaattggcacggactctatcccgaatctccacaaacttgagcaagttagcagcgatgaagggattggcaccctcgccgagaatcttctggaggcactcagggaacatcctgatgtgaataagaagattgatgccgccagacgggaaacccgggctgagaagaagagaatggctatggccatgcgacagaaagctttagggaccctggggatgaccactaatgaaaaaggacaggtggtgacgaagacagcgctcttgaagcaaatggaagaactgatagaagaacccggcctaacctgctgtatctgtagggagggttataagtttcagcccaccaaagtgcttggaatttatacctttaccaagagagtcgcgttggaggaaatggaaaataagccacgcaaacaacagggctactccacagtctcccattttaacatcgttcattatgactgccatttagcggctgtgcgactggcccggggaagggaggagtgggagtccgcagcccttcagaacgccaataccaagtgcaacggtcttttgccagtctggggcccccatgtgcccgaatcagctttcgccacatgtctggcccgccataatacatacctgcaagaatgtacggggcagcgcgagcctacctatcagctgaacattcacgacattaagttgctctttttgcggttcgccatggagcagagcttctccgctgatacgggagggggaggacgcgaatctaatattcacctgatcccttatatcattcataccgttctttacgtcctgaacacgacacgggccacttcccgagaggagaagaacctgcagggcttcctcgagcagccaaaggagaagtgggtagagtcagccttcgaggtcgacggcccatattatttcacagtgctggccctgcacattctcccacccgagcagtggagggcaactcgagtggaaattttgcgtagactgttagtgaccagccaagcccgggcagtcgctcccgggggcgctacccgcctaacagacaaggctgtgaaggactacagcgcctataggtcatcactattgttctgggccctggtagacctgatttataacatgttcaagaaagtgcccacatctaatacagaaggcggatggtcttgtagcttggcagaatatattaggcataacgacatgcccatctatgaagccgccgacaaagccctgaaaactttccaggaagaattcatgcctgtggaaacattctctgaatttctggatgtggctggacttctaagtgagatcacggaccccgaatccttcttgaaagacctcctgaactctgtcccctag

SEQ ID NO: 337581 - DNA, 2955 bp, Artificial Sequence
  derived and/or modified sequence
gacttccccttcacccgggaggaggccctgcaggccgacaagaagttgaacctgtttatcggggcctctgttgaccctgccggagtgactatgattgatgccgtgaagatttatgggaagacaaaagagcagttcgggtggccggatgagcccccggaggaattccctagcgcaagcgtatctaatatctgcccctcaaatcttaaccagtccaatggcactggtgattctgactctgctgcacccaccacaacgtctgggactgtcctggagcgcttagtggttagttcattggaagctttggaaagctgttttgccgtgggacctatcatcgagaaggaaagaaacaagaatgccgcacaggaactggcaactcttctgctgagtcttccggctccagccagtgtgcagcagcagagcaagtccctgctcgccagccttcacacgagcagaagtgcctaccattcgcataaggatcaagctctcctgtctaaggccgtccaatgccttaatacaagctcaaaagaaggcaaagacttggatccagaggtcttccaacgactggtcataactgccaggagtattgctattatgaggcccaacaacttggtgcacttcacagaaagcaagctgcctcaaatggagactgattgcttttttcccagatgcgcctgctggtccctaggaattgtgggcattctgattggggcgccattggagactccctctcccgaaggcatggatgagggaaaagagccccaaaaacagctggagggcgattgttgctcttttattacccagctggttaaccatttctggaagctgcacgcgagtaagcctaagaacgcctttctggcccccgcctgccttccaggcttaacacatattgaagctactgtgaacgcactggttgatataattcatgggtattgcacatgcgagcttgattgcattaacaccgcaagcaagatctacatgcaaatgctgctttgccctgacccagcagtgtccttcagctgcaagcaagctctcataagggtgcttcggcctcgcaacaaaaggcgccacgtgactttgccgagtagtccccgatccaatactccaatgggcgacaaagacgacgatgatgacgacgacgccgatgaaaaaatgcagagctccggcattccgaacggcggccatataagacaagagtcacaggagcagagtgaggtagaccatggagatttcgagatggtgtcagaatccatggtgctcgaaacagccgagaatgtgaacaacggaaacccaagtcctctggaagcactgctagctggagcagaaggcttcccccccatgctggatattcctccggacgcggatgacgagacaatggtagagcttgccatcgcactgagcctgcaacaggaccagcaggccccagccagcgacgacgaaggatccacagccgcaaccgatggaagcactctgagaacctctcccgccgatcacggggggtctgtaggttcagagtcggggggatccgctgtggactccgtggctggggaacacagtgtgagcgggcggtcttctgcatacggagatgcaacagctgaggggcacccggccggtcctggatcggtatcttcttccacaggcgcaatatccaccaccacagggcaccaagaaggcgacggctccgagggcgagggcgagggggaaaccgagggggatgtacatacctccaatagactgcacatggtcagactgatgcttctggaacggctgctgcagacacttccacagctccgtaatgtcggtggggtgcgcgccatcccctatatgcaggtcattctcatgctgacaaccgatctggatggcgaagatgaaaaggacaaaggggccctggacaacctgttaagccagctaatagctgagctggggatggacaagaaggatgtctctaagaagaatgaaagaagtgctcttaacgaggtgcatctcgtagtgatgaggttgctttccgtgtttatgagcagaactaaatccggctccaaatcaagcatctgtgagtcttcctcattgataagctctgccactgctgccgccctgctcagctccggagccgtggactattgtctacacgtactcaaatctctactggaatattggaaaagtcagcagaatgatgaagagcctgtcgccactagtcaactcttgaagccccatactacctccagcccacctgacatgagccctttcttcttgcgccaatacgttaagggtcacgccgctgatgtctttgaggcctacacacagctgctgacggagatggtgctccgcctgccttatcagataaagaaaattaccgatacaaactctaggatccctccgcctgtctttgatcacagttggttctattttctgtccgagtatcttatgattcagcagaccccgtttgtgcgccggcaggttcgtaagctccttctcttcatttgcggctccaaagagaagtatcgacagctgcgggacctgcacacactcgatagccacgttagaggaatcaagaaacttctggaggaacagggcattttcctgcgggctagtgtcgtaacagcatcaagtggctccgcgctgcagtatgataccttgatttcattgatggaacatctgaaagcttgtgcggagattgccgctcagcgtacaattaattggcagaagttttgcataaaagacgactccgtactatacttcctcctccaggtgagttttctcgttgacgaaggcgtcagcccagtccttttgcagctcctctcgtgcgccctatgcggctctaaggtgcttgctgccctggccgcgagctccgggagttcaagcgcaagtagcagctcagcaccagtggctgcgtcctcaggccaggccacaacacagtctaagtcttccacgaagaagtccaaaaaggaagaaaaagagtag

SEQ ID NO: 337582 - DNA, 15531 bp, Artificial Sequence
  derived and/or modified sequence
atggctaccagcggtggggaggaggcagcggctgccgctcccgctccagggacccctgccacgggcgcagacactacccccggttgggaagtcgccgtacggcctctactgagtgcttcttactctgcattcgaaatgaaagagctgccgcagctggtcgcttccgttattgaatccgaaagcgaaatcctgcaccacgagaagcaatacgagcccttttattcctcttttgtggccctgagcacccactacatcactactgtgtgctccctgattccgcgaaatcagctccagtccgtggccgctgcgtgcaaagtgctaatagagtttagcctgctgaggcttgaaaatcctgatgaagcgtgcgcagtgagccaaaaacaccttatcctcctcatcaagggtctgtgtacgggctgctcgcgcctggaccgaactgagattattacatttactgcaatgatgaagagcgcaaagctcccacagaccgtcaagaccctcagcgacgtcgaggaccagaaggagctcgcctctcctgttagcccggagctgcggcagaaggaggtgcagatgaacttcctgaatcagctgacctctgtgttcaatcccagaactgtggcctcgcagcctatttcaactcagacactggtggagggcgaaaacgatgagcaatcatccaccgatcaagccagtgctattaaaacgaaaaacgtgttcattgcacagaatgtcgctagcctgcaggaactgggtggttcagaaaaactgctgagagtctgtcttaacctgccatactttctgaggtacatcaaccggttccaggacgcagtcctggctaacagcttctttatcatgcctgccacggttgcagacgcaacggccgtgcgtaatgggttccactctctggtgattgacgtcacaatggctctcgatacactgagccttccagtattggagcctctgaatcccagcagacttcaagacgttaccgtgctgtccctttcctgcttgtatgccggtgtgagcgtggctacgtgtatggccattctccacgtgggttctgcccaacaggtcagaactggctcaactagctccaaagaggacgattacgagagtgacgctgcaacaatcgtccagaaatgtttggagatttatgatatgattggccaggcgatatcctcttctagacgcgctggaggtgagcactaccagaactttcagctcctgggcgcatggtgcctcctgaacagcctgttcctgattctcaacctatcacccaccgcgctcgctgacaaggggaaggaaaaggacccactggcggcattacgggtgcgagatatcctcagtcgaaccaaggagggcgtcgggtcacccaagcttggcccaggaaagggccatcagggatttggagtcttgtctgtgatcctcgctaatcacgccattaagttacttacttcattgttccaggacctgcaggtggaggcgctccacaaggggtgggaaaccgacggcccacctgccgctcttagcatcatggcccagtccacttccatacagaggattcagcgtctgattgattccgttcctctgatgaacctgctgctaacactcctttccacctcttacagaaaggcttgtgttctgcagcgccaacgcaagggcagcatgagctccgacgcaagcgccagcactgattccaacacatactacgaggatgacttctcgtccactgaagaggactcctctcaggatgatgacagtgaaccgatactcggtcagtggttcgaagagaccatttccccatcaaaagagaaagcggcaccacctcccccacctcccccaccccctttggagtcatcgccccgagtgaaaagccccagcaaacaggccccaggggaaaagggaaacattctggcgtcacggaaggacccagagttgtttttgggcctggcgagcaatatacttaattttatcacgtcctcgatgctcaactcgcgcaacaatttcattagaaactacctgagcgtgtccctgagtgaacaccacatggctaccttggccagtattatcaaggaagtggataaagatggcctgaaggggagttcagacgaggagttcgctgcagcgttatatcacttcaaccactcgttagtgacctctgatcttcagagtcctaaccttcagaataccttattgcaacagttgggggttgcaccattctcagagggcccttggcccctgtatattcatccccagagcttatctgtgcttagccggttgctcttgatctggcagcacaaagcttctgctcagggcgatcctgatgtgcccgaatgcctcaaagtttgggacagattcctgtcaacaatgaaacagaacgcacttcaaggtgttgtcccttctgaaaccgaggacctgaatgtggaacatctacagatgctattacttattttccacaactttacagagaccggtcgacgggcaatcctttctctgtttgttcagattatccaggaactgtcggtcaacatggacgcccaaatgaggttcgtgccccttatacttgccagacttctgctcatatttgactacctgcttcatcagtacagtaaggcaccggtctacttattcgaacaagtgcaacacaacctgctcagccccccttttggctgggcctccggatctcaagatagcaattcaaggagagccacaacacctctgtaccatggcttcaaggaggtggaggaaaattggagcaaacacttctctagcgatgccgtgcctcaccctcggttctattgtgtgctctccccggaggcttcagaagatgatctgaacagactggattcagtcgcctgcgacgtgttgttttccaagcttgtgaaatacgacgagctgtacgctgctctgactgctctcctcgctgccggaagccagcttgataccgttaggagaaaggagaacaagaatgtaaccgccctggaggcctgcgctctgcagtactattttcttattctgtggcgaatactaggcattctccctccgtccaagacctacataaaccagctgtccatgaacagccccgaaatgagtgaatgcgacatactccacaccttgcggtggtcaagccggctgagaatttcttcttatgtgaattggattaaggaccacctgattaagcagggcatgaaggcagagcacgcaagttccctgctagagctggccagcacaaccaaatgttcctcagtgaagtacgacgtggagatcgtcgaagagtatttcgctcgtcagatttcttcattctgtagcatcgactgtacaacaattctgcagcttcacgaaattccgtctctccagtctatttatactctggacgccgctattagtaaggtgcaggtgtctctggacgaacatttctctaagatggccgcagaaaccgatccacacaaatcttcagagattactaagaatctgctgcctgctacccttcaactcatcgatacttatgcatccttcacacgggcttacctcctgcagaactttaatgaggagggtacaaccgagaaaccctcaaaggagaagttgcagggctttgctgccgtcctggccattggctcctcccgatgcaaggcaaacaccctcggcccaacattagtccagaacctgccctcttctgttcaaacagtttgcgaaagctggaacaatatcaataccaacgagtttcccaacatcggaagttggaggaacgcatttgctaacgacacaattccctcggagtcttatatctctgcagtacaagccgcacacctgggaaccctctgtagccagagccttcccctagccgctagcttgaaacataccctcctcagccttgtaaggttaacgggagacctgatcgtctggtcagacgaaatgaacccaccccaggtgatcaggaccctgctgcctctcttactcgaatcatctacagaaagtgtcgcagagatctccagcaattcccttgagcgcatcctgggcccagctgagtccgacgagttcctcgctagagtctatgaaaagttgataacagggtgttataacatcctggctaatcacgcagacccaaattcaggcctagacgagtccattctcgaggagtgcctgcagtatcttgagaaacagttggagagttctcaagcccgaaaagctatggaggagttcttctcggacagcggcgagttagtgcagattatgatggccactgctaacgaaaatttgtcagcaaaattttgcaaccgggtgctcaaattctttaccaagttattccagctgacggagaagagcccgaaccccagtctgcttcacctgtgtgggtccctggcacagctggcctgtgtagagcctgtgaggctgcaggcttggctcacccggatgacaacttcaccccctaaagacagcgatcagctggatgtaattcaggagaaccggcagctgttgcagctgctcacgacttacatcgtcagagagaattctcaagttggcgaaggcgtctgcgctgtgttactgggtaccttgacaccgatggccacagaaatgttggccaatggcgatggcacgggctttcctgagctgatggtcgtgatggctaccctggcatccgccggtcagggcgctggacatctgcagcttcacaacgcagcagtggattggctgagcagatgtaagaaatatttgagccagaagaatgtggtagaaaagctgaacgccaatgtcatgcacggaaaacacgtgatgattctcgagtgcacctgtcatattatgtcctacttggccgacgtgactaacgctttatctcagtccaatggacaaggcccaagccacctttcggtggatggcgaagagcgggctattgaggtggatagcgattgggtggaagagttggcagtcgaggaggaggactcccaggctgaagactctgacgaagactctctatgcaacaagctttgtacttttacaatcacacaaaaggagttcatgaaccagcattggtaccactgccacacctgtaagatggtggacggcgtaggggtgtgcaccgtctgcgccaaggtgtgtcataaggaccacgaaatatcatatgctaagtacggcagtttcttctgcgattgtggggctaaggaggatgggagctgtctggccctggtgaaacgaactccctcttcgggaatgagttccacaatgaaggagtccgccttccagtcagaacctcggatcagcgagtcactggttcgccacgcctcgacttcatcgcctgcggataaggccaaagtgactatatccgacggaaaagtcgctgacgaggaaaagcccaaaaagtccagcctgtgccggaccgtcgaggggtgtagagaggagttacaaaaccaagcgaattttagcttcgcaccactggttctggatatgttgaactttctgatggacgcaattcagaccaacttccaacaagcctctgctgtgggatcatcgtcgcgcgctcagcaagccctttctgaactgcacactgttgagaaagctgtggaaatgaccgatcaattgatggtgccaaccctgggttcacaggaaggtgcgtttgaaaacgtccgcatgaactactccggtgatcagggacagactattcgccagctaatctcggcccacgttctaaggagggtcgccatgtgcgtcctctcctcccctcacgggaggcgacagcatcttgctgtgagtcacgaaaagggtaaaattaccgtgttacagctctctgcattgctgaagcaggctgactcttcgaaacggaagctgacgttgaccaggctcgcaagtgcaccagtgcctttcaccgttctgagcctgacaggcaatccctgtaaggaggattatctggcagtttgtggcctgaaggattgccatgtgcttactttttcctcctccggttccgtgtctgaccatcttgtgctccaccctcagctcgccacgggtaacttcataattaaggcagtatggctccctgggtctcagaccgagctggcgatagtgaccgccgatttcgttaagatctatgacctttgcgtggatgccctgtcacctactttctattttctcctgcccagctctaaaatacgagacgtgacttttctgttcaacgaggagggtaagaatataatcgtcattatgtctagcgcaggctacatatacacacaactgatggaagaagcttccagcgcacagcaggggccattttacgtgactaatgtgttggagataaaccacgaggatctgaaagattccaattctcaggtggcaggaggcggtgtatctgtgtactacagccacgtgttgcaaatgctgttcttcagctattgccaggggaagtctttcgcagccacaataagcaggacgacgcttgaagttctacagctattccccattaatataaagtcgtctaatggaggaagcaagacgtcacccgcactctgccagtggtctgaagtgatgaaccaccctggactcgtgtgctgcgttcagcagaccaccggagtgccgttggtagtgatggtcaagcccgatacctttctgattcaggagatcaagacattaccagccaaggcaaaaatccaagacatggttgcgatccggcatactgcctgtaatgagcagcaaaggactacgatgattttgttatgcgaggatggttctctgaggatttacatggctaacgtcgaaaatacaagttattggctgcaaccaagtctgcagccttcctcagtaatctctataatgaagccagtccgaaagcgcaaaactgcaaccatcacaacacgcactagttctcaggtcacatttcctatagatttcttcgaacataaccaacagctcaccgatgtggaatttgggggtaatgatctgctgcaggtgtacaacgctcagcagataaagcaccgactgaactccacaggcatgtacgtcgccaacaccaagccgggaggattcactatcgagatcagcaataacaacagcactatggtgatgaccggtatgcgaatccagattggaactcaagctattgagagagcgccatcatacattgagatttttggaagaaccatgcagctgaatttatctcggagtcggtggtttgacttcccgtttacaagagaggaggctctgcaggctgataagaaactcaacttgttcattggagcttctgtggaccctgctggagttaccatgattgacgccgtgaagatctacggtaaaacaaaagaacagtttggatggcccgacgagccacctgaagagttcccctccgcctccgtgtcgaacatttgtccttctaatcttaaccaaagcaatggaacaggcgattccgactctgctgcccctaccacaacaagtggaactgtgctcgagcgtctagttgtaagcagtctcgaggcattggaatcctgttttgctgtggggccaatcatcgagaaagagcgaaataaaaacgcggcacaagaacttgcgacattactgctctcactacctgctcccgcttccgttcagcagcagagtaagagtctactggctagtctgcatactagtaggagcgcctatcacagtcacaaggaccaagctctcttgtccaaagcagttcagtgtttgaatacttcctccaaggaaggcaaagatttggatcccgaagtgtttcagagactggttatcactgctagaagtattgctataatgcgtccgaacaacctggtgcattttacagagtctaagctgccgcagatggagactgattgcttcttccctcggtgcgcctgttggtcactgggcattgtcggtatactcatcggggcaccattggaaacaccctcacctgaaggtatggatgagggcaaagagcctcaaaaacagctcgaaggcgactgttgcagcttcatcacacagctggtcaatcatttctggaagcttcacgctagcaagcccaaaaatgcttttttagctccagcctgcttgccgggactaacacacattgaagccactgtgaatgctctggttgatataattcacgggtactgcacctgtgagttggactgcattaatactgcttctaaaatttacatgcagatgctcctgtgccctgaccctgcagtgtcgttctcttgtaaacaggcactgattcgagtgctcaggccccgtaacaagcgacgccatgttactttgccctccagcccaaggtcaaatacaccaatgggagataaagatgacgacgacgacgatgacgccgatgaaaagatgcagtcttcaggaattcctaacgggggtcatattagacaggagtcccaagagcagtctgaggtggatcatggcgattttgaaatggtgtcagagtcaatggtgctagagaccgcagaaaatgtaaacaatggcaacccctcgcccctggaggctcttttggccggtgctgaaggttttccccctatgctggatatcccccctgatgccgatgatgaaactatggtcgagctcgctattgccctttctctccagcaggatcaacaggcacccgctagtgacgacgagggtagcactgccgctacggatggttccacattgagaacatcaccggcagaccacggagggtccgtcggatctgaatcgggaggcagcgcagtagacagcgtcgccggagaacacagtgtgtctggccgatcctccgcctacggggacgccactgccgaaggtcatcccgcaggaccgggatcggtctcctccagtaccggtgcaatctccaccaccacaggccatcaggagggagatggttccgaaggcgaaggcgaaggagagaccgagggagatgtgcacacaagcaacaggttacacatggtgcgcctgatgttgctggaaagattgctgcaaacacttcctcagctgaggaacgtggggggtgtccgagccatcccttacatgcaggttattctgatgttgaccactgacttggacggcgaggatgaaaaggataaaggcgcattggataacctgcttagccaattaatcgccgagctggggatggacaaaaaggatgtgtccaagaagaacgaaaggagtgccttgaacgaagtgcacttggtggttatgagactgctgtccgtatttatgtcaagaaccaagtcaggctcaaagtcaagcatatgtgagagttcctctctgatttcctcagccaccgctgcagcgttgttgagctccggtgctgtagattactgcctgcatgtgctgaagagcctgctcgagtactggaaatcccaacaaaacgatgaggaacctgtcgctacttcccagttattgaagccacacaccaccagtagtcctcctgacatgagccctttcttcctccggcagtacgttaaggggcacgctgctgatgtgtttgaagcttacacacagttgctcactgaaatggtgcttcgcctgccataccagattaaaaagataacagacacaaattcccggattcctcctccagtgtttgaccattcctggttctactttctcagcgagtatctgatgatacagcagacgcccttcgtaagaagacaggtcagaaaactgctgctttttatctgtgggagcaaagaaaagtacagacagctgcgagacttacacactctggattcccacgtgcgcggtattaagaaactgctagaagagcagggtatatttttgagagcgtcggtggtgactgcatccagcggctcagcgttgcaatacgacacacttattagtctcatggaacacctaaaggcctgtgccgagatcgccgcacaacgcactatcaattggcagaaattttgtataaaagacgatagcgtgctatattttctgcttcaggtaagttttttagttgatgaaggcgtctcgccggtgctgctgcagctactttcctgtgccttgtgcgggtccaaggtcctcgccgcactagctgcctccagcggctcctccagtgccagctcatctagcgccccagtggcggcaagttctggccaggcaacaacgcagagcaaatcaagcacaaaaaagagcaaaaaagaagaaaaggaaaaagagaaagatggtgaaacctctggctcacaggaggaccaactttgcacagcccttgtgaatcaactaaacaagttcgcagataaagaaacccttatccagttcctacgctgttttctgctcgagagcaactctagttccgtgagatggcaggctcattgcctgaccctacatatctacagaaacagttctaagtcacagcaagagctcctgctggatctcatgtggagtatctggccagaactccccgcatatggccgaaaagctgcccagttcgtggatcttctggggtacttctctctgaaaaccccacagaccgagaagaaactgaaggaatattcccagaaggccgtagagattctgagaactcaaaaccatatcctcaccaaccatcccaactcgaatatctataatacactgtctggcctagtggagttcgatgggtactacctggagtcagatccctgtttggtttgcaacaatcctgaggttccattctgttacataaaactgagcagtatcaaggtggatacccgatacactaccacccagcaggtggtcaagctcatcgggtctcatacaatttcaaaggtcaccgtgaagattggggacctgaaacgcacgaaaatggtgcgcactatcaacttgtactacaacaataggacagttcaggccatcgttgaactaaaaaacaagccagctaggtggcacaaagccaagaaagtgcaactgacccccggacagacagaagtgaagatagacctgccactcccaatcgtagcttctaacctcatgatcgaattcgccgatttctacgaaaattatcaggcaagcacagaaactctgcagtgtccacgttgctcggcttccgtgccagcaaaccccggagtgtgtgggaattgtggagagaacgtttatcagtgtcacaaatgccgcagcatcaattatgacgaaaaagatccctttttgtgtaacgcctgcgggttctgtaagtacgcccgttttgactttatgctgtacgcgaaaccatgctgcgctgtcgacccaatagaaaacgaggaggatcgtaaaaaagctgtgagtaacattaacaccctcctggacaaggccgatagagtgtaccaccaactgatgggccaccggccacaactggagaatctcttatgcaaagtgaacgaagccgcacctgagaagcctcaagacgacagcggcacagcgggagggatttcttccaccagtgcatctgttaaccgatacatcctgcagctggcacaggagtattgcggggattgtaagaatagctttgacgagctgtcaaaaattatccagaaggtgttcgctagccgcaaagaactgctcgagtatgacctgcagcagcgtgaagccgctaccaagagttcaaggacctcggtgcagccaacatttacagcgtctcagtaccgagctttgagcgtccttgggtgtggacacaccagtagtactaaatgttatggctgcgcttctgcagtgactgagcactgtatcacactcctgcgcgcacttgctacaaatcccgcactgagacacattctggtgagccagggactcatccgagaactgtttgattataacctgaggcggggagcagccgctatgagagaagaagtcaggcagcttatgtgtcttttaaccagggataacccagaggcaacccagcaaatgaacgatctgatcattggcaaagtgtccacagcgctgaaaggccactgggctaacccagatctggcctcctctcttcagtatgagatgctgctgttaactgactcaattagcaaagaggactcttgctgggaattgcgcttgaggtgcgccctgagcctcttcctgatggccgttaacattaaaacacccgttgtggttgagaacataacgctgatgtgcctccgcatactgcagaagcttatcaagcccccagctccaacctctaagaagaacaaggatgtgccagtggaagccctgacaactgtcaagccctattgtaacgagattcacgcacaggcgcaactttggcttaaacgcgaccccaaggcttcatatgatgcctggaagaaatgcctgccaatcagaggaatagatgggaacggcaaagccccttccaaaagtgaactcagacatctctatcttactgaaaagtatgtgtggcgatggaaacagttcttgtctaggaggggtaagaggacatcccctttggacctcaaacttggacataacaattggcttcggcaggtcctgttcactcccgcaacccaggccgctcgtcaggctgcatgtaccattgtcgaagcattggcaaccatccctagtagaaagcagcaggttctcgacttgttaacctcgtacttggatgagctgtctattgcaggagaatgtgccgctgagtacctcgcactgtatcagaaactgattacaagtgcccattggaaggtgtacttagccgctagaggggtgttaccttacgtgggcaatctgatcaccaaagagatcgctaggctgctggccctcgaggaggccacactgagcaccgacctgcagcaagggtacgcattaaagtcattgaccggcctgctcagttccttcgtagaagtggagagtattaaacgccattttaaaagccggctggtggggacagtccttaatgggtatctgtgtctgcggaagctggttgtccagagaaccaagctcatcgatgagacacaggatatgctcctggaaatgctggaagacatgacaactggtactgagtcagagacaaaagcctttatggccgtgtgcatcgagaccgcgaagcgttacaatcttgatgactaccgaacaccggtttttatattcgagagattgtgttccattatttatccagaagagaatgaggtcacagaatttttcgtgacactggaaaaagaccctcaacaggaagacttcctgcagggcaggatgcctggaaatccttacagttcaaacgaaccagggatcggtccactgatgcgggatatcaaaaacaagatctgccaggattgcgacctcgtggccctcctggaagacgactcggggatggagcttctggttaataataagataatcagtttagacctgcccgtggctgaggtttataaaaaagtttggtgcaccacaaatgaaggcgagcccatgcgtatcgtatatcggatgagaggactgctcggcgatgccactgaagaatttattgaaagcttggatagcaccactgacgaggaggaagatgaagaagaagtgtacaagatggccggtgttatggcacaatgcggcggactggaatgcatgttaaacagactggccggaatacgggactttaaacaaggtcggcatttgctgaccgtgctcctcaagctgttttcctattgcgttaaagttaaagttaatcgccagcagcttgttaaattagaaatgaacaccctcaatgtgatgctcggcactctcaacctggcgctggtagccgagcaggagtcgaaagactccggcggtgcagctgtcgccgagcaggtactctctattatggaaattatcctcgacgaatctaatgctgaacctctcagcgaagacaaaggcaatctcctgctgacaggagataaggatcagctggttatgctgctcgaccaaatcaactccaccttcgtacggtcaaatcccagtgtacttcaagggctgctgcgaattattccctacttaagctttggagaggttgaaaaaatgcagatactggtagagcggtttaaaccatattgcaactttgacaagtacgatgaagaccactcaggtgacgacaaagtgttcctggactgcttttgtaagattgcagcgggtataaagaataatagcaatggccaccagttgaaggatctgatcttacagaaggggattactcagaatgcactggactatatgaagaagcacattccttcggcgaaaaatcttgacgcggacatttggaaaaaatttttatcccgtcccgcacttcccttcatcttacgcttattacgcggactggccatacaacaccccggaactcaagtgttaatcggaaccgactctattcccaatcttcacaagttggagcaagttagctcggacgaaggcattggtaccttggcagagaatttactcgaagctctgagagagcatccggacgtgaacaagaaaatagatgcagcacgccgtgagacaagagccgaaaagaaaaggatggccatggccatgaggcagaaggctctcggaaccctgggtatgactacaaatgagaaaggtcaggtcgtgaccaaaacggcactgctcaagcaaatggaagagctgattgaggagccaggactgacctgctgcatttgcagagaaggatacaagtttcagccaactaaggtattgggaatctatacctttactaaacgggtcgcgcttgaggaaatggagaacaaaccaagaaaacagcaagggtacagcactgtgtctcattttaatatcgtccactacgactgtcacttagccgcagtcagattggccagaggcagagaggaatgggaatccgccgcattacagaatgctaacactaaatgcaacggccttctgccagtgtggggacctcatgtgcctgaatcagctttcgcaacctgcttggctaggcataatacttacttgcaagaatgcactggccagcgggagcccacatatcaactaaatatccatgatattaaactgctgttcctgaggttcgccatggagcaaagctttagtgctgataccggaggtgggggaagggagtccaacatccatctgatcccctacataatccataccgtgctttatgtattgaacacaaccagagcaaccagccgggaggagaaaaacctccaaggcttcctcgagcagcctaaagaaaaatgggttgagtcagccttcgaggtggatgggccttattattttacagtgctcgctctacacattctgccccctgaacagtggcgggctacgcgtgtcgagatcctccggcgactactggtgacgagccaggccagggcggtcgcacctggtggggcaaccagactcactgacaaagccgtgaaggattattccgcctacagaagctcccttcttttctgggcactcgtggatcttatctataacatgttcaaaaaggtccctacgagtaataccgagggcggatggagttgctctctggccgaatacattcgacataatgacatgccgatctatgaggccgctgacaaagcgttaaaaacttttcaggaggaatttatgccggtagaaaccttctctgagttcctcgacgtggccggtctcttatctgagattaccgacccggagtcttttctaaaggacctcctcaattcggtgccctaa

SEQ ID NO: 337583 - DNA, 2955 bp, Artificial Sequence
  derived and/or modified sequence
gatttcccttttactcgtgaggaggctttgcaggccgacaagaaactgaatctctttataggcgcatctgtcgaccctgccggtgtcactatgatcgatgctgttaagatctatggcaaaactaaagagcaatttgggtggccagacgagccgcctgaagaatttccaagtgccagcgtttcaaatatttgtcctagcaatctgaatcagtctaatggaacaggggacagcgattcggcggcacctacaactactagcggtactgtcctagagcgcctggtggtgagttctcttgaagcccttgagtcttgttttgccgtggggcctatcattgagaaggagcgcaacaaaaacgctgcccaggagctggctaccttgctgctatctctgccagccccagctagtgtgcagcaacaaagcaaaagcctcctagcaagcctccacacttcaagatctgcgtatcattctcacaaggaccaagccctgctgtctaaagccgtgcagtgtctgaatacaagctccaaagagggcaaagatctcgatcccgaggtattccagaggctagtgatcacagctagaagcatcgccatcatgcgacctaacaacctcgtgcatttcactgagtcaaagcttcctcaaatggagaccgactgtttttttcccaggtgcgcctgttggagccttggcatcgtgggtatcttgatcggagccccactagagaccccgagtcccgaaggcatggacgaagggaaagagcctcaaaagcagctggaaggagattgttgcagcttcatcacacagctcgtcaaccatttctggaagctacatgcatctaagccaaagaatgccttcctggctcccgcttgtctgcctggcctcactcacattgaagcgacagtgaatgccctcgtggacataattcacggatattgtacctgtgaactcgactgtatcaataccgcttcaaaaatctatatgcagatgctgctctgccctgacccagccgtctcgtttagttgtaaacaagccctaatcagagtgctacgaccacgaaataaacgtcgccatgtcacactgccttcctcaccaagaagcaatactccgatgggggacaaggacgacgacgacgatgacgacgcagacgagaaaatgcaatcctctggaatcccaaacggtggtcatattcggcaagaatcgcaggagcaatctgaagtcgaccacggggacttcgagatggtctcagagtctatggtccttgagacagccgagaatgtgaataatggcaacccctccccgctggaagctctgctcgcaggcgcagaaggcttcccacctatgctggatattccccctgacgccgacgacgaaacaatggttgagctggccatcgcgctgtcgctgcagcaggatcaacaagcaccagcttcagatgacgaaggtagcaccgccgcaaccgatggaagcactctcaggacctcccccgctgaccacggaggttctgtaggtagcgagtctggcggttccgctgtcgactctgtggctggagaacactccgtcagcggaaggagctcagcttatggcgacgccacagccgagggccacccagccggtccgggatctgtttcatcctcgacgggcgcaatctctacaaccacaggtcatcaggaaggagacgggagcgagggagagggtgaaggcgaaacagagggtgatgtgcacacgtccaaccggcttcacatggtacggctcatgctgctagagcgcctgctgcaaacactgccccagttacgtaatgtcggtggcgtccgcgcaattccctatatgcaggtgattctgatgctcaccaccgatctggatggggaggacgagaaggacaaaggcgctctggacaacctgttatcgcagttgattgcggagctgggcatggataaaaaggacgtctctaaaaagaacgagcggtcagcgctcaacgaagtgcacctcgttgttatgcgtctgctgtccgtctttatgtcaaggactaagagtggctccaaatccagcatctgtgaatccagtagcctgatctcttccgcaactgccgctgctttgctgtcctccggtgccgtggattactgcctccacgtgctgaagagcctgttggaatattggaagtcacagcagaacgacgaggagcccgtcgcaacatcacagctcctcaagccacatactacctcctcaccgccagatatgagtccgttttttcttcggcagtacgtgaagggacatgcggcagacgtgttcgaggcttacactcaactcctgacggaaatggtgctccgattaccatatcagattaagaaaattaccgatactaattcccggattccacctcccgtgttcgaccactcctggttctacttcctgagcgagtacctgatgatacagcagacaccttttgtccgccgacaggttaggaagttgctacttttcatctgtggctccaaggaaaaatatagacagctgcgagacctgcacacgctggattcccatgtgcggggaattaagaagctattggaggagcaaggtatcttcctgcgggcttccgtggtgacagcgagttcgggtagcgccctgcaatatgatactcttattagtctgatggagcacctgaaagcctgtgctgaaatcgctgcccagcgtactatcaactggcagaagttttgtataaaggatgactccgtgctgtatttcttactccaagtctctttcctggtggacgagggtgtctcacccgtgctccttcaactactatcatgtgccctgtgtgggtctaaagtcttggcagcccttgcagcgagctcaggctcgagttcagctagttcctctagcgcacctgtggcggctagttcaggtcaggccacgactcaaagtaagagttcaacaaaaaagtctaagaaagaagagaaggagtag

SEQ ID NO: 337584 - DNA, 15861 bp, Artificial Sequence
  derived and/or modified sequence
gaagatggcgacgagcggcggcgaagaggcggcggcagcggctccggcgccggggaccccggcaacgggggcggacacgaccccgggctgggaggtggctgtgcggcccctgctgtccgcgtcctactccgccttcgagatgaaggagttgccgcagctggtggcctcagtcatcgagagtgaatcagaaatcctgcaccatgagaagcagtacgagccattctactcatcttttgttgcactttccacacactatattacaacagtttgcagtctcattccccggaaccaacttcagtcagtggcagcagcctgtaaagttctaattgagttttctctcctgcgtctggagaatccagatgaggcttgtgctgtgtcccagaaacacttgattctcctaatcaagggcctgtgcactggctgtagccgactagatagaactgaaattatcacatttacagcaatgatgaaatccgccaagctgccccaaacagtgaagacactttcagacgtggaagatcagaaagagctggcctcaccagtaagccctgagttgaggcaaaaggaggtacagatgaattttttgaaccagctgacctcagtttttaaccctagaactgtagcatcacaacctatcagtacacagactctggtggaaggagaaaatgatgagcagtcatctacagatcaagcctcagctatcaaaaccaagaatgtgttcatagctcagaacgtggctagtcttcaagagcttggtggctcggagaagctactgcgtgtatgtttgaacctgccatatttcctacgctatatcaatcggttccaagatgcagttttagctaattccttcttcataatgcctgcaacagtagcagatgccactgctgttcgtaatggctttcattcattggtgattgatgtaactatggcattggataccctttctctacctgtgttggaacctctcaatccttctcgtctacaagatgtgacagtcctcagcctaagttgtctgtatgcaggtgtgagtgtggcaacgtgcatggccatcctccatgtgggtagtgcccagcaagtgcggacagggtccacgagctccaaagaagatgactatgaaagtgacgcagctacaattgtccagaaatgtctcgaaatctatgacatgattggacaagcaatcagcagttctcgccgggctggtggtgagcactatcagaatttccaattgctgggtgcttggtgcttgttaaacagccttttcctcatactgaacctcagtcctactgcgttggctgataaggggaaagagaaggacccactggctgccctccgagtcagagacatcctttctcgtactaaagagggagtgggctcccctaaactggggcctggaaaagggcatcagggatttggggtactctcagtaatattggcaaaccatgccatcaaactgctaacgtctctctttcaagacctacaagtggaggcccttcacaagggttgggagacagatggcccccctgcagccttgagcattatggcccagagcacctccatacagaggattcaacggctgattgactctgtcccactgatgaacctgctcttgacgttactttcaacttcctacagaaaggcatgtgtcctgcagcggcagaggaagggctccatgagcagcgatgccagcgcctccaccgactccaatacttactatgaggacgatttcagtagcacggaggaggacagcagccaagacgatgacagtgagcctattttggggcaatggtttgaggagactatttctcccagtaaagagaaagcagcacctccgcctcctcccccacctcctccactggaaagctctcctcgggttaaaagccccagtaagcaggcccctggtgagaagggcaacattctggcgagtcgcaaagatcctgagttgttcttaggtctggcttccaacattttgaacttcatcacctcttccatgctgaactctcggaacaattttatccgaaactatctgagtgtatctctttcagaacaccatatggccaccctagccagtatcatcaaggaggtggacaaagatggactcaagggttcatcagatgaagagtttgctgcagctctctatcacttcaaccactcactggtaacctctgaccttcagtcacctaacctgcagaacacactgttgcagcagctaggagtggctcctttttctgagggcccttggcccttgtacattcaccctcaaagcctctctgtgctttcacgcctcctgctcatctggcaacataaagccagtgctcaaggtgaccctgacgtcccagaatgccttaaagtttgggacaggtttttgtctacaatgaagcagaatgccctgcaaggtgtggtgcccagtgagacagaggatctgaatgtagaacacctgcagatgctcctcctcattttccacaatttcaccgagacaggccggcgggccatattgtcgctttttgtccagatcatccaggagttgagcgtcaacatggatgctcagatgcgcttcgtgccgcttatcttggctcgcctccttctcatctttgattatctgcttcatcagtactccaaagcccctgtgtatctatttgagcaggtacagcataacctgctaagtcctccctttgggtgggcaagtggatcccaggacagcaacagccgccgggcaaccactcctctctatcatggattcaaagaagtagaagaaaactggtctaagcatttctcatcagatgctgtcccacaccccagattctactgtgtcctgtccccagaagcctcagaggatgatttgaaccgacttgattctgtggcatgtgacgtccttttctccaagcttgtcaagtatgatgagctttatgctgcactgacagccctgcttgcagctgggtcccagcttgatacagttaggagaaaggaaaacaagaatgtaacagccttggaggcctgtgcccttcaatattacttcttgatactgtggaggatcctaggaattttaccaccatcaaagacttacattaaccagctatccatgaactcacctgagatgagcgaatgtgacatcttgcacactctgcgatggtcttctcggctccggatcagctcctatgtcaactggataaaggatcaccttatcaaacagggaatgaaggctgagcatgctagctcgcttctagaactggcatccaccactaagtgtagctcagtgaaatatgatgttgaaatagtagaggaatacttcgctcgacagatctcatccttctgtagtatcgactgtaccaccatcttgcagctgcatgaaattcccagtctgcagtccatctacacccttgatgccgcgatctcaaaggtccaggtctctttggatgagcatttttctaagatggctgctgagactgatcctcataagtcgtctgagattaccaagaacctacttccagccacgctgcaactcattgacacctatgcatcgttcaccagagcctatttgctgcaaaactttaatgaagagggaacaactgagaaaccttccaaggagaaactgcaaggctttgctgctgttttggctattggctctagcaggtgcaaggcaaatactctgggtccgacactggttcagaatttgccatcgtcagtgcagactgtgtgtgagtcctggaacaacatcaataccaatgaatttcccaatattggatcctggcgcaatgcctttgccaatgacaccatcccttcagagagttatattagtgcagtgcaggctgcacacctggggactctctgtagccaaagtctgcccctggctgcttccctgaagcataccctcctctcactggtcaggttgactggagatcttattgtttggtcagatgagatgaacccaccacaggtaattcggacactgctacctcttcttttggaatcaagcactgagagtgttgccgagatcagtagcaactccctggaacgcatcttgggccctgctgagtctgatgagttcttggctcgtgtttatgagaagctgatcactggttgttacaacattctggccaatcatgcagatcctaacagtggactggatgaatccatcctggaggaatgtctccagtacttggaaaagcagctggaaagtagccaggctcgtaaagctatggaggagtttttctctgacagtggagaacttgtacagatcatgatggcaacagccaatgagaacctctctgctaaattctgtaaccgagttttgaaattcttcaccaaactcttccagctgactgagaagagccctaacccgagcctgttgcatctctgtggctccctggcacaactggcctgtgtggaacctgtgcgcctgcaggcctggctcacccgcatgactacatcgcccccaaaagattctgatcagctggatgtaattcaggagaaccggcagctgctgcagttactgaccacatacattgttcgggaaaacagccaagttggggaaggtgtgtgtgctgttcttctgggcaccctgactcccatggcaacagagatgctggccaacggtgatgggactggcttccctgaacttatggttgtgatggccactctggccagtgcaggtcaaggtgctggtcaccttcagcttcataatgctgctgtggattggctgagcagatgcaagaaatacctgtcacagaagaatgtagttgaaaaactgaatgccaatgtaatgcatggaaagcatgtgatgatcttggagtgcacatgccatatcatgtcttacttggctgatgtcacgaatgccctgagccagagtaatggtcaaggcccaagtcatctctcagtggatggggaagagcgggccattgaagtagactcagactgggtggaggagttggcggtggaagaggaagattcccaggctgaggattcagatgaagattctctttgcaataaactctgcacttttacgatcacacagaaagaattcatgaaccagcattggtaccactgtcacacctgtaaaatggtggatggcgtgggtgtctgcacagtgtgtgctaaggtgtgccacaaggatcatgagatttcctatgccaagtatggatccttcttctgtgactgtggagccaaggaagatggcagctgtttggctctggtgaagagaactcctagcagtggcatgagctctaccatgaaggagtcggcatttcagagtgaacccaggatttcagagagtctagtgcgtcatgccagcacctcctcgccagctgacaaagccaaggttaccatcagtgatggaaaggttgctgacgaagagaagcccaagaagagcagcctctgccgcacagtagagggctgccgggaggaattacagaaccaggccaatttctccttcgctcctctcgtgttagacatgcttaatttccttatggatgccattcagaccaacttccagcaagcttcagccgtcgggagcagcagccgtgctcagcaagccctcagtgagctacacactgtggagaaggcagtggagatgacagaccagctgatggttcccaccttagggtcccaggaaggtgcctttgagaatgtgcggatgaattacagtggagaccagggccagaccatccggcagctgatcagtgctcatgtgctcaggcgggtggctatgtgtgtgctctcctctccccatgggcgccgccaacatttggctgtcagccatgagaagggcaagatcaccgttctgcagctctctgcactcctgaagcaagcagattccagcaaaaggaagttaactctgacccgcttggcttctgccccagttccttttactgtgttgagcctcacaggaaatccctgcaaggaagactacttggcggtttgtgggctaaaggactgtcatgtgctcacctttagtagctcaggctctgtttcggatcacttggttttgcaccctcagttggcaacggggaacttcatcatcaaagccgtgtggttacctggttcacagaccgagttagcaattgtcaccgcagactttgttaagatttatgacctgtgtgttgatgccttgagtccaaccttctattttctcctgccaagctcaaagataagagatgttaccttccttttcaatgaggagggaaagaacatcattgttataatgtcttcggctgggtacatctatactcagcttatggaagaggccagcagtgcccagcagggacccttctatgtcactaatgtgttggaaatcaatcatgaggacctgaaggacagtaacagccaggtggcgggcggtggtgtgtccgtgtactactcccacgtgttgcagatgttgttcttcagctattgtcaaggcaaatcattcgcagccaccatcagcaggacaaccctggaggtgttgcaactcttccccatcaacatcaaaagttccaatggtggcagtaagacttctcctgctctttgccagtggtctgaggtgatgaaccaccctggcttggtgtgctgtgtccagcaaactacaggggtgccgctggtagttatggtgaaaccagacacttttcttatccaggagattaagactcttcctgctaaagcgaagatccaagacatggttgctattaggcacacggcctgcaatgagcagcagcggacaacaatgattctgctgtgtgaggatggcagcctgcgcatttacatggccaacgtggagaacacctcctactggctgcagccatccctgcagcccagcagtgtcatcagcatcatgaagcctgttcgaaagcgcaaaacagctacaatcacaacccgcacgtctagccaggtgactttccccattgacttttttgaacacaaccagcagctgacagatgtggagtttggtggtaacgacctcctacaggtctataatgcacaacagataaaacaccggctgaattccactggcatgtatgtggccaacaccaagcccggaggcttcaccattgagattagtaacaacaatagcactatggtgatgacaggcatgcggatccagattgggactcaagcaatagaacgggccccgtcatatatcgagatcttcggcagaactatgcagctcaacctgagtcgctcacgctggtttgacttccccttcaccagagaagaagccctgcaggctgataagaagctgaacctcttcattggggcctcggtggatccagcaggtgtcaccatgatagatgctgtaaaaatttatggcaagactaaggagcagtttggctggcctgatgagcccccagaagaattcccttctgcctctgtcagcaacatctgcccttcaaatctgaaccagagcaacggcactggagatagcgactcagctgcccccactacgaccagtggaactgtcctggagaggctggttgtgagttctttagaagccctggaaagctgctttgccgttggcccaatcatcgagaaggagagaaacaagaatgctgctcaggagctggccactttgctgttgtccctgccagcacctgccagtgtccagcagcagtccaagagccttctggccagcctgcacaccagccgctcggcctaccacagccacaaggatcaggccttgctgagcaaagctgtgcagtgtctcaacacatctagcaaagagggcaaggatttggaccctgaggtgttccagaggctagtgatcacagctcgctccattgccatcatgcgccccaacaaccttgtccactttacggagtcaaagctgccccagatggaaacagactgtttttttcctagatgtgcctgctggagtctagggatagttggcatattgattggggccccacttgaaactccctccccagaaggaatggatgaagggaaggaaccgcagaagcagttggaaggagattgctgtagtttcatcacccagcttgtgaaccacttctggaaactccatgcatccaaacccaagaatgccttcttggcacctgcctgccttccaggactaactcatattgaagctactgtcaatgctctggtggacatcatccatggctactgtacctgtgagctggattgtattaacacagcatccaagatctacatgcagatgctcttgtgtcctgatcctgctgtgagcttctcttgtaaacaagctctaattcgagtcctaaggcccaggaacaaacggagacatgtgactttaccctcttcccctcgaagcaacactccaatgggagacaaggatgatgatgacgatgatgatgcagatgagaaaatgcagtcatcagggatcccgaatggtggtcacatccgtcaggaaagccaggaacagagtgaggtggaccatggagattttgagatggtgtctgagtcgatggtcctggagacagctgaaaatgtcaacaatggcaacccctctcccctggaggccctgctggcaggcgcagagggcttcccccccatgctggacatcccacctgatgcagatgacgagaccatggttgaactagccattgccctgagcctgcagcaggaccaacaagctccagcctcagacgacgagggcagtacagcagcgacagatggttctacccttcggacctctcctgctgaccacggtggtagtgtgggctcggagagcgggggcagtgcagtggactcagtggctggcgagcacagtgtatctggccggagcagtgcttatggcgatgctacagctgaggggcatccggctggaccaggaagtgtcagctcaagcactggagccatcagcaccaccactgggcaccaggagggagatggctccgagggagaaggagaaggagaaactgaaggagatgtccacactagcaacaggctgcacatggtccgtctaatgctgttggagagattactgcagaccctgcctcaattacgaaacgttggcggtgtccgggccatcccatacatgcaggtcattctaatgctcactacagatctggatggagaagatgagaaagacaagggggccctagacaacctgctctcccagcttattgctgagttgggtatggataaaaaggatgtctccaagaagaatgagcgcagcgccctgaatgaagtccatctggtagtaatgagactcctgagtgtcttcatgtcccgcaccaaatctggatccaagtcttccatatgtgagtcatcttccctcatctccagtgccacagcagcagctctactgagctctggggctgtggactactgcctgcacgtgctcaaatcactgctggaatattggaagagccaacagaatgacgaggagcctgtggctaccagccagttgctgaaaccacatactacctcctccccacctgacatgagcccattctttctccgccagtatgtgaagggtcatgctgctgatgtgtttgaggcctatactcagcttctaacagaaatggtactgaggcttccttaccaaatcaaaaagattactgacaccaattctcgaatcccacctcctgtctttgaccactcgtggttttactttctctccgagtacctcatgatccagcagactccatttgtgcgccgtcaagtccgcaaacttctgctcttcatctgtggatccaaagagaagtaccgccagctccgggatttgcacaccctggactctcacgtgcgtgggatcaagaagctgctagaagagcaggggatattcctccgggcaagtgtggttacagccagctcaggctccgccttgcaatatgacacactcatcagcctgatggagcacctgaaagcctgtgcagagattgccgcccagcgaaccatcaactggcagaaattctgcatcaaagatgactccgtcctgtacttcctcctccaagtcagtttccttgtggatgagggcgtgtccccagtgctgctgcaactgctctcctgtgctctgtgcggcagcaaggtgctcgctgcactggcagcctcttcgggatcctccagtgcttcttcctcctcagcccctgtggctgccagttctggacaagccacaacacagtccaagtcttccactaaaaagagcaagaaagaagaaaaagaaaaggagaaagatggtgagacctctggcagccaggaggaccagctgtgcacagctctggtgaaccagctgaacaaatttgccgataaggaaaccctgatccagttcctgcgttgtttcctgttagagtccaattcttcctcggtgcgctggcaggcccactgtctgacactgcacatctacagaaattccagcaaatctcaacaggagctcctgctagatctgatgtggtccatctggccagaactcccagcctatggtcgtaaggctgcccagtttgtggacctactaggatatttctccctgaaaactccacaaacagagaagaagttgaaggagtattcacagaaggctgtggagattctgcggactcaaaaccatattcttaccaaccaccccaactcgaacatttataacactttgtctggcttagtggagtttgatggctattacctggagagcgatccctgcctggtgtgtaataacccggaagtaccgttctgttatatcaagctgtcttccattaaagtggacacgcggtacaccaccacccagcaggttgtgaagctcattggcagtcacaccatcagcaaagtgacagtgaaaatcggggatctgaaacggaccaagatggtgcggaccatcaacctgtattataacaaccgaaccgtgcaggccatcgtggagttgaaaaacaagccagctcgctggcacaaagccaagaaggttcagctgacccctggacagacagaggtgaagattgacctgccgttgcccattgtggcctccaatctgatgattgagtttgcagacttctatgaaaactaccaggcctccacagagaccctgcagtgccctcgctgtagtgcctcggtccctgccaacccaggagtctgtggcaactgtggagagaatgtgtaccagtgtcacaaatgcagatccatcaactacgatgaaaaggatcccttcctctgcaatgcctgtggcttctgtaaatatgcccgcttcgacttcatgctctatgccaagccttgctgtgcagtggatcccattgagaatgaagaagaccggaagaaggctgtatccaacatcaatacacttttggacaaagctgatcgagtgtatcatcagctgatgggacaccggccacagctggagaacctgctctgcaaagtgaatgaggcagctccagaaaagccacaggatgactcaggaacagcagggggcatcagctccacttctgccagtgtgaatcgttacatcctgcagttggctcaggagtattgtggagactgcaagaactcttttgatgaactctccaaaatcatccagaaagtctttgcttcgcgcaaagagttgttggaatatgacctacagcagagggaagcagccactaaatcatcccggacctccgtgcagcccacattcactgccagccagtaccgtgccttatccgtcctgggctgtggccacacatcctccaccaagtgctatggctgcgcctcggctgtcacagaacattgtatcacactacttcgggccctggccaccaacccagccttgaggcacatccttgtctcccagggccttatccgggagctctttgattataatcttcgccgaggggctgcggccatgcgggaggaggtccgccagctcatgtgcctcctaactcgagacaacccagaagccacccaacagatgaatgacctgattattggcaaggtctccacagccctgaagggccactgggccaaccccgatctggcaagtagcctgcagtatgaaatgctgctgctgacggattctatctccaaggaggacagctgctgggagctccggttacgctgtgctctcagccttttcctcatggctgtgaacattaagactcctgtggtggttgaaaacattaccctcatgtgcctgaggatcttgcagaagctgataaaaccacctgctcccactagcaagaagaacaaggatgtccccgttgaggccctcaccacggtgaagccatactgcaatgagatccatgcccaggctcaactgtggctcaagagagaccccaaggcatcctatgatgcctggaagaagtgtcttcctatcagagggatagatggcaatgggaaagcccccagcaaatcagagctccgccatctctatttgactgagaagtatgtgtggaggtggaaacagttcctgagtcgtcgggggaagaggacctcccccttggatctcaaactggggcataacaactggctgcgacaagtgcttttcactccagcaacgcaggccgcacggcaggcagcctgtaccattgtggaagctctagccaccattcccagccgcaagcagcaggtcctggacctgcttaccagttacctggatgagctgagcatagctggggagtgtgcagctgagtacctggctctctaccagaagctcatcacttctgcgcactggaaagtctacttggcagctcggggagtcctaccctatgtgggcaacctcatcaccaaggaaatagctcgtctgctggccctggaggaggctaccctgagtaccgatctgcagcagggttatgcccttaaaagtctcacaggccttctctcctcctttgttgaggtggaatccatcaaaagacattttaaaagtcgcttggtgggtactgtgctgaatggatacctgtgcttgcggaagctggtggtgcagaggaccaagctgatcgatgagacgcaggacatgctgctggagatgctggaggacatgaccacaggtacagaatcagaaaccaaggccttcatggctgtgtgcattgagacagccaagcgctacaatctggatgactaccggaccccggtgttcatcttcgagaggctctgcagcatcatttatcctgaggagaatgaagtcactgagttctttgtgaccctggagaaggatccccaacaagaagacttcttacagggcaggatgcctgggaacccgtatagcagcaatgagccaggcatcgggccgctgatgagggatataaagaacaagatttgccaggactgtgacttagtggccctcctggaagatgacagtggcatggagcttctagtgaacaataaaatcattagtttggaccttcctgtggctgaagtttacaagaaagtctggtgtaccacgaatgagggagagcccatgaggattgtttatcgtatgcgggggctgctgggcgatgccacagaggagttcattgagtccctggactctactacagatgaagaagaagatgaagaagaagtgtataaaatggctggtgtgatggcccagtgtgggggcctggaatgcatgcttaacagactcgcagggatcagagatttcaagcagggacgccaccttctaacagtgctactgaaattgttcagttactgcgtgaaggtgaaagtcaaccggcagcaactggtcaaactggaaatgaacaccttgaacgtcatgctggggaccctaaacctggcccttgtagctgaacaagaaagcaaggacagtgggggtgcagctgtggctgagcaggtgcttagcatcatggagatcattctagatgagtccaatgctgagcccctgagtgaggacaagggcaacctcctcctgacaggtgacaaggatcaactggtgatgctcttggaccagatcaacagcacctttgttcgctccaaccccagtgtgctccagggcctgcttcgcatcatcccgtacctttcctttggagaggtggagaaaatgcagatcttggtggagcgattcaaaccatactgcaactttgataaatatgatgaagatcacagtggtgatgataaagtcttcctggactgcttctgtaaaatagctgctggcatcaagaacaacagcaatgggcaccagctgaaggatctgattctccagaaggggatcacccagaatgcacttgactacatgaaaaagcacatccctagcgccaagaatttggatgccgacatctggaaaaagtttttgtctcgcccagccttgccatttatcctaaggctgcttcggggcctggccatccagcaccctggcacccaggttctgattggaactgattccatcccgaacctgcataagctggagcaggtgtccagtgatgagggcattgggaccttggcagagaacctgctggaagccctgcgggaacaccctgacgtaaacaagaagattgacgcagcccgcagggagacccgggcagagaagaagcgcatggccatggcaatgaggcagaaggccctgggcaccctgggcatgacgacaaatgaaaagggccaggtcgtgaccaagacagcactcctgaagcagatggaagagctgatcgaggagcctggcctcacgtgctgcatctgcagggagggatacaagttccagcccacaaaggtcctgggcatttataccttcacgaagcgggtagccttggaggagatggagaataagccccggaaacagcagggctacagcaccgtgtcccacttcaacattgtgcactacgactgccatctggctgccgtcaggttggctcgaggccgggaagagtgggagagtgccgccctgcagaatgccaacaccaagtgcaacgggctccttccggtctggggacctcatgtccctgaatcagcttttgccacttgcttggcaagacacaacacttacctccaggaatgtacaggccagcgggagcccacgtatcagctcaacatccatgacatcaaactgctcttcctgcgcttcgccatggagcagtcgttcagcgcagacactggcgggggcggccgggagagcaacatccacctgatcccgtacatcattcacactgtgctttacgtcctgaacacaacccgagcaacttcccgagaagagaagaacctccaaggctttctggaacagcccaaggagaagtgggtggagagtgcctttgaagtggacgggccctactatttcacagtcttggcccttcacatcctgccccctgagcagtggagagccacacgtgtggaaatcttgcggaggctgttggtgacctcgcaggctcgggcagtggctccaggtggagccaccaggctgacagataaggcagtgaaggactattccgcttaccgttcttcccttctcttttgggccctcgtcgatctcatttacaacatgtttaagaaggtgcctaccagtaacacagagggaggctggtcctgctctctcgctgagtacatccgccacaacgacatgcccatctacgaagctgccgacaaagccctgaaaaccttccaggaggagttcatgccagtggagaccttctcagagttcctcgatgtggccggtcttttatcagaaatcaccgatccagagagcttcctgaaggacctgttgaactcagtcccctgaccaccacacagcagctgcggcggcgaagacgaagctggcttgccttccaccctctgttctccctccttgtgcattaagttccctccgcgggatgctgcattgttaccccgccctcccctctctcatttttcttggtgtggcttggggtttttaggcttcctgttttatctcgtgtgtgtggtgcaccagctatgaggttgtctgtaacccaagccatcaaagggcctgtacatacctaggagccatgagttgtcccggccagcttcatacttgagtgtgcacatcttgagaaataaacaagtgacttaacacacattgaaaaggaa

SEQ ID NO: 337585 - DNA, 2954 bp, Artificial Sequence
  derived and/or modified sequence
gacttccccttcaccagagaagaagccctgcaggctgataagaagctgaacctcttcattggggcctcggtggatccagcaggtgtcaccatgatagatgctgtaaaaatttatggcaagactaaggagcagtttggctggcctgatgagcccccagaagaattcccttctgcctctgtcagcaacatctgcccttcaaatctgaaccagagcaacggcactggagatagcgactcagctgcccccactacgaccagtggaactgtcctggagaggctggttgtgagttctttagaagccctggaaagctgctttgccgttggcccaatcatcgagaaggagagaaacaagaatgctgctcaggagctggccactttgctgttgtccctgccagcacctgccagtgtccagcagcagtccaagagccttctggccagcctgcacaccagccgctcggcctaccacagccacaaggatcaggccttgctgagcaaagctgtgcagtgtctcaacacatctagcaaagagggcaaggatttggaccctgaggtgttccagaggctagtgatcacagctcgctccattgccatcatgcgccccaacaaccttgtccactttacggagtcaaagctgccccagatggaaacagactgtttttttcctagatgtgcctgctggagtctagggatagttggcatattgattggggccccacttgaaactccctccccagaaggaatggatgaagggaaggaaccgcagaagcagttggaaggagattgctgtagtttcatcacccagcttgtgaaccacttctggaaactccatgcatccaaacccaagaatgccttcttggcacctgcctgccttccaggactaactcatattgaagctactgtcaatgctctggtggacatcatccatggctactgtacctgtgagctggattgtattaacacagcatccaagatctacatgcagatgctcttgtgtcctgatcctgctgtgagcttctcttgtaaacaagctctaattcgagtcctaaggcccaggaacaaacggagacatgtgactttaccctcttcccctcgaagcaacactccaatgggagacaaggatgatgatgacgatgatgatgcagatgagaaaatgcagtcatcagggatcccgaatggtggtcacatccgtcaggaaagccaggaacagagtgaggtggaccatggagattttgagatggtgtctgagtcgatggtcctggagacagctgaaaatgtcaacaatggcaacccctctcccctggaggccctgctggcaggcgcagagggcttcccccccatgctggacatcccacctgatgcagatgacgagaccatggttgaactagccattgccctgagcctgcagcaggaccaacaagctccagcctcagacgacgagggcagtacagcagcgacagatggttctacccttcggacctctcctgctgaccacggtggtagtgtgggctcggagagcgggggcagtgcagtggactcagtggctggcgagcacagtgtatctggccggagcagtgcttatggcgatgctacagctgaggggcatccggctggaccaggaagtgtcagctcaagcactggagccatcagcaccaccactgggcaccaggagggagatggctccgagggagaaggagaaggagaaactgaaggagatgtccacactagcaacaggctgcacatggtccgtctaatgctgttggagagattactgcagaccctgcctcaattacgaaacgttggcggtgtccgggccatcccatacatgcaggtcattctaatgctcactacagatctggatggagaagatgagaaagacaagggggccctagacaacctgctctcccagcttattgctgagttgggtatggataaaaaggatgtctccaagaagaatgagcgcagcgccctgaatgaagtccatctggtagtaatgagactcctgagtgtcttcatgtcccgcaccaaatctggatccaagtcttccatatgtgagtcatcttccctcatctccagtgccacagcagcagctctactgagctctggggctgtggactactgcctgcacgtgctcaaatcactgctggaatattggaagagccaacagaatgacgaggagcctgtggctaccagccagttgctgaaaccacatactacctcctccccacctgacatgagcccattctttctccgccagtatgtgaagggtcatgctgctgatgtgtttgaggcctatactcagcttctaacagaaatggtactgaggcttccttaccaaatcaaaaagattactgacaccaattctcgaatcccacctcctgtctttgaccactcgtggttttactttctctccgagtacctcatgatccagcagactccatttgtgcgccgtcaagtccgcaaacttctgctcttcatctgtggatccaaagagaagtaccgccagctccgggatttgcacaccctggactctcacgtgcgtgggatcaagaagctgctagaagagcaggggatattcctccgggcaagtgtggttacagccagctcaggctccgccttgcaatatgacacactcatcagcctgatggagcacctgaaagcctgtgcagagattgccgcccagcgaaccatcaactggcagaaattctgcatcaaagatgactccgtcctgtacttcctcctccaagtcagtttccttgtggatgagggcgtgtccccagtgctgctgcaactgctctcctgtgctctgtgcggcagcaaggtgctcgctgcactggcagcctcttcgggatcctccagtgcttcttcctcctcagcccctgtggctgccagttctggacaagccacaacacagtccaagtcttccactaaaaagagcaagaaagaagaaaaagaaaa

SEQ ID NO: 337586 - protein, 164 aa, Artificial Sequence
  derived and/or modified sequence
MRSCYVAQAGLKLPGSSDPPASASQSTRITASGYGPPSSRPSSRVVNGEDAVPYSWPWQVSLQYEKSGSFYHTCGGSLIAPDWVVTAGHCISSSRTYQVVLGEYDRAVKEGPEQVIPINSGDLFVHPLWNRSCVACGNDIALIKLSRSAQLGDAVQLASLPPAG

SEQ ID NO: 337587 - protein, 180 aa, Artificial Sequence
  derived and/or modified sequence
QVIPINSGDLFVHPLWNRSCVACGNDIALIKLSRSAQLGDAVQLASLPPAGDILPNETPCYITGWGRLYTNGPLPDKLQEALLPVVDYEHCSRWNWWGSSVKKTMVCAGGDIRSGCNGDSGGPLNCPTEDGGWQVHGVTSFVSAFGCNTRRKPTVFTRVSAFIDWIEEKLQGNKAPESRT

SEQ ID NO: 337588 - DNA, 996 bp, Artificial Sequence
  derived and/or modified sequence
caggtgatccccatcaactctggggacctctttgtgcatccactctggaaccgctcgtgtgtggcctgtggcaatgacatcgccctcatcaagctctcacgcagcgcccagctgggagacgccgtccagctcgcctcactccctccggctggtgacatccttcccaacgagacaccctgctacatcaccggctggggccgtctctataccaacgggccactcccagacaagctgcaggaggccctgctgccggtggtggactatgaacactgctccaggtggaactggtggggttcctccgtgaagaagaccatggtgtgtgctggaggggacatccgctccggctgcaatggtgactctggaggacccctcaactgccccacagaggatggtggctggcaggtccatggcgtgaccagctttgtttctgcctttggctgcaacacccgcaggaagcccacggtgttcactcgagtctccgccttcattgactggattgaggagaaactacagggcaacaaggcaccagagtcccggacttaggaccactgtgtgtgattcaccgtgaacactggcatattaaaggctctgagaagtcctgtaggaaaggacaatttgaactttgtttgagctcatattttccaatcccatctgacctttagttcttcactgagtgcccactgggttatattctgggagccgaggccacagcagtgaacaaagcacacaaaaccccccgccccatgggggctccgttctagtgggtccatttatcatcaaacatctattaatatctctagaatgtgcccatcaggacaccatccagatgctgctgcgcttttccaggccacacagaggggacaccctccaggtgcatcctgcatgaatatcaggctcaaccgtgctttcagggtaggaagcggagggcatttgaagagtcctttcccttccttcattcatttgttgtctccttgaataaatgctgttgaaaaccta

SEQ ID NO: 337589 - DNA, 543 bp, Artificial Sequence
  derived and/or modified sequence
caggtgatccccattaactctggagacttgttcgtgcacccactgtggaacagaagctgtgtcgcctgtggcaacgatatagccctgatcaagctttccaggagcgcccagctgggcgacgctgttcaactggccagcctccctccagcaggagatatactcccaaacgagacaccatgctacataaccggctgggggcgattgtataccaatggaccactacccgacaaactgcaggaagccctcctccctgtagtggattacgagcattgttcgcgctggaattggtggggcagcagcgtgaagaagactatggtgtgtgctgggggtgacatccggtctggatgtaacggggacagcggaggccctctgaattgcccaactgaggatgggggttggcaggtgcacggagtcaccagctttgttagtgcgtttgggtgtaacacacgcaggaagcccaccgtgtttactcgcgtctcagccttcatcgattggatagaagagaagctgcagggaaacaaggcaccagaatctaggacttag

SEQ ID NO: 337590 - DNA, 543 bp, Artificial Sequence
  derived and/or modified sequence
caggtgatcccaataaactcaggtgatcttttcgtacatccgttgtggaaccggtcctgtgtagcttgcggaaacgacatagccctgatcaagctctcccggagtgcacagttaggtgacgctgtccagctggcatccttaccacccgcaggggacatattgccaaatgaaacaccttgttatatcactggctggggtagactttatacgaatggccctctcccagataagctccaggaagcccttctacccgtggtggactatgagcactgtagtcgttggaactggtggggatcttccgttaagaaaacgatggtgtgcgccggtggtgatattcggtctggctgcaacggggattccggagggcctctcaactgccccacggaggacggaggctggcaagtgcacggagtgacatctttcgtgtccgcatttggctgcaatacccggcgcaagcccactgtcttcacccgcgttagtgcattcatcgactggattgaagagaaactccagggtaataaagctcccgagagtaggacgtag

SEQ ID NO: 337591 - DNA, 543 bp, Artificial Sequence
  derived and/or modified sequence
caggtgatcccaataaactcaggtgatcttttcgtacatccgttgtggaaccggtcctgtgtagcttgcggaaacgacatagccctgatcaagctctcccggagtgcacagttaggtgacgctgtccagctggcatccttaccacccgcaggggacatattgccaaatgaaacaccttgttatatcactggctggggtagactttatacgaatggccctctcccagataagctccaggaagcccttctacccgtggtggactatgagcactgtagtcgttggaactggtggggatcttccgtgaaaaagactatggtttgcgcaggcggggacattcggtctgggtgcaacggcgattccggcggacctctaaactgtcccacagaagatggcggctggcaagttcatggagttacatcttttgtttcagcattcggctgtaacacacgacggaaacccaccgtgttcacaagggtctctgcgtttattgattggatcgaagagaagttgcaagggaataaggcacctgaatcccgtacttag

SEQ ID NO: 337592 - DNA, 543 bp, Artificial Sequence
  derived and/or modified sequence
caggtgatccccatcaacagcggcgacctgttcgtgcaccccctgtggaacagaagctgcgtggcctgcggcaacgacatcgccctgatcaagctgagcagaagcgcccagctgggcgacgccgtgcagctggccagcctgccccccgccggcgacatcctgcccaacgagaccccctgctacatcaccggctggggcagactgtacaccaacggccccctgcccgacaagctgcaggaggccctgctgcccgtggtggactacgagcactgcagcagatggaactggtggggcagcagcgtgaagaagaccatggtgtgcgccggcggcgacatcagaagcggctgcaacggcgacagcggcggccccctgaactgccccaccgaggacggcggctggcaggtgcacggcgtgaccagcttcgtgagcgccttcggctgcaacaccagaagaaagcccaccgtgttcaccagagtgagcgccttcatcgactggatcgaggagaagctgcagggcaacaaggcccccgagagcagaacctag

SEQ ID NO: 337593 - DNA, 543 bp, Artificial Sequence
  derived and/or modified sequence
caagtcattccaattaactccggggatctgtttgtacatcccctttggaatcggtcctgcgttgcgtgtggaaacgatatagcacttataaagctgagccgatcagcccagctgggcgacgcagtgcagctggcatccctcccgcctgctggagacattctgcccaatgaaacaccctgttatatcaccggctggggacgactctacaccaacggacccctccctgataaactccaggaagccctgctacccgtagtggactacgagcactgcagccgttggaactggtggggatctagtgtcaagaagactatggtctgcgccggcggcgatataaggtcaggctgtaacggtgattctggagggcccctaaactgtcctaccgaggacggagggtggcaagttcacggtgtcacgtccttcgtgtccgcctttgggtgcaatactcggcgcaagcctacagtgttcactcgcgtgtcagctttcatagactggatcgaggagaaactccagggcaacaaagcacccgaatccagaacatag

SEQ ID NO: 337594 - DNA, 543 bp, Artificial Sequence
  derived and/or modified sequence
caggtgatccccatcaacagcggggacctgtttgtgcaccccctgtggaacagaagctgtgtggcctgtggaaatgacatcgccctgatcaagctgagccgcagcgcccagctgggagatgctgtgcagctggccagcctgcccccagctggggacatcctgcccaatgagaccccctgctacatcaccggctggggccgcctgtacaccaacggccccctgcctgacaagctgcaggaggccctgctgcctgtggtggactatgagcactgcagccgctggaactggtggggcagctctgtgaagaagaccatggtgtgtgccggcggggacatccgcagcggctgcaatggagacagcggcggccccctgaactgccccacagaagatggcggctggcaggtgcacggcgtgaccagctttgtgtctgccttcggctgcaacaccaggaggaagcccaccgtcttcaccagggtgtctgccttcatcgactggattgaggagaagctgcagggcaacaaggcccctgagagcaggacatag

SEQ ID NO: 337595 - DNA, 543 bp, Artificial Sequence
  derived and/or modified sequence
caggtgatccccatcaacagcggcgacctgttcgtgcaccccctgtggaaccgatcctgcgtggcctgcggtaatgacatcgcattgattaagctatctagatctgcacagctgggagatgctgtgcaactggcctctcttcccccagccggagacatattgcccaatgaaaccccatgttacatcactggttggggccggctttacactaacggcccactcccagataagctccaggaggcactcctccctgtggtggactacgagcattgtagtcgttggaattggtggggcagttccgtcaagaagaccatggtgtgcgccggtggggatatccggtcaggatgtaatggggactcgggcggcccgttgaattgtccaaccgaggacggggggtggcaggtgcatggggttacctctttcgtgagcgctttcgggtgcaatacgcgtaggaagcccacagtctttactcgggtgtctgctttcatcgactggattgaggagaagctccagggtaacaaagctcctgaatctaggacgtag

SEQ ID NO: 337596 - RNA, 543 nt, Artificial Sequence
  derived and/or modified sequence
caggugaucccaauaaacucaggugaucuuuucguacauccguuguggaaccgguccuguguagcuugcggaaacgacauagcccugaucaagcucucccggagugcacaguuaggugacgcuguccagcuggcauccuuaccacccgcaggggacauauugccaaaugaaacaccuuguuauaucacuggcugggguagacuuuauacgaauggcccucucccagauaagcuccaggaagcccuucuacccgugguggacuaugagcacuguagucguuggaacugguggggaucuuccguuaagaaaacgauggugugcgccgguggugauauucggucuggcugcaacggggauuccggagggccucucaacugccccacggaggacggaggcuggcaagugcacggagugacaucuuucguguccgcauuuggcugcaauacccggcgcaagcccacugucuucacccgcguuagugcauucaucgacuggauugaagagaaacuccaggguaauaaagcucccgagaguaggacguag

SEQ ID NO: 337597 - RNA, 543 nt, Artificial Sequence
  derived and/or modified sequence
caggugaucccaauaaacucaggugaucuuuucguacauccguuguggaaccgguccuguguagcuugcggaaacgacauagcccugaucaagcucucccggagugcacaguuaggugacgcuguccagcuggcauccuuaccacccgcaggggacauauugccaaaugaaacaccuuguuauaucacuggcugggguagacuuuauacgaauggcccucucccagauaagcuccaggaagcccuucuacccgugguggacuaugagcacuguagucguuggaacugguggggaucuuccgugaaaaagacuaugguuugcgcaggcggggacauucggucugggugcaacggcgauuccggcggaccucuaaacugucccacagaagauggcggcuggcaaguucauggaguuacaucuuuuguuucagcauucggcuguaacacacgacggaaacccaccguguucacaagggucucugcguuuauugauuggaucgaagagaaguugcaagggaauaaggcaccugaaucccguacuuag

SEQ ID NO: 337598 - DNA, 675 bp, Artificial Sequence
  derived and/or modified sequence
atgtttgccaatctgaaatacgttagcctgggtatactggttttccagacaacgtcgctggtcttaaccatgagatactccagaactctgaaggaggaggggccaagatacctgagtagcaccgctgtcgttgtggctgagctgctcaagattatggcctgtatattgttagtctataaggattcaaagtgtagcttgcgagcactgaacagagtgctccatgacgaaattctgaataagccaatggagaccctgaagctggcgatcccctcaggaatctacaccctgcaaaataatctcctctatgtggccttgtccaatctggatgccgcaacttatcaggttacctatcagttaaaaattctgacaacagctctgttttccgtcagcatgctctctaagaagcttggggtttaccagtggttatccctcgtcatacttatgactggtgttgcttttgtccagtggcccagtgacagccagctggacagcaaagaattgtctgcaggctcacaattcgtcgggctgatggccgtgctcacggcatgcttctcatctgggttcgcgggtgtgtatttcgaaaagatcctgaaagaaaccaaacagagcgtctggattagaaatatccagctcggattctttggatcaatattcggcctgatgggcgtgtactag

SEQ ID NO: 337599 - DNA, 675 bp, Artificial Sequence
  derived and/or modified sequence
atgtttgccaacctgaagtatgtgtccctgggcatcctggtgttccagaccaccagcctggtgctgaccatgagatacagcaggaccctgaaggaggagggcccccgctacctgagcagcacagctgtggtggtggccgagctgctgaagatcatggcctgcatcctgctggtgtacaaggacagcaagtgcagcctgcgggccctgaacagagtgctgcatgatgagatcctgaacaagcccatggagaccctgaagctggccatccccagcggcatctacaccctgcagaacaacctgctgtatgtggccctgagcaacctggatgctgccacctaccaggtgacctaccagctgaagatcctgaccacagccctcttctctgtgtccatgctgagcaagaagctgggcgtgtaccagtggctgagcctggtgatcctgatgactggagtggcctttgtgcagtggcccagcgacagccagctggacagcaaggagctgtctgctggcagccagtttgtgggcctgatggctgtgctgacagcctgcttcagcagcggctttgctggggtgtactttgagaagatcctgaaggagaccaagcagagcgtgtggatccggaacatccagctgggcttcttcggcagcatcttcggcctgatgggcgtgtactag

SEQ ID NO: 337600 - DNA, 675 bp, Artificial Sequence
  derived and/or modified sequence
atgttcgccaacctgaagtacgtgagcctgggcatcctggtgttccagacgaccagcctggttcttacaatgcgatactcccgcaccctcaaggaagagggccctaggtatctatccagcaccgctgttgtcgtggccgaactccttaaaatcatggcttgtatcctgctggtctacaaagactcaaagtgcagcttgcgcgcccttaaccgtgtgctgcacgatgagattctaaacaagccaatggagacgctcaagctagctatcccgagtgggatctacaccctacaaaacaaccttctttacgtggcactgagcaatttagacgccgctacttaccaggtcacatatcagttgaagatcctaaccactgccttattcagcgtaagcatgctgagcaagaaactgggcgtctatcagtggctaagtttggtcattctgatgacaggtgttgctttcgtgcagtggccttccgattcccagttggacagcaaagaactttcggccggcagccaatttgttggcctgatggcagtcctgacagcttgcttctctagtggtttcgcaggagtctactttgagaaaattctgaaggaaactaagcagagtgtgtggattcggaatattcaactcggattcttcggttccatcttcggtctgatgggggtctattag

SEQ ID NO: 337601 - DNA, 675 bp, Artificial Sequence
  derived and/or modified sequence
atgttcgccaatttgaagtacgtgtcgctcggaattctggtgtttcagaccacctccttggtattaactatgagatattccagaacgctgaaagaagaagggcctcgctatctgagttctactgccgtggtcgtggcggagttgctcaaaatcatggcttgtatccttctggtatacaaagacagcaagtgctctctgagggctcttaatagagtattgcacgacgaaattctcaataagcccatggagacactcaagctcgccatcccatccgggatttacaccttgcagaacaatcttctctatgtggccttaagcaaccttgacgccgctacctaccaggtgacctaccaactgaaaatactgacaaccgcgttgttcagcgtctctatgttatccaaaaaactcggcgtctatcaatggctgtccttagtcatcttgatgaccggagtggcgtttgtccagtggccaagcgacagtcagctcgactccaaggaactatccgcagggagtcagtttgtggggcttatggctgtgctgactgcatgtttctcctccggattcgctggggtgtatttcgagaagatactgaaggagaccaaacagtccgtgtggatccgcaatattcagctcgggttttttgggagcatcttcggacttatgggggtgtattag

SEQ ID NO: 337602 - DNA, 748 bp, Artificial Sequence
  derived and/or modified sequence
ttgaaaagattttattctgaaagactcttgccttctcaggcctttggttagagaaagcaaatgaagataaaacaatgttcgccaacctaaaatacgtttccctgggaattttggtctttcagactaccagtttggttctaacaatgcgttattccagaactttaaaagaagaaggacctcgttatctatcttctacagcagtggttgttgctgaacttttgaagataatggcctgcattttattggtctacaaagacagcaaatgtagtctaagagcactgaatcgagtactacatgatgaaattcttaataaacctatggaaacacttaaacttgctattccatcagggatctatactcttcagaataatttactgtatgtggcactatcaaatctagatgcagctacttatcaggtcacgtatcagttaaaaattcttacaacagcattattttctgtgtctatgcttagtaaaaaattgggtgtataccagtggctgtccctagtaattttgatgacaggagttgcttttgtacagtggccctcagattctcagcttgattctaaggaactttcagctggttctcaatttgtaggactcatggcagttctcacagcatgtttttcaagtggctttgctggggtttactttgagaaaatcttaaaagaaacaaaacaatcagtgtggataagaaatattcagcttggtttctttggaagtatatttggattaatgggtgtatacat

SEQ ID NO: 337603 - DNA, 675 bp, Artificial Sequence
  derived and/or modified sequence
atgttcgccaacctgaagtacgtgagcctgggcatcctggtgttccagaccaccagcctggtgctgaccatgagatacagcagaaccctgaaggaggagggccccagatacctgagcagcaccgccgtggtggtggccgagctgctgaagatcatggcctgcatcctgctggtgtacaaggacagcaagtgcagcctgagagccctgaacagagtgctgcacgacgagatcctgaacaagcccatggagaccctgaagctggccatccccagcggcatctacaccctgcagaacaacctgctgtacgtggccctgagcaacctggacgccgccacctaccaggtgacctaccagctgaagatcctgaccaccgccctgttcagcgtgagcatgctgagcaagaagctgggcgtgtaccagtggctgagcctggtgatcctgatgaccggcgtggccttcgtgcagtggcccagcgacagccagctggacagcaaggagctgagcgccggcagccagttcgtgggcctgatggccgtgctgaccgcctgcttcagcagcggcttcgccggcgtgtacttcgagaagatcctgaaggagaccaagcagagcgtgtggatcagaaacatccagctgggcttcttcggcagcatcttcggcctgatgggcgtgtactag

SEQ ID NO: 337604 - protein, 220 aa, Artificial Sequence
  derived and/or modified sequence
MFANLKYVSLGILVFQTTSLVLTMRYSRTLKEEGPRYLSSTAVVVAELLKIMACILLVYKDSKCSLRALNRVLHDEILNKPMETLKLAIPSGIYTLQNNLLYVALSNLDAATYQVTYQLKILTTALFSVSMLSKKLGVYQWLSLVILMTGVAFVQWPSDSQLDSKELSAGSQFVGLMAVLTACFSSGFAGVYFEKILKETKQSVWIRNIQLVSFSLEPSL

SEQ ID NO: 337605 - DNA, 5533 bp, Artificial Sequence
  derived and/or modified sequence
gagaggtgtagcagaaagcagtgccccaggcctccacgcgacggtgaagcaggaaccaggggctgccagcagagcagcccaggtgcgtcgccttagggacagagctgccaagtgccgagctggggctgccagagccgagccgggaacggcatttgccagagccgaggcggaagccggagcatttgggggacgggaccgcgggaacccggaaacgcctgggctgcaccgagctggcggtggctacggcgacgggagccggcggcgctgcgggtcagcggtcgcgtaggacccagcggactcggcagcctggggcgcccggcggagctgaaccgcggcccccggtggtgggctcagccggtcgagctgcgcgggaggcaaatgaagataaaacaatgttcgccaacctaaaatacgtttccctgggaattttggtctttcagactaccagtttggttctaacaatgcgttattccagaactttaaaagaagaaggacctcgttatctatcttctacagcagtggttgttgctgaacttttgaagataatggcctgcattttattggtctacaaagacagcaaatgtagtctaagagcactgaatcgagtactacatgatgaaattcttaataaacctatggaaacacttaaacttgctattccatcagggatctatactcttcagaataatttactgtatgtggcactatcaaatctagatgcagctacttatcaggtcacgtatcagttaaaaattcttacaacagcattattttctgtgtctatgcttagtaaaaaattgggtgtataccagtggctgtccctagtaattttgatgacaggagttgcttttgtacagtggccctcagattctcagcttgattctaaggaactttcagctggttctcaatttgtaggactcatggcagttctcacagcatgtttttcaagtggctttgctggggtttactttgagaaaatcttaaaagaaacaaaacaatcagtgtggataagaaatattcagcttgtgtctttttccttggagccatccttgtaataacagctacttttttgtatggttatgatcccaaacctgcaggaaatcccactaaagcatagttgtatactatctttaactggtttttcacgatggggcactaggaatctcgacattaatcttgcacagaggacttctacagagtctgagaagatatcatcatgctgaatctgatcatactgttttttaaaagtttaaggataagacatgtgtatatgtaacaaaacacattgcatctagaaatcaaaacttgaaagtatttccagggattaggattagaaggaatattagaggaaacttgaaatctgagtttaaaaagattttacctttttgattgctgcagaaatgtcctatgcactctttgcaagagcacacaacaaatgtcagataccaatttttgcaaattagatttaatcttattaaatgtttttatcttactctttctgtacagatatatcaaatcacatgaaatatttaaagtttgaaaattataattacctataaagctgtgaaaaatagaagtataatttgaaaaaacatttcacttatcagagatttttatatttatacaaaagattactaaatgaaggattgctaaatgtttttggttcaattacataaaaattaatattctgggtctgatctgtcagagaataaatatcaaatctaaatttaatgtagagatacatactatttctccatatgaattttaagatattttagtgcttcaagactgctgaaagcaatccagttgctcctgtgctagatggtagccagagaattttatagtaatggaggttagcccttaatctcttcattgcatttcatttctgtaaatcagattaagtccttaatattattttaaattaaaatttgtgtgtaattgccattaaattttcaaaatgtaatttaaaaggattaaatactcatttaataatttaaaataattattgtataatatctacatttggagaattttgaactatcaagcatatactgtatacagttagaaagttattaaatgaacattttactcattgatctgtaaaaacttctttaatctacaactgtttacaaaaacaacattcaaacaaatagtacagatgtcagtgacagaacaaaatgacttttcttggagacattccagattgccatattactttattttaaacagcgctatgactttaaatccaaggctgctcggaagatttttttaggtctctcataagcctattcttccctgatcacatgagtgggagaggtagccaaattttgaattccctttctgtgttcccacaagagctgctgagaaggcctggcgcagtggctcacgcctgtaatcctagcagtttgggaggctgaggcaggtggatcacaaggtcaagagattgagactatcctgaccaacatggtgaaaccccgtctctaccaaaaatacaaaaattagctgggtgtggtggcacgcacctgtagtcccagctactcgggagactgaggcaggagaatcacttgaacccgggaggcagaggttgcagtaagtggagatcacgccactgcactccaacctgggcgacacagtgagagtctgtctcaaaaaaaagaaaaaaaaaaaagctactgagaaggagccaccattttgctttaaaatagtgggtttttttcctttttaatgaacactggagctgaggatgcagattacatgagttatttaataagttgattcaagagagagagagtatattagaaatggtaagatgatttggtgggcaaaaatgctttctataatttgaatatgggtttaatttaattattaactatagacagaattacttactgagtataagaagtattttactgtctgggcacagtggctcatgcctgtaatcccagcactttgggaggccgaggcgggtggatcacaaggtcaggaattcgagaccagcctggccagcatggtgaaatcccatctctactaataatacaaaaattagctgggcatggtggtgcgcgcctgtagtcccagctactcaggaggctgaggcaggagaatttcttgaacacaccaggtggaagttgcagtgagccaagatcgtgccactgcaccccagcctgggtgacagagcgagactccgtctcaaaaaaaaaaaaaagaaaacacacacacacacacacacacccacagtatgaatgaaaaaaataaaatacttctttttttttttttttgagacagagtctcactttgtcgccaggctggagtgctgtggcgcgatctcggcttactgcaacctcccactccctggttcaagggattctcctgcctcagcctctgagtagctgggattgcaggcgtgagccactgcgcccggcctatactgtatatatttttaaagactgttctaatagatataaaaactgtaaaaaataagtatttttatatagctctcatggattttattaaacagaattggctcaaaaatactatgttacagactgttgggtacccttgcctaacgtgaactggcagtgttaccttgcttttgcagtaatagtctacagattgcaggtctcatcaattccatccaaagtttaaaagcatttaaaattaccaaatctttaaaatcactttggtggtgattccaaattggtaccaagcaaactttctggatgcccaacatgattttcagtaaccaccctttagagtatttgtttactaagttcaccacattttgaacatggtagttttagactgcaataatatttagacttacattattacttactgctaagtaaaatctaaatcctgcaaatgcacagaattcaagctgaaatataatgatttatgtttagctcacattgaagtattggttggttacttatgtattaatgcagtgtgcattcacatttaatcaggtttagtctgtttctattttaataattttaaaaaattatacaagcaaattagatattagacatgttagttacaatggtaacacatttttaggtgtcgaaacacaattttcaaaattcctaatgaaagttataaaaatgtaaacaagaattgtaaaaatggacaaagtagtcaaatatattttcaaagcacaattttattagacaggcataatttacattttgcttttctagtgggtttgaaaatgtttattggagattgggctatgtagtttataatttttaattcataaaaaagtaatcatacatgagaaggtagacctgtgccctaggatcatgtcacatatacagataatgccatttccttgtgtgtgtgatgtgtgttttgatgacctccacaggccttactgtatcaagcttttataatgatgactccttcattatttaaattcctatactttttatttgttatcacgcaactactttgttcaatgtgaaaatgtgctaactcatgggagaagagtgccaattgatagttcttttagcaattaagaatatggtatttgggaagaaaagtttgaaatgcaacaaatggatatttcaacacagtagtattatattatcagttctttagtaagtgattttagagatgttgtaggctacttttacggtggaatatatagtatagagatgcaaaacttaaatgtttacatcaatttatattgaatgtcacataatttcatggaaggaaaggtagcttgatatttagattctaagatataatctgaaaggaaactaattatgttctctacacttactgtaatactgattattcttacatatcaaattattgaactttaaaaatttcattgtatagtcattaaactgagttgggttttttcttaaagggtttagcatcactcatttgatttacacattcacattataatatttaattatcatgggtgtatgctttacataaaaaaggtttataaaagttatttatgctatattgaaagtcatcttaagaatctccaggttatttaaagtagttataggagcagagaacaagcacctttatcaaaatctggtcctatgtgccttgctttaccaaatacctgatttttctggagggtgttcctgtaattcacaactgtagacacatgggcaaaattaggatttttaagaataaatacatttctatttttttggttgtttcaacattagctcttcaaattcattaacaaaattaaaataggtatattacaaaagcataaacatttgtgaacagtacttaaataaattgtgatactattgctccatcattgaactttttgaaactttaacaattgtataaaactgtcagtttgttgtttcatttgtaattacaaaataatttaaaaactttttaaaataatttggatcctgactttgtctatatctgtatttcatttgtttagaaagattcttttgggtttgataatgtaatttgtatatttaaattttttatggacataattcaaaggaatgtataaattggtcttttgttaaatggctttttaattgataaa

SEQ ID NO: 337606 - DNA, 258 bp, Artificial Sequence
  derived and/or modified sequence
atgttcgctaatctcaagtatgtctccctaggcatcctcgtattccaaactaccagccttgtgttgaccatgcgttacagccggaccttaaaggaagaggggccaaggtatctctcatccactgctgttgtggttgctgagcttcttaaaatcatggcctgcatattactggtttacaaagactccaaatgtagcctgcgtgcgttgaatagggtgctccacgacgaaatcctcaataagcctatggagacactgtag

SEQ ID NO: 337607 - DNA, 258 bp, Artificial Sequence
  derived and/or modified sequence
atgtttgccaacctgaagtatgtgtccctgggcatcctggtgttccagaccaccagcctggtgctgaccatgagatacagcaggaccctgaaggaggagggcccccgctacctgagcagcacagctgtggtggtggccgagctgctgaagatcatggcctgcatcctgctggtgtacaaggacagcaagtgcagcctgcgggccctgaacagagtgctgcatgatgagatcctgaacaagcccatggagaccctgtag

SEQ ID NO: 337608 - DNA, 258 bp, Artificial Sequence
  derived and/or modified sequence
atgttcgccaacctgaagtacgtgagcctgggcatcctggtgttccaaacaacgtctctggtgttgaccatgagatatagtagaacactgaaagaggaaggccctaggtacctatctagcaccgctgtcgtggtggccgaactgctgaagattatggcctgcatcttgctggtctacaaagattcaaagtgctcactgcgtgctctgaatcgtgtgctccacgacgagatcctgaataaacccatggagaccctatag

SEQ ID NO: 337609 - DNA, 258 bp, Artificial Sequence
  derived and/or modified sequence
atgttcgcaaatctcaagtacgtcagcttgggaatcttggtctttcaaactacatctcttgtcttgactatgagatatagccgcaccctgaaggaggagggcccaagatacctttcaagcacagccgtggtggtagctgaactgcttaagataatggcctgcatcctcctggtgtacaaggactcaaagtgtagcttaagggccttgaacagagtactccatgacgagattctaaataagccgatggagacattgtag

SEQ ID NO: 337610 - DNA, 563 bp, Artificial Sequence
  derived and/or modified sequence
agtgtgtgcctcagcgcctggtgcgtgcggagctagtgacgggtgggcccggctggggcccgtcattccttcagtgaacatcccatgagctctcgctcggtgttgagccctgtggtaggcacagatgcacccgaccagcacctggagctcaagaagccgcaggaacttaaagaaatggaaaggctgcccttgggtctcactgtcaccttggctggagtacagaggcgcaatctcagctcactgcaacttccacctccctggctcaagtgatctcccaccttagcctcccaagcaaatgaagataaaacaatgttcgccaacctaaaatacgtttccctgggaattttggtctttcagactaccagtttggttctaacaatgcgttattccagaactttaaaagaagaaggacctcgttatctatcttctacagcagtggttgttgctgaacttttgaagataatggcctgcattttattggtctacaaagacagcaaatgtagtctaagagcactgaatcgagtactacatgatgaaattcttaataaacctatggaaacact

SEQ ID NO: 337611 - DNA, 258 bp, Artificial Sequence
  derived and/or modified sequence
atgttcgccaacctgaagtacgtgagcctgggcatcctggtgttccagaccaccagcctggtgctgaccatgagatacagcagaaccctgaaggaggagggccccagatacctgagcagcaccgccgtggtggtggccgagctgctgaagatcatggcctgcatcctgctggtgtacaaggacagcaagtgcagcctgagagccctgaacagagtgctgcacgacgagatcctgaacaagcccatggagaccctgtag

SEQ ID NO: 337612 - DNA, 567 bp, Artificial Sequence
  derived and/or modified sequence
atgtgctcactgtccctgttccattatagcgagtacttagtgacagccgtcaataatccgaaatctctgagtctggacagtttcttgctcaatcactctctggagtacaccgtggccgccctgtcttcctggctcgaatttacacttgagaacattttttggccagagctcaaacagatcacatggctatccgtcacggggttgctaatggtcgtgtttggggagtgcttacggaaggccgcaatgttcaccgctgggtcaaatttcaatcacgtcgtgcagaacgagaagtcggacacgcacaccctggtgacctccggagtatacgcttggtttcggcatccttcctatgtaggttggttttactggagcatcggcacacaggtgatgctctgcaatccaatttgtggtgtttcttatgcgcttactgtatggcgtttctttcgcgatcgtactgaggaggaagagatatctctgattcacttttttggcgaggaatacttagaatacaagaagcgggtccctacaggcttgcccttcatcaaaggagttaaggtggacctgtag

SEQ ID NO: 337613 - DNA, 567 bp, Artificial Sequence
  derived and/or modified sequence
atgtgcagcctgagcctcttccactacagcgagtacctggtgacagctgtgaacaaccccaagagcctgagcctggacagcttcctgctgaaccacagcctggagtacacagtggccgccctgagctcctggctggagttcaccctggagaacatcttctggccagagctgaagcagatcacctggctgtctgtgacaggcctgctgatggtggtgtttggagaatgtctgaggaaggccgccatgttcaccgctggcagcaacttcaaccacgtggtgcagaatgagaagagtgacacccacaccctggtgaccagcggcgtgtatgcctggttccgccaccccagctatgtgggctggttctactggagcatcggcacccaggtgatgctgtgcaaccccatctgtggggtgtcctatgccctgactgtgtggaggttcttccgggacagaacagaggaggaggagatcagcctcatccacttctttggagaggagtacctggagtacaagaagagggtgcccaccggcctgcccttcatcaagggcgtgaaggtggacctgtag

SEQ ID NO: 337614 - DNA, 567 bp, Artificial Sequence
  derived and/or modified sequence
atgtgcagcctgagcctgttccactacagcgagtacctggtgaccgctgtgaataaccccaagtctttatccttggactcattcctgctgaaccattccctggaatacactgtggctgccttgtcctcgtggctggagtttaccctggaaaatatcttctggccggaactgaaacaaatcacttggctttcagtcactgggctgttgatggtcgtctttggggagtgccttcggaaggccgcaatgtttacggccggcagtaacttcaaccatgtggtgcagaacgaaaagtctgacacccacacgctggtgactagtggggtgtatgcgtggtttaggcacccttcatacgtggggtggttctactggtctattggtacgcaggtgatgctgtgcaatcccatttgcggggtctcttatgctctgaccgtttggcgctttttccgcgaccgtacggaggaggaggaaatatccctgatccatttcttcggagaggagtacttggagtacaagaaacgcgttcctacagggctgccattcatcaagggcgtgaaggtggatttgtag

SEQ ID NO: 337615 - DNA, 567 bp, Artificial Sequence
  derived and/or modified sequence
atgtgttctttgtcgttattccactattccgaatacttggttactgctgtcaataacccaaagtctctcagcctggactccttcttgctgaaccacagtctggagtacaccgtggcagccttatcctcctggttggaattcacactcgagaatatcttttggcccgaactgaagcagattacatggctctctgtgactgggctcctaatggtggtttttggcgaatgcctcaggaaggctgccatgttcactgcaggatccaacttcaaccacgtcgtccagaatgaaaaaagcgacactcacaccctggtgacttcaggagtctatgcctggttcaggcacccttcctatgtgggctggttctattggagtatagggacccaggtgatgctctgcaatcctatttgcggcgtttcctatgcactaactgtgtggcggttttttagagacaggactgaggaggaagagatcagcctcatccacttcttcggcgaggagtaccttgaatataagaaacgcgtccctactggcctgccattcatcaagggcgtgaaggttgacctctag

SEQ ID NO: 337616 - DNA, 567 bp, Artificial Sequence
  derived and/or modified sequence
atgtgcagcctgagcctgttccactacagcgagtacctggtgaccgccgtgaacaaccccaagagcctgagcctggacagcttcctgctgaaccacagcctggagtacaccgtggccgccctgagcagctggctggagttcaccctggagaacatcttctggcccgagctgaagcagatcacctggctgagcgtgaccggcctgctgatggtggtgttcggcgagtgcctgagaaaggccgccatgttcaccgccggcagcaacttcaaccacgtggtgcagaacgagaagagcgacacccacaccctggtgaccagcggcgtgtacgcctggttcagacaccccagctacgtgggctggttctactggagcatcggcacccaggtgatgctgtgcaaccccatctgcggcgtgagctacgccctgaccgtgtggagattcttcagagacagaaccgaggaggaggagatcagcctgatccacttcttcggcgaggagtacctggagtacaagaagagagtgcccaccggcctgcccttcatcaagggcgtgaaggtggacctgtag

SEQ ID NO: 337617 - protein, 353 aa, Artificial Sequence
  derived and/or modified sequence
MNECHYDKHMDFFYNRSNTDTVDDWTGTKLVIVLCVGTFFCLFIFFSNSLVIAAVIKNRKFHFPFYYLLANLAAADFFAGIAYVFLMFNTGPVSKTLTVNRWFLRQGLLDSSLTASLTNLLVIAVERHMSIMRMRVHSNLTKKRVTLLILLVWAIAIFMGAVPTLGWNCLCNISACSSLAPIYSRSYLVFWTVSNLMAFLIMVVVYLRIYVYVKRKTNVLSPHTSGSISRRRTPMKLMKTVMTVLGAFVVCWTPGLVVLLLDGLNCRQCGVQHVKRWFLLLALLNSVVNPIIYSYKDEDMYGTMKKMICCFSQENPERRPSRIPSTVLSRSDTGSQYIEDSISQGAVCNKSTS

SEQ ID NO: 337618 - DNA, 1062 bp, Artificial Sequence
  derived and/or modified sequence
atgaacgagtgccattatgataaacacatggatttcttttataacaggagtaacacagatactgtggatgattggactggcaccaaacttgtgatagtgctgtgcgttggcacattcttttgcctgtttatcttcttcagcaactccctggtgattgcggcggtgataaaaaatcgcaaattccatttccccttttactacctcttggccaacctggccgccgcagatttcttcgcaggtatcgcctatgtgtttctgatgttcaatacaggacccgtttccaaaaccctgacagttaacaggtggtttctgaggcagggccttttggacagctctctgactgctagcctcacaaatctattggtgatcgccgtcgaaaggcatatgtctattatgagaatgagggtgcactctaacctgactaagaagagagtcacgctgctgattcttttggtatgggccatagcaatttttatgggagcagttcctaccctgggttggaactgtttatgcaacattagtgcatgcagtagtctggcccccatttactcgagatcttaccttgtgttctggaccgtgtcaaacctgatggcattccttattatggtagtagtttatctgcgtatctacgtctacgtgaagagaaagacgaacgttctgagtccccacaccagtgggtctatctccaggcgacggacgcccatgaaactcatgaaaactgtgatgactgtcctgggggcattcgtggtctgctggacccctggcctggtcgttttactgctggacgggctgaactgcagacagtgcggagtgcagcatgtcaagcggtggtttctcctgcttgccttattaaatagcgtggttaatcctatcatatatagctacaaggacgaggacatgtatgggacaatgaagaagatgatttgctgtttctctcaagagaatcctgaacggaggcctagccgcataccatctaccgtgctgtctcggagcgacactggcagtcaatatatcgaagatagcatttctcagggcgcagtatgcaataaaagcacaagctag

SEQ ID NO: 337619 - DNA, 1062 bp, Artificial Sequence
  derived and/or modified sequence
atgaacgagtgccactatgacaagcatatggacttcttttataatcgcagcaacaccgatacagtggacgactggactggcaccaaacttgtgattgtgctctgtgtggggacatttttttgtttatttattttcttcagcaattcgcttgttattgccgctgtgattaaaaaccgcaaattccatttccccttttactacctcttggcaaatctggccgcagcggatttctttgccgggatagcctacgttttcctgatgtttaataccgggccagtgagtaagacgcttactgtaaacaggtggttccttcggcagggtctgctggatagcagtttaacagcttccctcaccaacctgcttgtaatcgcagtggaaagacacatgagtatcatgcgcatgcgtgtgcacagcaacctaacaaaaaagagagtcacactcctcattctcctggtgtgggccattgctatatttatgggcgccgtgcctaccctgggttggaactgtttgtgcaacatatccgcctgttcaagcctcgcacctatctactccaggtcatatctggtgttttggaccgtttctaacttgatggccttcctgattatggtcgtcgtctaccttagaatctacgtctatgtgaagaggaagaccaatgttttgagtccacatacgagcgggtccatttctaggaggcgcacccccatgaagcttatgaagacagtgatgacggtcctgggggccttcgtggtctgttggactcctggactcgtcgttctcctcctggacggactgaactgtagacagtgcggagtgcagcatgtgaagcggtggttcttattactcgccctccttaatagcgtggttaatcctatcatttacagctacaaggacgaggacatgtacgggaccatgaaaaaaatgatctgctgttttagccaggaaaaccctgagcggcgcccttcaagaataccttccaccgtactctcccgttctgacaccggttcacagtacatcgaagacagcatcagccagggggccgtgtgcaacaagtcaactagttag

SEQ ID NO: 337620 - DNA, 1062 bp, Artificial Sequence
  derived and/or modified sequence
atgaatgaatgccactatgacaagcacatggacttcttctacaacagaagcaacacagacacagtggatgactggacaggcaccaagctggtgattgtgctgtgtgtgggcaccttcttctgcctcttcatcttcttcagcaacagcctggtgattgctgctgtgatcaagaacaggaagttccacttccccttctactacctgctggccaacctggccgctgctgacttctttgctggcatcgcctacgtgttcctgatgttcaacacaggccctgtgtccaagaccctgactgtgaaccgctggttcctgcggcagggcctgctggacagcagcctgacagccagcctgaccaacctgctggtgattgctgtggagcggcacatgagcatcatgaggatgagggtgcacagcaacctgaccaagaagagggtgaccctgctgatcctgctggtgtgggccatcgccatcttcatgggcgctgtgcccaccctgggctggaactgcctgtgcaacatcagcgcctgcagcagcctggcccccatctacagccgcagctacctggtgttctggacagtgagcaacctgatggccttcctgatcatggtggtggtgtacctgcgcatctacgtgtatgtgaagaggaagaccaacgtgctgagcccccacaccagcggcagcatcagcagaagaaggacccccatgaagctgatgaagacagtgatgacagtgctgggcgcctttgtggtgtgctggaccccaggcctggtggtgctgctgctggatggcctgaactgccggcagtgtggggtgcagcacgtgaagcgctggttcctgctgctggccctgctgaacagcgtggtgaaccccatcatctacagctacaaggatgaggacatgtatggcaccatgaagaagatgatctgctgcttcagccaggagaaccctgagcggcggcccagccgcatccccagcacagtgctgagcagaagtgacaccggcagccagtacattgaagattccatcagccagggcgctgtgtgcaacaagagcaccagctag

SEQ ID NO: 337621 - DNA, 1720 bp, Artificial Sequence
  derived and/or modified sequence
aaactttcctttggctctggacgcgtcgcaggggtcgctggagaggaggcgctccgcccgcccgccgcgtcctccgctgcttctccgcgcccggctggagcccggcgcccggtcgccccgtcgcgctcgaccccgagggcatgcggcagccgcaggggcccccgctcccgggctcggcggcgcgggtgaacgtgagcggatgttcacttctccacaatgaatgagtgtcactatgacaagcacatggactttttttataataggagcaacactgatactgtcgatgactggacaggaacaaagcttgtgattgttttgtgtgttgggacgtttttctgcctgtttatttttttttctaattctctggtcatcgcggcagtgatcaaaaacagaaaatttcatttccccttctactacctgttggctaatttagctgctgccgatttcttcgctggaattgcctatgtattcctgatgtttaacacaggcccagtttcaaaaactttgactgtcaaccgctggtttctccgtcaggggcttctggacagtagcttgactgcttccctcaccaacttgctggttatcgccgtggagaggcacatgtcaatcatgaggatgcgggtccatagcaacctgaccaaaaagagggtgacactgctcattttgcttgtctgggccatcgccatttttatgggggcggtccccacactgggctggaattgcctctgcaacatctctgcctgctcttccctggcccccatttacagcaggagttaccttgttttctggacagtgtccaacctcatggccttcctcatcatggttgtggtgtacctgcggatctacgtgtacgtcaagaggaaaaccaacgtcttgtctccgcatacaagtgggtccatcagccgccggaggacacccatgaagctaatgaagacggtgatgactgtcttaggggcgtttgtggtatgctggaccccgggcctggtggttctgctcctcgacggcctgaactgcaggcagtgtggcgtgcagcatgtgaaaaggtggttcctgctgctggcgctgctcaactccgtcgtgaaccccatcatctactcctacaaggacgaggacatgtatggcaccatgaagaagatgatctgctgcttctctcaggagaacccagagaggcgtccctctcgcatcccctccacagtcctcagcaggagtgacacaggcagccagtacatagaggatagtattagccaaggtgcagtctgcaataaaagcacttcctaaactctggatgcctctcggcccacccaggcctcctctgggaaaagagctgttaagaatgattacctgtctctaacaaagcccatgtacagtgttatttgaggtctccattaatcactgctagatttctttaaaaaattttttttcatagtttaaaagcatgggcagtaaagagaggacctgctgcatttagagaaagcacagaaacgggagaggttcggcgggtccctgcttgtcctatgaactgctcagagctcctgtcagtccagctgggccttctgggttctggcaccatttcgtagccattctctttgtattttaaaaggacgttatgaaagggcttagaccaaaataaatcataatgttacttgagccaccttatatagctgcttggagagtctatgtagttctttctgcatgcattaaaaatgtttagaaatgcttc

SEQ ID NO: 337622 - DNA, 3345 bp, Artificial Sequence
  derived and/or modified sequence
cttctttaaatttctttctaggatgttcacttctccacaatgaatgagtgtcactatgacaagcacatggactttttttataataggagcaacactgatactgtcgatgactggacaggaacaaagcttgtgattgttttgtgtgttgggacgtttttctgcctgtttatttttttttctaattctctggtcatcgcggcagtgatcaaaaacagaaaatttcatttccccttctactacctgttggctaatttagctgctgccgatttcttcgctggaattgcctatgtattcctgatgtttaacacaggcccagtttcaaaaactttgactgtcaaccgctggtttctccgtcaggggcttctggacagtagcttgactgcttccctcaccaacttgctggttatcgccgtggagaggcacatgtcaatcatgaggatgcgggtccatagcaacctgaccaaaaagagggtgacactgctcattttgcttgtctgggccatcgccatttttatgggggcggtccccacactgggctggaattgcctctgcaacatctctgcctgctcttccctggcccccatttacagcaggagttaccttgttttctggacagtgtccaacctcatggccttcctcatcatggttgtggtgtacctgcggatctacgtgtacgtcaagaggaaaaccaacgtcttgtctccgcatacaagtgggtccatcagccgccggaggacacccatgaagctaatgaagacggtgatgactgtcttaggggcgtttgtggtatgctggaccccgggcctggtggttctgctcctcgacggcctgaactgcaggcagtgtggcgtgcagcatgtgaaaaggtggttcctgctgctggcgctgctcaactccgtcgtgaaccccatcatctactcctacaaggacgaggacatgtatggcaccatgaagaagatgatctgctgcttctctcaggagaacccagagaggcgtccctctcgcatcccctccacagtcctcagcaggagtgacacaggcagccagtacatagaggatagtattagccaaggtgcagtctgcaataaaagcacttcctaaactctggatgcctctcggcccacccaggcctcctctgggaaaagagctgttaagaatgattacctgtctctaacaaagcccatgtacagtgttatttgaggtctccattaatcactgctagatttctttaaaaaattttttttcatagtttaaaagcatgggcagtaaagagaggacctgctgcatttagagaaagcacagaaacgggagaggttcggcgggtccctgcttgtcctatgaactgctcagagctcctgtcagtccagctgggccttctgggttctggcaccatttcgtagccattctctttgtattttaaaaggacgttatgaaagggcttagaccaaaataaatcataatgttacttgagccaccttatatagctgcttggagagtctatgtagttctttctgcatgcattaaaaatgtttagaaatgcttcagcaatggtgtttttttcctcaaagaaaccatggccagtagctaggtgttcagtaggaatcaaagaaaaatcagtaagagctccagattaaacctgatttttaactgaaggaacattctgaggaaaaatacttaaaagtaaaaaaggtcaatgtgaaaaccctttttgacctgaaaaaggccttagtatggtcctccatgcatgtgtgtgtatatgcatgtgtgtgtgtgtgtgtgtgtgtgtctatatatatatatatatatatatatatatatattcctgtttttactgatttttattgattttgttcaaagatatctggggattggattggggaatgcttaatctgactattgaaagaaacatggatccctggagtatttcagatacggggttaccgccccagactgcctcccgccagtccacattagttctcattttccctcatgatggtgaaaaacagtggagagctagtaaagggtttatgcagaaaacaaggagaagagaatgtgaagtttgaagtgcctatggaacatccagctgataatcttgcctagtaagagcaaaagaagccaagagaacaccaacgtttaaggagcaggtagagaaaacccagcaaaaggacagaggaataagaggaccaaagaacaatgttaagaatcaaggagagaggtcaggcacgctggctcatgcctgtaatcccagcactttgggaggctgaggcaggtggatcacttgaggccaggagtatgagaccagcctgggcaatgtggtgaaattgcatctttactaaaaatacaaaaactagccaggcatggtggcacatgcctgtaataccaggtacttgggaagctgaggcataagaatcacttgaacccgggaggtggaggttgcagagtgagccaagatcgcagcactgcactctagtctgggtgacagagcaagactctgtctcaaaaaaaaaaaaaaaaaaaaaaaaagactagagaatgtcagggaacacatgtgtatatttaaacaacttcactttgcatttaaaaactcgaaggacagcgaaggtgaaatcaattcacgggccacctagactttccagtctaggactagagctgtagcaatgatctgttgtgctgtacaagaaaagagaaagaggtgttcatttgagaacagatgtttttatacatcagagtaaaagctgtattgaagagcaggctgaatcccttccatatagaatgaaatatgagcttgaccccagtccttatcttcagttacctccataccaactggtggcatgttggatttagcatgtagaataatttcccatctcttatttttcccaaggttaatggcatccttctggtacctggcttacatgtgaactgaattttgatctgggttctattttgaatttttctccttcagagacctaagtaggcaacatgaaagacaagtagttaagaaagaaaaaatgatgtttcatacacacaggctaccaacgagagttttctatgtaaaacatttagagtgtattctgatttaaaatgagaataacttcaaggtagatattatagtatttatgtagtttgcaaaagaagtttacatttttttgctattgtgatataacatttatgtgcaagaactacttgtaataaaaggatttgagatgtcatgcttctaaatataatagcctaaaatagagaatattatgatttgaaagtgtagatttcacaaactctgtatagtatgtgggtctatctgaagcttttatcgaagctacctataaaataaaattttaaaagatctgt

SEQ ID NO: 337623 - DNA, 1062 bp, Artificial Sequence
  derived and/or modified sequence
atgaacgagtgccactacgacaagcacatggacttcttctacaaccgcagcaacaccgatacagtggatgactggaccgggacaaaactggtaatagtgctctgtgtgggtactttcttctgtctgttcatatttttcagcaattctctggtgatcgccgccgttatcaagaaccgtaagtttcacttccctttttattacctcctcgccaatctggctgcggcggatttttttgcagggatcgcttatgtatttctgatgttcaacacagggcctgtttcaaagaccctgaccgtcaaccgttggttccttcgccaaggcctgctggactcttctctgacggcctcgctgaccaatttgctcgtcattgccgtggaacgacacatgtcgattatgcggatgcgagtacatagtaacttgacaaaaaagcgggtcaccctgctcatattgttggtctgggctattgctatctttatgggcgctgtgcctacgcttggttggaattgtttatgcaacatatccgcatgctcatcgcttgcgccgatatactcaagatcttacctcgttttttggaccgtaagcaatttgatggccttcttaataatggtcgtggtgtacctcagaatctacgtgtacgtcaagcgcaagacaaatgtcctgagcccacatacatccgggtccataagtaggcgcaggacccccatgaagctcatgaagacggtgatgaccgtcctgggagcattcgtggtgtgttggacccccggactggttgtgcttctcttggatggactgaactgcagacagtgtggcgtccaacacgtaaaaaggtggtttctgctcctggctttactgaattccgtcgtaaaccctatcatctattcttacaaggacgaggacatgtacgggaccatgaagaaaatgatttgttgcttcagccaggaaaaccccgagcgccgtccaagtagaattccctcgacagtgttgtccaggagcgacacaggaagtcaatatatcgaagactccatcagccaaggtgccgtctgtaataagagtaccagttag

SEQ ID NO: 337624 - DNA, 1062 bp, Artificial Sequence
  derived and/or modified sequence
atgaacgagtgccactacgacaagcacatggacttcttctacaaccgcagcaatacggacacagtggacgactggacaggtacgaagctcgttatcgtgctttgcgtgggcactttcttttgtttatttatctttttctctaactctcttgttattgctgccgtcatcaagaatcgcaaatttcattttccgttctattatctgctggccaatctcgccgcagccgacttctttgcgggcattgcctatgtattcctaatgttcaacaccggtccagtgtccaagacactgaccgtaaaccgatggtttctgagacaaggcttgttagactctagtctgacggctagcctaactaacttactggtgattgcagtggagagacatatgagcatcatgaggatgagagttcatagcaacttaacaaaaaagcgggtcaccttgctaattctacttgtgtgggccattgctattttcatgggcgccgtgcccactcttggctggaattgtctgtgcaacatatcagcttgctctagcctggctcctatttacagccgatcctacctagtgttctggacagtttccaacctgatggccttcttaatcatggtggtggtatatcttaggatatacgtatatgtaaagcggaagaccaacgttctctccccacacacttcgggcagcatttccagaagacggactcctatgaagctgatgaaaacagtgatgactgtccttggcgcgtttgtcgtctgttggactcccggactggtggtactgctgctggacggcctaaattgtaggcagtgcggagtgcagcacgtcaagcgatggtttctgctattggcacttttgaattctgtggtcaacccgattatatactcctacaaagatgaagacatgtacggcacgatgaaaaaaatgatatgctgcttctctcaggaaaaccctgagagacggccctccagaattccgtcaaccgtgctatcacggtccgatacaggctcacagtacatcgaggacagtatctcacagggagctgtgtgcaataagagtacgtcctag

SEQ ID NO: 337625 - DNA, 1062 bp, Artificial Sequence
  derived and/or modified sequence
atgaatgagtgccactacgacaaacatatggactttttttacaatagatcaaacacagataccgttgacgattggacaggtaccaagctcgtgatcgtgctttgcgtgggcacatttttttgtttgttcatcttcttctctaactcactggtcattgccgctgtgattaaaaatagaaaattccacttccctttttactatctcctggcaaatctcgcggctgccgactttttcgccggaattgcctatgtgttcttaatgttcaacaccgggcctgtaagcaaaacactgacagtgaaccgatggtttctgaggcagggattacttgatagtagtttgaccgcaagcctgaccaatctcttagtcatcgcagtggagaggcatatgtctattatgcgtatgagggtccactctaatttgaccaagaaacgcgttactctcctcattctacttgtctgggcaatcgctatcttcatgggcgcagttccgacactgggatggaactgtctgtgtaacataagtgcatgcagcagcttggccccaatttatagtcgcagttatctggtgttttggacagtcagcaacctcatggccttccttattatggtagtggtgtatctgagaatttacgtttatgtgaaacggaaaaccaatgtgctatcaccacatacgtccgggtcaattagccgcagacggactccaatgaagcttatgaagaccgtgatgacagtgctgggcgcattcgttgtttgctggacccccggtctggtggtacttttactagatggcctcaattgtaggcaatgcggagtacagcatgttaaacgatggttccttctgctagccttgctgaacagtgttgtgaatccgatcatctactcttacaaggatgaggatatgtatgggacgatgaagaagatgatctgctgtttttcccaggagaaccccgagaggcgcccttcccggatcccaagcacagtcctcagtagaagcgacactgggtcccagtacattgaagacagtatttctcagggcgcagtgtgtaacaagtccacatcatag

SEQ ID NO: 337626 - DNA, 1062 bp, Artificial Sequence
  derived and/or modified sequence
atgaatgagtgccattatgacaagcatatggattttttttataataggtccaatacagacacggtagacgattggacaggaactaaattggtgattgtactctgcgtggggacatttttctgtctttttatcttcttcagcaattcactcgtaattgcagctgtaatcaagaatagaaaatttcactttcccttctactacttactcgccaacttagccgctgcggattttttcgcaggaatcgcctacgtgtttctcatgttcaataccggccctgtctcaaaaaccctcacagtcaataggtggttcctgcggcagggactgctcgatagcagtctaactgcttcactgactaatctgctagtgatcgctgtggaacgccatatgtcaattatgaggatgcgagtgcactctaatttgacaaagaagcgagttaccctgctgattctcttagtgtgggccatcgccatttttatgggcgcagtgccaactctcggctggaactgcctctgtaacatcagtgcatgtagctctctggcacccatctattcacggagttacctggtcttctggacagtgagcaatctaatggcattcttaatcatggtggtagtgtacctgaggatttacgtgtacgtgaaacggaagacaaatgtgctgagcccgcacacttccgggagcatttcaagaagacgtacgcccatgaagcttatgaagacagtcatgacggtactgggagccttcgtagtatgttggactcctggtctggtggtgctcttactcgatggtctgaactgtcgccagtgtggcgtgcagcacgttaagcggtggttcttgctgctggcccttctcaactctgtggttaaccccatcatttacagctataaggatgaagacatgtacggaacaatgaaaaaaatgatttgctgtttctcccaggaaaatcctgaaagaagaccgtcccgcataccatcgaccgttctgtcgagaagtgacaccgggtcccagtacattgaagattctatcagtcagggtgcagtctgcaacaagagcacttcctag

SEQ ID NO: 337627 - DNA, 1062 bp, Artificial Sequence
  derived and/or modified sequence
atgaacgagtgccactacgacaagcacatggacttcttctacaacagaagcaacaccgacaccgtggacgactggaccggcaccaagctggtgatcgtgctgtgcgtgggcaccttcttctgcctgttcatcttcttcagcaacagcctggtgatcgccgccgtgatcaagaacagaaagttccacttccccttctactacctgctggccaacctggccgccgccgacttcttcgccggcatcgcctacgtgttcctgatgttcaacaccggccccgtgagcaagaccctgaccgtgaacagatggttcctgagacagggcctgctggacagcagcctgaccgccagcctgaccaacctgctggtgatcgccgtggagagacacatgagcatcatgagaatgagagtgcacagcaacctgaccaagaagagagtgaccctgctgatcctgctggtgtgggccatcgccatcttcatgggcgccgtgcccaccctgggctggaactgcctgtgcaacatcagcgcctgcagcagcctggcccccatctacagcagaagctacctggtgttctggaccgtgagcaacctgatggccttcctgatcatggtggtggtgtacctgagaatctacgtgtacgtgaagagaaagaccaacgtgctgagcccccacaccagcggcagcatcagcagaagaagaacccccatgaagctgatgaagaccgtgatgaccgtgctgggcgccttcgtggtgtgctggacccccggcctggtggtgctgctgctggacggcctgaactgcagacagtgcggcgtgcagcacgtgaagagatggttcctgctgctggccctgctgaacagcgtggtgaaccccatcatctacagctacaaggacgaggacatgtacggcaccatgaagaagatgatctgctgcttcagccaggagaaccccgagagaagacccagcagaatccccagcaccgtgctgagcagaagcgacaccggcagccagtacatcgaggacagcatcagccagggcgccgtgtgcaacaagagcaccagctag

SEQ ID NO: 337628 - protein, 214 aa, Artificial Sequence
  derived and/or modified sequence
MAQGTLIRVTPEQPTHAVCVLGTLTQLDICSSAPEDCTSFSINASPGVVVDIAHGPPAKKKSTGSSTWPLDPGVEVTLTMKVASGSTGDQKVQISYYGPKTPPVKALLYLTGVDGVSPCHPGWSAMHDLAHCNLRLQVQAILCFSVPSSWTTGACHHAWLIFVFLVEMEFHHVGQAGLELLTSGDLPASGSQSARITGMNHCARPSIFLILKYL

SEQ ID NO: 337629 - protein, 127 aa, Artificial Sequence
  derived and/or modified sequence
MAQGTLIRVTPEQPTHAVCVLGTLTQLDICSSAPEDCTSFSINASPGVVVDIAHGPPAKKKSTGSSTWPLDPGVEVTLTMKVASGSTGDQKVQISYYGPKTPPVKALLYLTGVDGVSPCHPGWSAMA

SEQ ID NO: 337630 - DNA, 645 bp, Artificial Sequence
  derived and/or modified sequence
atggcacagggcacacttataagagtcacccccgagcagcctacccacgcagtctgcgtcctcggtacactcacacaattagatatctgtagcagcgccccagaagattgtaccagcttctctataaacgcctctcctggggtagtggttgacattgcacacggtcccccagccaaaaaaaagtccaccggatcgagcacgtggcctctcgaccctggagtggaagtgacactcacaatgaaagttgcaagcggatccacaggtgatcagaaagtccagatttcttactacgggccgaagaccccacccgtgaaggctttactgtatttgactggggtagatggggtgtcaccctgccatcccggctggtctgcgatgcatgatctggcccactgtaaccttcgcttgcaggtgcaggcaattctttgcttcagtgtgccgagttcatggacaacaggggcatgccaccacgcatggctgatcttcgtcttcctggtggagatggaattccatcacgtagggcaggcaggtctcgaattgcttaccagtggggatctaccagcctcagggtcccaaagcgcgagaatcactggaatgaatcattgcgctaggcccagtatcttcctgatacttaagtatctgtag

SEQ ID NO: 337631 - DNA, 384 bp, Artificial Sequence
  derived and/or modified sequence
atggctcaaggtactcttatacgagtaactccggagcagcctacacacgcagtctgtgtactgggaacactgacgcaattagacatttgttccagtgcgcctgaggattgtacgagtttcagcataaatgcgagcccaggtgtcgtggtagacatcgcccatgggccccctgccaagaaaaaaagcactggctcctctacttggcccctggatccaggtgtggaggtgactttgaccatgaaggtggcctcaggaagtaccggggatcaaaaagtccagatcagttattacggcccgaaaacaccacctgtgaaggccctgctgtacctgacgggcgtcgatggcgtgagtccttgtcacccaggctggagcgctatggcttag

SEQ ID NO: 337632 - DNA, 645 bp, Artificial Sequence
  derived and/or modified sequence
atggcccagggcaccctcatccgggtgaccccagagcagcccacccatgctgtgtgtgtgctgggcaccctgacccagctggacatctgcagcagcgcccctgaggactgcaccagcttcagcatcaatgccagccctggggtggtggtggacatcgcccacggccccccagccaagaagaagagcacaggcagcagcacctggcccctggaccccggggtggaggtgaccctgaccatgaaggtggccagcggcagcactggagaccagaaggtgcagatctcctactacggccccaagaccccacctgtgaaggccctgctgtacctgactggagtggatggagtgagcccctgccaccctggctggagcgccatgcatgacctggcccactgcaacctgcggctgcaggtgcaggccatcctgtgcttctctgtgcccagctcctggaccaccggggcctgccaccacgcctggctgatctttgtgttcctggtggagatggagttccaccacgtgggccaggccggcctggagctgctgaccagcggggacctgcctgccagcggcagccagagcgcccgcatcaccggcatgaaccactgtgcccggcccagcatcttcctgatcctgaagtacctgtag

SEQ ID NO: 337633 - DNA, 384 bp, Artificial Sequence
  derived and/or modified sequence
atggcccagggcaccctcatccgggtgaccccagagcagcccacccatgctgtgtgtgtgctgggcaccctgacccagctggacatctgcagcagcgcccctgaggactgcaccagcttcagcatcaatgccagccctggggtggtggtggacatcgcccacggccccccagccaagaagaagagcacaggcagcagcacctggcccctggaccccggggtggaggtgaccctgaccatgaaggtggccagcggcagcactggagaccagaaggtgcagatctcctactacggccccaagaccccacctgtgaaggccctgctgtacctgactggagtggatggagtgagcccctgccaccctggctggagcgccatggcctag

SEQ ID NO: 337634 - DNA, 645 bp, Artificial Sequence
  derived and/or modified sequence
atggcccagggcaccctgatccgggtgacccccgagcagcccacccacgccgtctgcgtgctggggactttgactcaactcgatatttgttcttccgctcctgaggactgtaccagttttagcattaatgcaagcccaggggtagtagtagatatagcccatgggcctccagcaaagaagaaatccaccgggtcttctacctggccactggatccaggggtagaagtgacccttaccatgaaggtcgcaagcggcagtacaggtgatcagaaggtgcagataagttactacggcccgaagacccctcccgtgaaagccctcctctatttgacaggcgtggatggtgtgtcgccatgtcaccctgggtggtccgccatgcacgatctggcacactgtaaccttcgactgcaagtccaggctatcctgtgtttttccgtcccctccagctggacgaccggagcctgccatcacgcttggctgattttcgtcttcctggtcgaaatggagtttcaccatgtcgggcaagccggcctggagctgcttacgtctggcgacctgcctgccagcggaagtcagagcgcacgtatcacaggaatgaaccattgtgcacggccctccatcttccttattctgaagtatctctag

SEQ ID NO: 337635 - DNA, 384 bp, Artificial Sequence
  derived and/or modified sequence
atggcccagggcaccctgatccgggtgacccccgagcagcccacccatgctgtttgtgtgttaggaactcttactcagctggacatttgcagctcagcccccgaagactgtacaagctttagtataaacgctagccctggagttgttgtagacatcgcccacggcccccccgctaagaaaaaatcgactgggagcagtacttggccactggatccaggagttgaggtgacattaacaatgaaggtggcctcagggtcaactggcgaccagaaggtgcaaattagttattatgggccgaaaacccctcctgtgaaggccctgctgtacctgacaggtgtcgacggggtgagtccttgtcacccaggatggtccgcgatggcctag

SEQ ID NO: 337636 - DNA, 833 bp, Artificial Sequence
  derived and/or modified sequence
acagccagagggacgagctagcccgacgatggcccaggggacattgatccgtgtgaccccagagcagcccacccatgccgtgtgtgtgctgggcaccttgactcagcttgacatctgcagctctgcccctgaggactgcacgtccttcagcatcaacgcctccccaggggtggtcgtggatattgcccacggccctccagccaagaagaaatccacaggttcctccacatggcccctggaccctggggtagaggtgaccctgacgatgaaagtggccagtggtagcacaggcgaccagaaggttcagatttcatactacggacccaagactccaccagtcaaagctctactctacctcaccggggtggatggagtctcaccctgtcacccaggctggagtgcaatgcatgatctcgctcactgcaacctgcgtctccaggttcaagcgatcctctgcttcagcgtccctagtagctggactacaggcgcttgccaccacgcctggctaatttttgtatttttagtagagatggagtttcaccatgttggccaggctggtctcgaacttctgacctcaggtgatctgcctgcctcaggctcccaaagtgctcggattactggcatgaaccactgcgccaggccctctatttttttgatactcaaatatctataacaaaaagtagataatgacactgtcttatacaagaatatagatagtgttcctcaaattccattatttatatctcatcttcaccatttctgccatatcaatgatccacctatactcatatttatgtaatgttcttctttaaataaaatccattcttaaactt

SEQ ID NO: 337637 - DNA, 841 bp, Artificial Sequence
  derived and/or modified sequence
acagccagagggacgagctagcccgacgatggcccaggggacattgatccgtgtgaccccagagcagcccacccatgccgtgtgtgtgctgggcaccttgactcagcttgacatctgcagctctgcccctgaggactgcacgtccttcagcatcaacgcctccccaggggtggtcgtggatattgcccacggccctccagccaagaagaaatccacaggttcctccacatggcccctggaccctggggtagaggtgaccctgacgatgaaagtggccagtggtagcacaggcgaccagaaggttcagatttcatactacggacccaagactccaccagtcaaagctctactctacctcaccggggtggatggagtctcaccctgtcacccaggctggagtgcaatggcatgatctcggctcactgcaacctgcgtctcccaggttcaagcgatcctcctgcttcagcgtccctagtagctgggactacaggcgcttgccaccacgcctggctaatttttgtatttttagtagagatggagtttcaccatgttggccaggctggtctcgaacttctgacctcaggtgatctgcctgcctcaggctcccaaagtgctcggattactggcatgaaccactgcgccaggccctctattcctttttgatacctcaaatatctataacaaaaagtagataatgacactgtcttatacaagaatatagatagtgttcctcaaattccattatttatatctcatcttcaccatttctgccatatcaatgatccacctatactcatatttatgtaatgttcttctttaaataaaatccattcttaaactt

SEQ ID NO: 337638 - DNA, 645 bp, Artificial Sequence
  derived and/or modified sequence
atggctcagggcacattaatcagggtgactccagagcagcccacgcacgctgtgtgtgtgttagggacactgacacagctggatatttgttcttcggcccctgaggactgcacaagttttagtattaacgcttcaccaggcgttgtggtcgacattgctcatgggcctccagccaagaaaaaatctacaggttcctccacctggccacttgatccaggtgtcgaagtgaccctgactatgaaagtggcttccggttctactggggaccagaaggttcagatatcctattacgggcctaaaacacccccagtgaaggcgctgctctatcttactggcgttgacggcgtatcaccgtgtcaccccggttggtccgcaatgcacgatctggctcactgtaatctgcgcctgcaggttcaggcaatactgtgcttttccgttcctagttcttggactaccggagcatgccaccatgcgtggttaattttcgtcttccttgtagagatggaattccaccacgtgggccaggcagggcttgagctcttgacgagcggagacctgcctgcgagcggctctcaatctgccaggattaccggtatgaaccattgcgctagaccttcaatcttccttatattgaaatacttatag

SEQ ID NO: 337639 - DNA, 384 bp, Artificial Sequence
  derived and/or modified sequence
atggcacaagggaccctcataagggtaacacctgaacaaccgacccatgctgtgtgtgtacttggtacgcttacgcagctagacatttgttcctctgctcccgaagattgcaccagttttagcataaatgcgagccccggagttgtggtggatattgctcacgggccacccgcaaagaaaaagtccactgggtcgagcacatggccgctggacccaggcgttgaagttaccctcacaatgaaagtagccagcggctccactggagaccagaaagttcaaattagctactacggtcccaaaactccccctgtcaaagcccttttgtatctgaccggggtcgatggggtgtctccctgccatcctggctggtccgccatggcatag

SEQ ID NO: 337640 - DNA, 645 bp, Artificial Sequence
  derived and/or modified sequence
atggcccagggcaccctgatcagagtgacccccgagcagcccacccacgccgtgtgcgtgctgggcaccctgacccagctggacatctgcagcagcgcccccgaggactgcaccagcttcagcatcaacgccagccccggcgtggtggtggacatcgcccacggcccccccgccaagaagaagagcaccggcagcagcacctggcccctggaccccggcgtggaggtgaccctgaccatgaaggtggccagcggcagcaccggcgaccagaaggtgcagatcagctactacggccccaagaccccccccgtgaaggccctgctgtacctgaccggcgtggacggcgtgagcccctgccaccccggctggagcgccatgcacgacctggcccactgcaacctgagactgcaggtgcaggccatcctgtgcttcagcgtgcccagcagctggaccaccggcgcctgccaccacgcctggctgatcttcgtgttcctggtggagatggagttccaccacgtgggccaggccggcctggagctgctgaccagcggcgacctgcccgccagcggcagccagagcgccagaatcaccggcatgaaccactgcgccagacccagcatcttcctgatcctgaagtacctgtag

SEQ ID NO: 337641 - DNA, 384 bp, Artificial Sequence
  derived and/or modified sequence
atggcccagggcaccctgatcagagtgacccccgagcagcccacccacgccgtgtgcgtgctgggcaccctgacccagctggacatctgcagcagcgcccccgaggactgcaccagcttcagcatcaacgccagccccggcgtggtggtggacatcgcccacggcccccccgccaagaagaagagcaccggcagcagcacctggcccctggaccccggcgtggaggtgaccctgaccatgaaggtggccagcggcagcaccggcgaccagaaggtgcagatcagctactacggccccaagaccccccccgtgaaggccctgctgtacctgaccggcgtggacggcgtgagcccctgccaccccggctggagcgccatggcctag

SEQ ID NO: 337642 - protein, 185 aa, Artificial Sequence
  derived and/or modified sequence
MVDMMKEALEKLQLNIVEMKDENATLDGGDVLFTGREFFVGLSKRTNQRGAEILADTFKDYAVSTVPVADGLHLKSFCSMAGPNLIAIGSSESAQKALKIMQQMSDHRYDKLTVPDDIAANCIYLNIPNKGHVLLHRTPEEYPESAKVYEKLKDHMLIPVSMSELEKVDGLLTCCSVLINKKVDS

SEQ ID NO: 337643 - DNA, 579 bp, Artificial Sequence
  derived and/or modified sequence
atgtggctgtatgggctgggccaagtggatatgatgaaggaggctctcgagaagctccaactcaatatagttgaaatgaaagatgagaacgccaccctagatggcggagacgtgttgttcactggccgtgagttcttcgttggactctcgaagagaacaaaccagaggggcgctgagatcttggccgacacatttaaagattatgccgtctccaccgtgccggttgccgatggactacaccttaagtccttttgctctatggccgggccgaacttgattgcaataggttcctccgagagcgcccagaaagctctcaagataatgcagcagatgagcgaccacaggtacgacaagcttacagtgcccgacgacattgctgccaattgcatttacttgaacattccaaataaaggccacgtcctgctgcaccgcacacctgaggagtatccagaatccgcaaaagtgtacgaaaaacttaaggaccacatgttgattccagtgtcgatgagcgagttggaaaaggttgacggccttctaacctgctgcagcgtgctaatcaataagaaggtggattcatag

SEQ ID NO: 337644 - DNA, 558 bp, Artificial Sequence
  derived and/or modified sequence
atggtcgatatgatgaaagaggcacttgaaaagctgcagttgaacatcgttgagatgaaggacgagaatgctacattggacggcggagacgtactgttcacaggcagagagttctttgtcggtttgagcaaaaggaccaaccagcgcggcgccgagatcctggcggacacttttaaagactatgcagtgtcaactgtgcctgtagcagatggacttcaccttaaatctttttgtagtatggctggcccgaatctaattgccattgggtcatccgaatccgctcagaaagccctgaagattatgcagcagatgtctgatcaccgctatgacaagctcaccgtccccgacgacatcgcagctaattgcatatacctgaatatcccaaataaaggacacgtgctgctgcatcgaacaccagaggagtaccccgaatctgccaaggtctacgaaaaactgaaagatcacatgctaatccctgtcagcatgagcgagttggagaaggttgatggtctgcttacctgttgttctgtgctgatcaataaaaaggtggacagctag

SEQ ID NO: 337645 - DNA, 579 bp, Artificial Sequence
  derived and/or modified sequence
atgtggctgtatggcctgggccaggtggacatgatgaaggaggccctggagaagctgcagctgaacatcgtggagatgaaggatgaaaatgccaccctggatggaggagatgtgctcttcaccggccgggagttctttgtgggcctgagcaagaggaccaaccagagaggagctgagatcctggccgacaccttcaaggactatgctgtgtccacagtgcctgtggctgatggcctgcacctgaagagcttctgcagcatggccggccccaacctgattgccatcggcagcagcgagagcgcccagaaggccctgaagatcatgcagcagatgtctgaccacagatatgacaagctgactgtgcctgatgacattgctgccaactgcatctacctgaacatccccaacaagggccacgtgctgctgcacaggaccccagaggagtacccagagagcgccaaggtgtatgagaagctgaaggaccacatgctgatccctgtgtccatgtctgagctggagaaggtggatggcctgctgacctgctgcagcgtgctgatcaacaagaaggtggacagctag

SEQ ID NO: 337646 - DNA, 558 bp, Artificial Sequence
  derived and/or modified sequence
atggtggacatgatgaaggaggccctggagaagctgcagctgaacatcgtggagatgaaggatgaaaatgccaccctggatggaggagatgtgctcttcaccggccgggagttctttgtgggcctgagcaagaggaccaaccagagaggagctgagatcctggccgacaccttcaaggactatgctgtgtccacagtgcctgtggctgatggcctgcacctgaagagcttctgcagcatggccggccccaacctgattgccatcggcagcagcgagagcgcccagaaggccctgaagatcatgcagcagatgtctgaccacagatatgacaagctgactgtgcctgatgacattgctgccaactgcatctacctgaacatccccaacaagggccacgtgctgctgcacaggaccccagaggagtacccagagagcgccaaggtgtatgagaagctgaaggaccacatgctgatccctgtgtccatgtctgagctggagaaggtggatggcctgctgacctgctgcagcgtgctgatcaacaagaaggtggacagctag

SEQ ID NO: 337647 - DNA, 579 bp, Artificial Sequence
  derived and/or modified sequence
atgtggctgtacggcctgggccaggtggacatgatgaaggaggcccttgaaaaactgcagctgaacattgttgaaatgaaagacgagaacgcgaccctcgatggaggagacgtgctgtttaccggtagggagtttttcgttgggttgagcaagcgaacaaaccagcggggcgccgaaatcctcgctgatactttcaaggactatgctgtctcgactgtgcctgttgccgatggtctgcatctgaagagcttttgctcaatggcaggcccgaatttgatcgctatcggttcaagcgaatcagcacagaaggccctcaaaattatgcagcagatgagcgatcatcgctatgacaagctgaccgtccctgacgacattgcagcgaattgcatttatctgaatatccccaataaggggcatgtcttgctgcatcgcacaccagaggaatatcccgagtccgcaaaagtgtatgagaaactgaaggatcatatgctgatccccgtatccatgagcgagttagagaaagtggatggcctgcttacttgctgcagcgttctcatcaataagaaagtggactcttag

SEQ ID NO: 337648 - DNA, 558 bp, Artificial Sequence
  derived and/or modified sequence
atggtggacatgatgaaggaggccctggagaagctgcagctgaacattgtggagatgaaagatgagaacgctaccttggacgggggtgacgtgctgttcaccggacgggagttctttgtcgggctgtcgaagcgaaccaaccagaggggagctgagattctggcggataccttcaaggactatgcagttagcaccgtgcctgtggccgacggactacacctcaaaagcttctgtagtatggctggccctaatctgatcgccattggttcctcggaaagtgcacagaaggcattaaagattatgcagcaaatgtctgatcatagatatgacaagctgacggtgcctgatgacattgcagctaactgcatttatcttaacattcccaacaaaggacatgttctgctgcacagaacacccgaggagtatccagagtcagcaaaagtttatgaaaaactcaaagaccacatgttgatcccagtgtctatgagcgaattggagaaagtcgatggtttgcttacctgctgctcagtcctcatcaacaagaaggtcgattcttag

SEQ ID NO: 337649 - DNA, 579 bp, Artificial Sequence
  derived and/or modified sequence
atgtggctgtacggcttgggccaggttgatatgatgaaagaagccctggaaaagttgcaactcaacatcgtggagatgaaggacgaaaatgctacattggacggtggagatgtgctctttaccgggagggagttcttcgtcgggctatctaagcgcaccaatcagcggggtgcggagattcttgcggacacctttaaggactacgctgtttcgaccgtgccagtggcagacggcctgcatctgaagtcgttttgctctatggcaggccctaatttgatcgccatcggtagttctgaatcggctcaaaaagccctaaagattatgcagcagatgtcagatcaccggtatgataaactgactgtgccagatgacatcgccgctaattgtatatacctcaatatccccaacaagggccacgttctgttgcataggacccccgaggagtaccccgagtctgcaaaagtttacgagaagttaaaggatcacatgctcatccccgtgagtatgagtgagctggaaaaagttgacggattattgacctgctgctctgtgctgatcaataaaaaggtggattcttag

SEQ ID NO: 337650 - DNA, 558 bp, Artificial Sequence
  derived and/or modified sequence
atggtggatatgatgaaggaagcactcgagaagttgcagcttaatatcgtggaaatgaaagatgagaacgccactctggacggtggagacgtcttattcacaggcagagagttctttgtcgggctgtctaaacggaccaaccagcgaggcgcagagattctggccgacacatttaaagattatgccgtgtctacggtgcctgtcgccgatggcctccaccttaagtcattttgttcaatggcaggcccaaatcttatcgcgatcggcagctcagaaagcgcccaaaaggcgctgaagatcatgcaacaaatgagcgaccatcgttatgataaactcaccgtcccagacgacatcgctgctaattgcatctatctgaacattcctaacaaaggtcatgtgctgctccacaggacgcccgaagagtatcccgagtccgcaaaggtctatgaaaagttgaaagatcacatgttaatacccgtctcgatgagcgagctcgagaaagtagatggtctgctcacctgctgcagcgtcttgatcaataagaaggtcgactcctag

SEQ ID NO: 337651 - DNA, 579 bp, Artificial Sequence
  derived and/or modified sequence
atgtggctgtacggcctgggccaggtggacatgatgaaggaggccctggagaagctgcagctgaacatcgtggagatgaaggacgagaacgccaccctggacggcggcgacgtgctgttcaccggcagagagttcttcgtgggcctgagcaagagaaccaaccagagaggcgccgagatcctggccgacaccttcaaggactacgccgtgagcaccgtgcccgtggccgacggcctgcacctgaagagcttctgcagcatggccggccccaacctgatcgccatcggcagcagcgagagcgcccagaaggccctgaagatcatgcagcagatgagcgaccacagatacgacaagctgaccgtgcccgacgacatcgccgccaactgcatctacctgaacatccccaacaagggccacgtgctgctgcacagaacccccgaggagtaccccgagagcgccaaggtgtacgagaagctgaaggaccacatgctgatccccgtgagcatgagcgagctggagaaggtggacggcctgctgacctgctgcagcgtgctgatcaacaagaaggtggacagctag

SEQ ID NO: 337652 - DNA, 558 bp, Artificial Sequence
  derived and/or modified sequence
atggtggacatgatgaaggaggccctggagaagctgcagctgaacatcgtggagatgaaggacgagaacgccaccctggacggcggcgacgtgctgttcaccggcagagagttcttcgtgggcctgagcaagagaaccaaccagagaggcgccgagatcctggccgacaccttcaaggactacgccgtgagcaccgtgcccgtggccgacggcctgcacctgaagagcttctgcagcatggccggccccaacctgatcgccatcggcagcagcgagagcgcccagaaggccctgaagatcatgcagcagatgagcgaccacagatacgacaagctgaccgtgcccgacgacatcgccgccaactgcatctacctgaacatccccaacaagggccacgtgctgctgcacagaacccccgaggagtaccccgagagcgccaaggtgtacgagaagctgaaggaccacatgctgatccccgtgagcatgagcgagctggagaaggtggacggcctgctgacctgctgcagcgtgctgatcaacaagaaggtggacagctag

SEQ ID NO: 337653 - DNA, 1043 bp, Artificial Sequence
  derived and/or modified sequence
agtcagagagaagttcattgttcacacctcccggctgccggcagccttctggaggatccgattcaatgtggttgtacggtctcgggcaggttgacatgatgaaagaagcattagaaaaacttcagctcaatatagtagagatgaaagatgaaaatgcaactttagatggcggagatgttttattcacaggcagagaattttttgtgggcctttccaaaaggacaaatcaacgaggtgctgaaatcttggctgatacttttaaggactatgcagtctccacagtgccagtggcagatgggttgcatttgaagagtttctgcagcatggctgggcctaacctgatcgcaattgggtctagtgaatctgcacagaaggcccttaagatcatgcaacagatgagtgaccaccgctacgacaaactcactgtgcctgatgacatagcagcaaactgtatatatctaaatatccccaacaaagggcacgtcttgctgcaccgaaccccggaagagtatccagaaagtgcaaaggtttatgagaaactgaaggaccatatgctgatccccgtgagcatgtctgaactggaaaaggtggatgggctgctcacctgctgctcagttttaattaacaagaaagtagactcctgagctgcagagtcccccccggttgccggcaagaccgcacaggcaaggccgatgactctgtgcccactcctgttgttttccttgacaatctactgtgccactgtgctactaactcttgtttacaaaatttgattctaagttgaattgcttcattcaacacccccaccctccctcccctcgaggtggtacctaagctgtggatttgctaaatgaattaagcaacctagaagatacagagctaatgaattatcaaaatgtgattaatcccagtaaggaaacactcatttagtgtctgtatttttggtgtgaaaattatttagttgccagtatattctgaagaatgtcttcttgatcagtcagataagcttgctttttttttttttttttttcatgaatcatgtt

SEQ ID NO: 337654 - DNA, 4017 bp, Artificial Sequence
  derived and/or modified sequence
gtttgtttctggacttcaactggggaatcttgaggatgagtttgccccagaagagaaatttagagaaccttaccgtcagctgcccatttaaagcagggggtgtgttgtgggatgggggtgggaagctggagcaacagggccaggaggtgtgggagcgggagacactagagtaacctatgtgcacagcctctccatataccatgtgctgttgcgcctgctagtaatcgacgacattaggcaagagaaacagcggctcctcaagtcctgcccaaagaccgtccagaaaccccagcctcccgtcgccttctcgccgcctccgctgggagccgcagatcagtccaagttgacggacaggaggcgaaatgtgcaaatgtttatggtttcatctgtatggaaaaggagctctggtaactttggccaagacttttcagtaggaaatgcttcaaaatacaaagcaagagctattttcaagaaagaccttctaaatttatattaggttgacatgatgaaagaagcattagaaaaacttcagctcaatatagtagagatgaaagatgaaaatgcaactttagatggcggagatgttttattcacaggcagagaattttttgtgggcctttccaaaaggacaaatcaacgaggtgctgaaatcttggctgatacttttaaggactatgcagtctccacagtgccagtggcagatgggttgcatttgaagagtttctgcagcatggctgggcctaacctgatcgcaattgggtctagtgaatctgcacagaaggcccttaagatcatgcaacagatgagtgaccaccgctacgacaaactcactgtgcctgatgacatagcagcaaactgtatatatctaaatatccccaacaaagggcacgtcttgctgcaccgaaccccggaagagtatccagaaagtgcaaaggtttatgagaaactgaaggaccatatgctgatccccgtgagcatgtctgaactggaaaaggtggatgggctgctcacctgctgctcagttttaattaacaagaaagtagactcctgagctgcagagtcccccccggttgccggcaagaccgcacaggcaaggccgatgactctgtgcccactcctgttgttttccttgacaatctactgtgccactgtgctactaactcttgtttacaaaatttgattctaagttgaattgcttcattcaacacccccaccctccctcccctcgaggtggtacctaagctgtggatttgctaaatgaattaagcaacctagaagatacagagctaatgaattatcaaaatgtgattaatcccagtaaggaaacactcatttagtgtctgtatttttggtgtgaaaattatttagttgccagtatattctgaagaatgtcttcttgatcagtcagataagcttgctttttttttttttttttttcatgaatcatgtttggttcctgtgaaagtccctggtccagggatcctcctcctttctcttttacttctgaattctgaaattcagttagttacttttgcctttcgctcttctatcacagccaccttgaccttgggtaaaacccaaggtctttccttctggctaccttcctgcaggtccaccctgtctgccattggtctcctctgcctctgactacatctgccaccaacaaccctcccctcacccctgccaggggcagacaggcttctcagcagaactgtgactgaaatcagagctgctgtctggggcagtgttaactacacagaggcacatcctgacagggtttgccccagagatctaaattccagaaggagggcaccacacctaggaaggtaaatccagtatcagaaggttgctaaaagattaaagatcaagaagcttggaaacatcccatgggtacaatgtcttagaaagtctttaagtcacataccatgaatttttgcttcattactgaccatatatgaccttggaggaactcttttttttttttccttctactcatttctgtttccacctaccctgactcaccgtatttccagtcttctacccctgcagttatcctagtccagcaaagtcatttctttcaaaagagacatcatgtctgaaaataattactggtagtctaatatgagccagagtaaacagctcctcatggtcaatgaacatgttcaggaagcgatcaccttgatgcttgaacccaaccccagacagtggacaattctactttgaaatatccgtgaatatttactgtgggatccaatttaaacttctttcttctctagcctttaaattacacaactttgaactgacacggatctcttacaaagaacaatgcggcactgaaggaagagatgattcctttactcaaacctgcaggaatcagcctattaacaggcaggggaaacggtactttccaatgaatggtaactgatccaggcacattatcacacttcctagtcatctccacctttcctgtattgcctgtggcttgttgtttaagattaagaatcaaagagattaagaagtatcacttcaaatcttgctctgctcacttctatgtttgcagtcaaattattccttatgttggtgacctaaagagaattactttcattcatttcatttcccccgtagcagatggaaggagaaacctctgagaaaatgaaaacatccttaaccactatctttcccttttatttgattattttatgtcagaaatttgcaaaagtttttttctcctccttctcttccttgttgcttaactttttaattcatgccatatgcagatatccaattatgtgcatcctgtgaataaaccacgtcttggtcactgtcatattttgaaccatctcatcagagatgaataatatctttttaccagagagagaacgaatgttagccacatgcccaagttaacaaagaaaaaatgttctcaaggttgtccttttgggttaaatctggcccttccttggcaaaagcaaaaattctccctgtgagagctcaacatctcaaatacaaccacaggaaaaatggcccaatctgccagtttaggcttaccagcatataatttttaatatctttacttctatcatcccaaatcaaagaactcttctctattatgtttaatcaattgcaagcaaatagatttttctttgtaacaatttgttctgcagaaggctgtttttcacttttcctttcttttgcttctttctgtctttccttctcttttgtctggagaaatcacttagactctgtgtgcctcttctacattgcattctgctctgctatgttacctgctaggctggcttctttggactccctatatgattgatgatgtgaaaacctaaattacttgcagcatagtattacttctttgatgttctcattagcataatgttatttttgaaaaggaaagatactatcacataagttttcctcatctgttgtgatatacaccaatggataaactaacggaaactgctttttgacattaaaagacaggagaaattatatttaactaagtaaaagttaagtcagaattacttgggtgatgtgattcaatttagttaaaggatgatatagagaaaatacattatttagcattatttcttcagctataatgaattgctatagaaatcaggcagatctttctaatgtgtattgattggtcttttcagctactctgaacagattactaaggccatctcctcatctctaagggagaaaaatagtctgtagatgaataatgtaaggtaaagagttgcatgtcagtctttgtaattatttacactttaactttctccagaactcagacatgatttcaacatggtgttagatttgtgcattttattttcctgaccacctcattccagccaatgtatggttatccactctgtgtgccaaaaccaatcatgcctttcacggccctttagttcagagaagttctgcactgatttttagtctcttgatgtctcaatcttacatgtataccaatcacaatggaataaagtgttgagttgtactgtg

SEQ ID NO: 337655 - DNA, 1066 bp, Artificial Sequence
  derived and/or modified sequence
cagactgttcttcagtaacacaggtggatgttaaaacagggaatctgttgaaaagattgcggaggaactgcttcccaaaagcagttctggatggcaatttgatggcagtcagctatggttgacatgatgaaagaagcattagaaaaacttcagctcaatatagtagagatgaaagatgaaaatgcaactttagatggcggagatgttttattcacaggcagagaattttttgtgggcctttccaaaaggacaaatcaacgaggtgctgaaatcttggctgatacttttaaggactatgcagtctccacagtgccagtggcagatgggttgcatttgaagagtttctgcagcatggctgggcctaacctgatcgcaattgggtctagtgaatctgcacagaaggcccttaagatcatgcaacagatgagtgaccaccgctacgacaaactcactgtgcctgatgacatagcagcaaactgtatatatctaaatatccccaacaaagggcacgtcttgctgcaccgaaccccggaagagtatccagaaagtgcaaaggtttatgagaaactgaaggaccatatgctgatccccgtgagcatgtctgaactggaaaaggtggatgggctgctcacctgctgctcagttttaattaacaagaaagtagactcctgagctgcagagtcccccccggttgccggcaagaccgcacaggcaaggccgatgactctgtgcccactcctgttgttttccttgacaatctactgtgccactgtgctactaactcttgtttacaaaatttgattctaagttgaattgcttcattcaacacccccaccctccctcccctcgaggtggtacctaagctgtggatttgctaaatgaattaagcaacctagaagatacagagctaatgaattatcaaaatgtgattaatcccagtaaggaaacactcatttagtgtctgtatttttggtgtgaaaattatttagttgccagtatattctgaagaatgtcttcttgatcagtcagataagcttgctttttttttttttttttttcatgaatc

SEQ ID NO: 337656 - DNA, 1035 bp, Artificial Sequence
  derived and/or modified sequence
atgagaagaagaagagaggaggagggcatccagctgagaaagcagaagagagagcagcagctgttcaagagaagaaacgtggagctgatcaacgaggaggccgccatgttcgacagcctgctgatggacagctacgtgagcagcaccaccggcgagagcgtgatcaccagagagatggtggagatgctgttcagcgacgacagcgacctgcagctggccaccacccagaagttcagaaagctgctgagcaaggagcccagcccccccatcgacgaggtgatcaacacccccagagtggtggacagattcgtggagttcctgaagagaaacgagaactgcaccctgcaggccgtgtgggccctgggcaacatcgccggcgacagcagcgtgtgcagagactacgtgctgaactgcagcatcctgaaccccctgctgaccctgctgaccaagagcaccagactgaccatgaccagaaacgccgtgtgggccctgagcaacctgtgcagaggcaagaaccccccccccgagttcgccaaggtgagcccctgcctgcccgtgctgagcagactgctgttcagcagcgacagcgacctgctggccgacgcctgctgggccctgagctacctgagcgacggccccaacgagaagatccaggccgtgatcgacagcggcgtgtgcagaagactggtggagctgctgatgcacaacgactacaaggtggccagccccgccctgagagccgtgggcaacatcgtgaccggcgacgacatccagacccaggtgatcctgaactgcagcgccctgccctgcctgctgcacctgctgagcagccccaaggagagcatcagaaaggaggcctgctggaccatcagcaacatcaccgccggcaacagagcccagatccaggccgtgatcgacgccaacatcttccccgtgctgatcgagatcctgcagaaggccgagttcagaaccagaaaggaggccgcctgggccatcaccaacgccaccagcggcggcacccccgagcagatctag

SEQ ID NO: 337657 - DNA, 966 bp, Artificial Sequence
  derived and/or modified sequence
agaagaaacgtggagctgatcaacgaggaggccgccatgttcgacagcctgctgatggacagctacgtgagcagcaccaccggcgagagcgtgatcaccagagagatggtggagatgctgttcagcgacgacagcgacctgcagctggccaccacccagaagttcagaaagctgctgagcaaggagcccagcccccccatcgacgaggtgatcaacacccccagagtggtggacagattcgtggagttcctgaagagaaacgagaactgcaccctgcaggccgtgtgggccctgggcaacatcgccggcgacagcagcgtgtgcagagactacgtgctgaactgcagcatcctgaaccccctgctgaccctgctgaccaagagcaccagactgaccatgaccagaaacgccgtgtgggccctgagcaacctgtgcagaggcaagaaccccccccccgagttcgccaaggtgagcccctgcctgcccgtgctgagcagactgctgttcagcagcgacagcgacctgctggccgacgcctgctgggccctgagctacctgagcgacggccccaacgagaagatccaggccgtgatcgacagcggcgtgtgcagaagactggtggagctgctgatgcacaacgactacaaggtggccagccccgccctgagagccgtgggcaacatcgtgaccggcgacgacatccagacccaggtgatcctgaactgcagcgccctgccctgcctgctgcacctgctgagcagccccaaggagagcatcagaaaggaggcctgctggaccatcagcaacatcaccgccggcaacagagcccagatccaggccgtgatcgacgccaacatcttccccgtgctgatcgagatcctgcagaaggccgagttcagaaccagaaaggaggccgcctgggccatcaccaacgccaccagcggcggcacccccgagcagatctag

SEQ ID NO: 337658 - DNA, 1602 bp, Artificial Sequence
  derived and/or modified sequence
atggccagccccggcaaggacaactacagaatgaagagctacaagaacaacgccctgaaccccgaggagatgagaagaagaagagaggaggagggcatccagctgagaaagcagaagagagagcagcagctgttcaagagaagaaacgtggagctgatcaacgaggaggccgccatgttcgacagcctgctgatggacagctacgtgagcagcaccaccggcgagagcgtgatcaccagagagatggtggagatgctgttcagcgacgacagcgacctgcagctggccaccacccagaagttcagaaagctgctgagcaaggagcccagcccccccatcgacgaggtgatcaacacccccagagtggtggacagattcgtggagttcctgaagagaaacgagaactgcaccctgcagttcgaggccgcctgggccctgaccaacatcgccagcggcaccagccagcagaccaagatcgtgatcgaggccggcgccgtgcccatcttcatcgagctgctgaacagcgacttcgaggacgtgcaggagcaggccgtgtgggccctgggcaacatcgccggcgacagcagcgtgtgcagagactacgtgctgaactgcagcatcctgaaccccctgctgaccctgctgaccaagagcaccagactgaccatgaccagaaacgccgtgtgggccctgagcaacctgtgcagaggcaagaaccccccccccgagttcgccaaggtgagcccctgcctgcccgtgctgagcagactgctgttcagcagcgacagcgacctgctggccgacgcctgctgggccctgagctacctgagcgacggccccaacgagaagatccaggccgtgatcgacagcggcgtgtgcagaagactggtggagctgctgatgcacaacgactacaaggtggccagccccgccctgagagccgtgggcaacatcgtgaccggcgacgacatccagacccaggtgatcctgaactgcagcgccctgccctgcctgctgcacctgctgagcagccccaaggagagcatcagaaaggaggcctgctggaccatcagcaacatcaccgccggcaacagagcccagatccaggccgtgatcgacgccaacatcttccccgtgctgatcgagatcctgcagaaggccgagttcagaaccagaaaggaggccgcctgggccatcaccaacgccaccagcggcggcacccccgagcagatcagatacctggtgagcctgggctgcatcaagcccctgtgcgacctgctgaccgtgatggacagcaagatcgtgcaggtggccctgaacggcctggagaacatcctgagactgggcgagcaggagggcaagagaagcggcagcggcgtgaacccctactgcggcctgatcgaggaggcctacggcctggacaagatcgagttcctgcagagccacgagaaccaggagatctaccagaaggccttcgacctgatcgagcactacttcggcgtggaggacgacgacagcagcctggccccccaggtggacgagacccagcagcagttcatcttccagcagcccgaggcccccatggagggcttccagctgtag

SEQ ID NO: 337659 - DNA, 1035 bp, Artificial Sequence
  derived and/or modified sequence
atgcggcggcggagggaggaagagggaatccagctgcgcaagcagaaacgagagcagcagttgtttaagcggagaaatgtggagctgataaatgaggaagccgctatgtttgactctctcctgatggacagctacgtgtccagcacaactggggagagtgtcatcactcgcgaaatggttgaaatgcttttttctgatgattccgacctgcaactcgccacaacccaaaaatttcggaagctgttaagcaaggaacctagcccacctattgatgaagtaattaacaccccaagggtggttgaccggtttgttgagtttcttaagaggaatgagaactgcactctacaggcagtttgggctctcgggaatatcgccggagattccagcgtttgccgcgactacgtacttaactgtagcattttaaatccattgctgactttactcacaaagtccactcgccttacaatgacccgcaacgctgtatgggccctgtccaacttatgccgcggcaaaaaccccccccccgaattcgccaaggtcagcccttgcctgccggtgctttcacgattattgttcagtagcgatagtgacctgttggctgacgcctgttgggctctttcgtatctgtctgacggcccaaatgaaaagattcaggccgtaatcgactccggggtttgtagaagactagtggaactcctgatgcacaacgattataaggtggcatctccagctctgcgggccgttggaaacatcgttaccggcgacgacattcagactcaggtgatcctaaactgctctgccctcccatgcctgttacacctactttccagtcccaaggaatccatccgcaaggaggcctgttggaccatttccaatattaccgcaggtaatcgagcgcagatccaggccgtgatagatgccaacatcttccctgtgctgattgagattctgcaaaaggctgaatttagaacccggaaagaggcagcatgggcgataacgaacgctacctccgggggcactccagaacagatctag

SEQ ID NO: 337660 - DNA, 966 bp, Artificial Sequence
  derived and/or modified sequence
agaaggaatgtggaactgattaatgaggaagcggctatgttcgatagtctcctgatggattcctacgtaagcagtacgaccggtgagtctgtaatcactagagaaatggtcgagatgctgttcagcgacgacagcgacctgcagctagctacaacccagaagtttaggaaactactgtccaaggagccaagccctcccatagatgaggtaattaacaccccacgcgtggtagaccggtttgtggaattcttgaagcgcaatgagaattgtaccctgcaggcagtttgggcacttgggaatatagcgggggatagctccgtatgcagggactatgtgctaaactgttccatcctgaaccctctcttgacgctgctcaccaagagcacccggctgacaatgactaggaacgccgtttgggcgctgtccaatctgtgccgcgggaagaaccctccgcccgagtttgccaaggtgtcgccttgtcttcccgtgctgagccgccttctgttcagctcagattcagacctgttggcggacgcttgctgggccctcagctacttatctgacgggcctaacgaaaagattcaagccgtgattgacagtggtgtctgcagacggctagtggaattgctgatgcataatgactataaagtggcatcccccgccctacgggccgttggaaatattgtgacaggcgacgacattcagacacaagtgatcctaaactgttccgccctgccgtgcctgttgcatttgctgtcctctcccaaagaatcgattcggaaggaggcatgttggactatcagtaatatcaccgccggaaatcgagcccaaatacaggccgtgattgacgcgaatatctttccggtgctgatagagatcctccaaaaggccgagtttcggaccagaaaagaggccgcctgggcaatcactaacgccactagtggcggcacacccgagcagatttag

SEQ ID NO: 337661 - DNA, 1602 bp, Artificial Sequence
  derived and/or modified sequence
atggcatcacctggcaaggacaattatagaatgaaatcatacaagaacaatgcactcaatcctgaggaaatgcgcagacgcagagaggaagaggggatccagctgcgaaagcagaagcgtgagcaacagctattcaaaaggagaaatgttgaactcatcaacgaggaggctgccatgtttgattcactgcttatggatagctacgtgtcttccacaaccggcgaatcagtgataaccagagagatggtcgaaatgttgttctcagatgactccgaccttcaattagcaaccacccagaagtttcggaaattactgagcaaggagccatcacctccaatcgacgaggtcatcaacactcctagggtagtggaccgcttcgtagagtttctcaagaggaatgagaattgcaccttacaatttgaggctgcctgggcgttaaccaatattgctagcggaacatctcagcagactaagattgtaatcgaggctggggccgttcccatcttcatcgagttattaaacagcgattttgaagacgtacaggagcaagccgtttgggccctaggcaatattgcaggcgactccagtgtgtgccgggactatgtgcttaactgtagcatcctcaatcctttgctgacccttcttaccaaatccacacgactgaccatgacaaggaacgccgtgtgggccctgtccaatctgtgccgagggaaaaatcctccccccgagttcgccaaggtgagcccctgtctgcccgtcctgagccggctattgttttcttccgatagcgatcttctcgctgatgcctgctgggctcttagttacttgagcgacggacctaatgaaaaaattcaggctgtgatagactcaggagtgtgccgacgcttggtcgagctcctgatgcataatgattacaaagtggcctctcctgctctgcgagccgtgggcaacatagtcactggggacgatatccagacgcaggtaatcctgaactgctcggcactgccatgcctgctgcatctcctgtcaagccctaaagaaagtattagaaaggaggcctgctggactattagcaacattacagccgggaaccgggcccaaattcaggccgtcatcgacgctaacatcttcccagtgttgatagagatcctgcagaaggcagaatttcgcacccgaaaagaggccgcatgggccattacgaacgcaacgagcggcgggacccccgaacagatccgatacctggtgtccttaggttgtatcaagcctctgtgtgatctgctgactgtcatggattccaagatagtccaggttgcattaaatggactcgagaatattcttcggctcggagaacaggagggcaagcgttccggaagcggcgtcaacccatattgcggacttattgaagaggcttatggcctcgataagatcgagttccttcagtcccatgaaaatcaggagatataccagaaagcgtttgatttgatcgaacattactttggcgtggaagacgacgactcaagtctggcaccccaagtggatgagacccagcaacagtttatatttcaacagcccgaagcgccaatggaaggctttcagctgtag

SEQ ID NO: 337662 - DNA, 1035 bp, Artificial Sequence
  derived and/or modified sequence
atgagaagaagaagagaggaggagggcatccagctgaggaagcagaagcgggagcagcagctgttcaagagaagaaatgtggagctgatcaatgaggaggccgccatgtttgacagcctgctgatggacagctatgtgagcagcaccaccggggagagcgtcatcacccgggagatggtggagatgctgttcagtgatgacagcgacctgcagctggccaccacccagaagttcaggaagctgctgagcaaggagcccagcccccccattgatgaagtcatcaacaccccccgggtggtggacagatttgtggagttcctgaagagaaatgaaaactgcaccctgcaggccgtgtgggccctgggcaacattgctggggacagctctgtgtgccgggactatgtgctgaactgcagcatcctgaaccccctgctgaccctgctgaccaagagcacccggctgaccatgaccagaaatgctgtgtgggccctgagcaacctgtgccggggcaagaaccccccacctgagtttgccaaggtgagcccctgcctgcctgtgctgagccggctgctcttcagcagtgacagcgacctgctggctgatgcctgctgggccctgagctacctgagtgatggccccaatgagaagatccaggccgtgattgattctggagtgtgccggcggctggtggagctgctgatgcacaatgactacaaggtggccagccctgccctgcgggctgtgggcaacatcgtgactggagatgacatccagacccaggtgatcctgaactgcagcgccctgccctgcctgctgcacctgctgagcagccccaaggagagcatcaggaaggaggcctgctggaccatcagcaacatcacagctggcaacagagcccagatccaggccgtgattgatgccaacatcttccctgtgctgattgagatcctgcagaaggccgagttccgcaccaggaaggaggccgcctgggccatcaccaatgccaccagcggcggcaccccagagcagatctag

SEQ ID NO: 337663 - DNA, 966 bp, Artificial Sequence
  derived and/or modified sequence
agaagaaatgtggagctgatcaatgaggaggccgccatgtttgacagcctgctgatggacagctatgtgagcagcaccactggagagagcgtcatcacccgggagatggtggagatgctgttcagtgatgacagcgacctgcagctggccaccacccagaagttcaggaagctgctgagcaaggagcccagcccccccattgatgaggtgatcaacaccccccgggtggtggacagatttgtggagttcctgaagagaaatgaaaactgcaccctgcaggccgtgtgggccctgggcaacattgctggggacagctctgtgtgccgggactatgtgctgaactgcagcatcctgaaccccctgctgaccctgctgaccaagagcacccggctgaccatgaccagaaatgctgtgtgggccctgagcaacctgtgccggggcaagaaccccccacctgagtttgccaaggtgagcccctgcctgcctgtgctgagccggctgctcttcagcagtgacagcgacctgctggctgatgcctgctgggccctgagctacctgagtgatggccccaatgagaagatccaggccgtcatcgacagcggcgtgtgccggcggctggtggagctgctgatgcacaatgactacaaggtggccagccctgccctgcgggctgtgggcaacatcgtgactggagatgacatccagacccaggtgatcctgaactgcagcgccctgccctgcctgctgcacctgctgagcagccccaaggagagcatcaggaaggaggcctgctggaccatcagcaacatcacagctggcaacagagcccagatccaggccgtgattgatgccaacatcttccctgtgctgattgagatcctgcagaaggccgagttccgcaccaggaaggaggccgcctgggccatcaccaatgccaccagcggcggcaccccagagcagatctag

SEQ ID NO: 337664 - DNA, 1602 bp, Artificial Sequence
  derived and/or modified sequence
atggccagccctgggaaggacaactacaggatgaagagctacaagaacaatgccctgaaccctgaggagatgagaagaagaagagaggaggagggcatccagctgaggaagcagaagcgggagcagcagctgttcaagagaagaaatgtggagctgatcaatgaggaggccgccatgtttgacagcctgctgatggacagctatgtgagcagcaccactggagagagcgtcatcacccgggagatggtggagatgctgttcagtgatgacagcgacctgcagctggccaccacccagaagttcaggaagctgctgagcaaggagcccagcccccccattgatgaggtgatcaacaccccccgggtggtggacagatttgtggagttcctgaagagaaatgaaaactgcaccctgcagtttgaggccgcctgggccctgaccaacatcgccagcggcaccagccagcagaccaagatcgtgattgaagctggagctgtgcccatcttcatcgagctgctgaacagcgactttgaagatgtgcaggagcaggccgtgtgggccctgggcaacattgctggggacagctctgtgtgccgggactatgtgctgaactgcagcatcctgaaccccctgctgaccctgctgaccaagagcacccggctgaccatgaccagaaatgctgtgtgggccctgagcaacctgtgccggggcaagaaccccccacctgagtttgccaaggtgagcccctgcctgcctgtgctgagccggctgctcttcagcagtgacagcgacctgctggctgatgcctgctgggccctgagctacctgagtgatggccccaatgagaagatccaggccgtcatcgacagcggcgtgtgccggcggctggtggagctgctgatgcacaatgactacaaggtggccagccctgccctgcgggctgtgggcaacatcgtgactggagatgacatccagacccaggtgatcctgaactgcagcgccctgccctgcctgctgcacctgctgagcagccccaaggagagcatcaggaaggaggcctgctggaccatcagcaacatcacagctggcaacagagcccagatccaggccgtgattgatgccaacatcttccctgtgctgattgagatcctgcagaaggccgagttccgcaccaggaaggaggccgcctgggccatcaccaatgccaccagcggcggcaccccagagcagatccgctacctggtgtccctgggctgcatcaagcccctgtgtgacctgctgactgtgatggacagcaagatcgtgcaggtggccctgaatggcctggagaacatcctgcggctgggggagcaggagggcaagaggagcggcagcggcgtgaacccctactgcggcctgattgaggaggcctacggcctggacaagattgagttcctgcagagccatgagaaccaggagatctaccagaaggcctttgacctgattgagcactactttggagtggaggatgatgacagcagcctggccccccaggtggatgagacccagcagcagttcatcttccagcagcctgaggcccccatggagggcttccagctgtag

SEQ ID NO: 337665 - DNA, 1035 bp, Artificial Sequence
  derived and/or modified sequence
atgcggcggcggcgggaggaggagggcatccagctgcggaagcagaaacgcgaacagcagctcttcaaacgcagaaacgtggaactgatcaacgaggaggctgccatgttcgactccttactcatggactcttatgtatcttctaccaccggagaatccgtcatcaccagggagatggtggaaatgttattctcggatgatagcgacctacagctggccacaactcagaaattccggaaactgctctccaaagagccctcccctcccattgatgaagtgataaacaccccaagggtggttgataggttcgtggagtttctaaagcgaaatgagaattgtaccctgcaagccgtttgggccctagggaacattgcaggggatagttctgtgtgcagagattatgtcctgaactgctcgatcctgaatcctctcttgaccctgctaactaagtcaacccggctcacaatgacccgtaacgcggtgtgggccctatcaaatctgtgcagaggaaaaaacccgcccccggaattcgcaaaggtatccccatgcctcccagtcctgtcgagacttttattctcctcagatagtgatttgttggcagatgcttgttgggccttaagttatctcagcgatggacctaacgagaagatccaggcagtaatcgactccggagtgtgtcgtaggttggttgaactgctcatgcacaacgattacaaagtcgccagccctgccttgagggctgtaggtaatattgttactggtgatgatattcagacccaggtgattcttaactgcagcgctctgccttgcttactgcacctcctctctagtcctaaggaatcgattcggaaagaggcctgttggacgatttctaatatcacagctggaaaccgtgcccaaatccaggcagtgattgacgccaacatcttcccagtgctgatcgagatcttacagaaagcggagtttcgcacccgtaaagaggcggcctgggccatcaccaacgccacatcgggaggcaccccggaacagatctag

SEQ ID NO: 337666 - DNA, 966 bp, Artificial Sequence
  derived and/or modified sequence
cggcggaacgtggagctgatcaacgaggaggccgccatgttcgacagtctgttgatggactcgtacgtgtccagcacgacaggggagtctgtcatcaccagggagatggtagaaatgctcttttctgatgattccgacttacagctggcaaccacccagaagtttaggaaattgctgtccaaggagcccagcccaccgatcgatgaggtaattaatacccccagagttgtggacaggttcgttgaatttctgaagcgcaacgagaattgtactctccaggccgtctgggccctgggaaatatcgccggcgacagcagcgtttgtagagactatgtgctgaattgctcaatcctgaacccgttgttaaccttgctgaccaaaagcacacgccttaccatgacccgcaacgccgtgtgggcattatcaaatctctgtagaggcaagaatccacctcccgagtttgcaaaggtgtccccctgtctgcctgtactgtctcgcttactgtttagctccgattctgacctgctggccgacgcctgttgggctctgtcatatctgtctgacggccccaacgagaaaattcaggccgtgatcgactctggagtgtgtaggaggctggtagaactcctcatgcacaacgactataaagtagcctcccccgcactgcgcgcggtcggcaacatagtgacaggtgatgatattcagacccaggtgattctcaactgttccgcactcccttgcctccttcacctgctctcctccccgaaggagtctattcgcaaagaagcttgttggacaatctcaaatatcacagcagggaacagggcccagatccaggccgtgattgacgccaatattttcccagtgctgatcgagatcctgcagaaggctgaatttcgaacccgaaaggaagcagcctgggcgattacaaacgcgacttccgggggtacacctgagcagatttag

SEQ ID NO: 337667 - DNA, 1602 bp, Artificial Sequence
  derived and/or modified sequence
atggccagccccggcaaggacaactaccggatgaagagctacaagaataacgctctgaatccagaagagatgcgacgaaggcgcgaggaagaaggcatccaactacggaaacagaagagggagcagcagttgtttaagagacgaaacgtggagctgattaatgaggaagccgcaatgttcgattccttgctgatggatagctatgttagctccacgacaggtgaaagcgtgataacacgagaaatggtggaaatgctattctcagatgattcggacctgcaacttgcaacgactcagaagtttcggaagctactgtctaaggagccctcaccccctatagatgaagtgattaacacaccacgtgtggtagatagattcgttgagtttctgaaacgtaacgagaattgtaccctgcagtttgaagcggcgtgggcactcacgaacatcgccagtggcacatcccagcagaccaaaatagtcattgaagccggggccgtgccaatatttatcgagctgctcaactcggatttcgaggatgttcaagagcaggcagtgtgggcactggggaacatcgccggggactcgtcggtctgtcgcgattacgtgttgaattgctctatcctcaaccctctcctgaccttgctgacaaagtccaccagactcacgatgacacgcaacgccgtgtgggcactgtccaatctgtgtagaggaaagaaccctccacccgaatttgcgaaggtgagcccttgcctgcctgtcctgagtaggctcttattctcttcggacagcgacctcctggccgatgcgtgctgggctctgtcatatctctccgacggaccaaacgagaagattcaggcggtgatcgacagcggagtgtgcaggcggcttgttgagctgctcatgcacaacgactacaaagtggcaagccctgccctgagagctgtcgggaacatcgtgacaggcgatgacatacagactcaagtcatcctcaactgcagtgcactaccatgcttacttcacctcctatcctcccccaaagagtctatccgcaaagaagcatgttggacaatttctaatatcacggccggcaatagggcacagattcaggccgtcattgatgccaatatcttccctgtcttgattgagatcttgcagaaagccgaattccgtactcgaaaggaggcggcttgggccattacaaacgccacttccggtgggaccccagagcagattagatatctcgtttcgctcggatgcattaaaccgctgtgtgacttgctaacagtgatggacagtaaaatcgtgcaggtcgcactcaatgggctggagaatatccttcgcctgggggagcaggaaggaaaaaggtcgggcagcggcgtaaacccttactgcggactcatcgaggaagcatacggattggacaagatagagtttctccagagtcacgaaaatcaggaaatttaccagaaggccttcgatctgatagaacattacttcggtgtggaggatgacgattcctcgttagccccccaggtggatgagactcagcaacagttcatattccagcagccggaagcacctatggaagggttccagctctag

SEQ ID NO: 337668 - DNA, 1035 bp, Artificial Sequence
  derived and/or modified sequence
atgcgcaggcgcagagaggaggagggcattcaactgagaaagcagaagagagaacagcagctgtttaagcgcaggaatgtagaactcatcaacgaggaagccgctatgtttgattcattattgatggactcctacgtcagctctactaccggcgagtctgttataacacgcgagatggtcgaaatgctattctcagatgacagtgatctgcagctggccaccactcaaaagttccgcaagctgctgtcaaaggagccgagtccgcctattgacgaagttataaatacacctcgggtggtggatcgtttcgtcgagtttttgaaacgaaatgagaattgtaccctgcaggctgtgtgggctttggggaacattgctggcgactcaagcgtgtgtagagactatgtgctgaattgctccatcttgaatccactcctcactttactgacaaaatctaccagactcacaatgactcgcaatgccgtttgggccctgagcaacttgtgtaggggcaaaaacccgcctccagagtttgccaaagtgagtccatgcctccctgttctaagtagactgctgttcagtagcgactcagatcttcttgctgacgcctgctgggcgctgtcatatctgtccgatggtcctaatgaaaagatccaagccgtcatcgacagcggcgtatgtaggcggcttgtggagcttctcatgcacaatgactataaagtcgcctcacccgcactgcgagcagtgggcaatattgtgacgggggatgatattcagacgcaggtcatactcaactgttctgcactaccatgcctcctgcatctattgtcctcaccgaaggaaagcattaggaaggaggcttgctggactatctcgaacattaccgcaggaaaccgcgctcagattcaagccgttatcgatgcaaatattttccctgtcctaatcgagatcctgcagaaggcggaatttaggacgagaaaggaggccgcatgggccataacaaatgccacttctggcggaacaccagagcagatatag

SEQ ID NO: 337669 - DNA, 966 bp, Artificial Sequence
  derived and/or modified sequence
cggaggaatgtggagttaatcaacgaggaggccgcaatgttcgacagtctgttaatggattcctatgtgtcttccactacgggcgagtcagtgattacccgggaaatggtggaaatgctgttttccgatgactcagatctgcagctggcaacaactcaaaaatttcgcaagttgctctctaaggaaccatcccctccaatagacgaggtcattaatacgcctagagtcgttgatcggttcgtcgagtttctcaaaaggaacgagaactgtacccttcaagccgtatgggcactcgggaacattgccggtgactcttcggtctgtcgcgactatgttttgaactgctctattttgaacccactgctcacgcttctgacaaagtccaccagactgactatgacacgcaatgccgtctgggccttgagcaatctgtgtcgcggaaagaatccccctcccgagttcgccaaggtcagtccctgcctccccgtactgagccggctactgttctcttctgatagcgatttgctggccgatgcctgttgggctttgagttacctgagcgacgggcctaacgaaaaaatacaggcagtcattgatagtggagtgtgtagacgtctggtggagttattaatgcacaacgactacaaagtggcctccccagcattacgcgcagtgggaaacatagtgacaggggacgatattcagactcaggtcatcctgaattgcagcgctctcccatgcctgcttcacctcctgtcttcccccaaagagtccataaggaaggaggcatgttggactattagcaacattactgctggcaatagggcccagatccaagctgtcattgatgctaatatctttccggtgctcatcgagatcctgcagaaggccgaatttcgcacaagaaaggaggctgcctgggctattactaacgccaccagcggtgggacacccgaacagatatag

SEQ ID NO: 337670 - DNA, 1602 bp, Artificial Sequence
  derived and/or modified sequence
atggcctcaccaggcaaggataattacaggatgaagtcatataagaataatgctcttaacccagaagagatgaggcggagacgcgaagaggaaggaattcagcttcggaaacagaaacgcgaacagcagctcttcaagcgaagaaacgtggagctcattaacgaggaagccgctatgtttgactcacttcttatggactcctacgtctcctctaccactggagagagcgtcatcacacgtgaaatggtcgagatgctctttagcgatgatagcgatctgcagctcgctactacccaaaaatttcgtaagctactgtccaaggagcctagtcctcctatcgacgaagtgattaacaccccacgggtggtcgatcgctttgtcgaatttctaaaacgaaatgagaactgtacattacagttcgaagctgcttgggcattgactaacatagcaagtgggacttcacagcagactaagatcgtcatcgaagccggagccgtgccgatcttcatcgagctcctgaattccgatttcgaggatgtgcaagagcaggccgtgtgggccctcgggaacattgctggagactcatcagtgtgtcgggactatgtcctcaactgtagcattctcaatcctcttttaacacttctgacgaaatccactagactcaccatgactcggaatgccgtttgggccctgtcgaatctttgtaggggaaagaatcccccacctgagtttgcaaaagttagtccttgtctaccagtgctctcgagacttctcttttcatcagatagcgacctcctcgcagacgcatgctgggctctgagctatctatccgacgggccaaacgaaaaaattcaggcagtgattgattctggtgtgtgccgccgattagtggagctgttgatgcataatgactataaggtggcctcacctgctctcagggccgtcggaaacattgtgaccggggatgacattcaaacccaggtgatcctgaactgtagcgcgctcccatgcctgctccacctacttagctcccccaaggaatcaatccgcaaggaggcgtgctggacaataagcaacattactgcaggaaatcgcgcacagatccaggccgtaatcgatgccaatatctttccagtgttaatcgagatccttcaaaaagccgagtttaggacacgcaaggaagccgcatgggcaataacaaacgctacaagtggaggaaccccggaacagatccggtacctagtgagcctcggatgcatcaagcctctctgcgacctgctcacagtaatggactccaagattgtgcaggtggctcttaacggattggagaatatcctgagactcggtgaacaggaaggcaaacggtctggaagcggtgtgaacccttactgcggccttatagaagaagcctacgggctcgataaaattgaatttttgcaaagtcatgagaaccaagagatatatcaaaaagccttcgacctcatcgaacattatttcggcgtcgaagacgatgactcttcattagcccctcaagtggatgaaacgcagcagcagtttatttttcagcagccagaagcacctatggagggcttccaactttag

SEQ ID NO: 337671 - DNA, 965 bp, Artificial Sequence
  derived and/or modified sequence
cggagaaatgtggagctgattaatgaagaagctgccatgttcgatagtcttctcatggactcttatgtgagctctaccactggggagagtgtgatcacaagagagatggtggagatgctcttttctgatgattctgacctgcagttagcaaccacacagaaattccggaaactgctctccaaagagcctagtcctccaatagatgaagttatcaacactccaagagtggtggatcggttcgtggagtttctgaagaggaatgagaattgtacattacaggcagtctgggcactgggaaacatagctggagatagctctgtttgccgagattacgtcttgaactgttccatccttaatcctttgttaacactccttaccaagtccacacgactgacgatgacacggaatgcagtctgggccctgtcaaatctctgccgagggaaaaacccacccccagagtttgcaaaggtctctccttgtttgcctgtactgtctcgcctactcttcagcagcgactcggacttgctggcagatgcttgctgggccctttcttatctgtctgatggccccaatgagaagatccaggcagtcatagactccggagtctgccggagattggtagagctgctgatgcacaatgattacaaagtggcttctcctgccctgagagccgtgggtaacatcgtcactggggatgacatccagacccaggtcattcttaactgttcagccctaccttgccttctccacttgttgagcagtcccaaggagtcaatccggaaggaagcttgctggactatttcaaatattactgctggcaacagggctcaaatacaggctgttatagatgcaaatatcttccctgtgttgatcgaaatccttcagaaagcagagtttcgtacaaggaaagaggcagcctgggccatcaccaatgccacatcaggaggaacccctgagcagatcag

SEQ ID NO: 337672 - DNA, 768 bp, Artificial Sequence
  derived and/or modified sequence
atgccagagctatatgacctcgttaattcatacaagccggatctcatctggtctgatggtgaatgggagtgtcccgatacgtattggaattccaccaattttttgtcgtggttgtacaacgattcacccgttaaggatgaggtggtcgtgaatgatcgctggggccagaactgtagttgtcaccacggcggctattataattgtgaagataagtttaaaccccagtctctccccgatcacaagtgggaaatgtgtactagcattgacaagtttagctggggctacagaagagatatggccttgtcagatgttactgaggagtcagagatcattagcgagctggtgcaaactgtgtcattgggggggaattacctgttaaacatcggacctacgaaagatggactgatcgttcctatttttcaggaacgcctgctcgcagtggggaaatggctgagtatcaatggcgaagcaatatacgccagtaagccttggcgcgtgcagtgggaaaagaatacaacttcagtttggtacactagcaagggatctgcagtttatgctatctttctgcactggcctgagaatggcgtgctcaatctggagagcccaatcaccacgagcacaactaagatcaccatgctgggcatccagggcgacctgaagtggtccaccgaccccgacaaagggctcttcatatctttgccacagctcccccctagcgcggtgcccgccgagttcgcctggaccattaagctgaccggggtgaagtag

SEQ ID NO: 337673 - DNA, 768 bp, Artificial Sequence
  derived and/or modified sequence
atgcctgagctgtatgacctggtgaacagctacaagccagacctgatctggagcgatggagagtgggagtgcccagacacctactggaacagcaccaacttcctgtcctggctgtacaatgacagccctgtgaaggatgaggtggtggtgaatgaccgctggggccagaactgcagctgccaccacggcggctactacaactgtgaggacaagttcaagccccagagcctgcctgaccacaagtgggagatgtgcaccagcattgacaagttctcctggggctaccgccgggacatggccctgagtgatgtgacagaggagagcgagatcatcagcgagctggtgcagacagtgtccctgggcggcaactacctgctgaacatcggccccaccaaggatggcctcatcgtgcccatcttccaggagcggctgctggccgtgggcaagtggctgagcatcaacggggaggccatctatgccagcaagccctggagggtgcagtgggagaagaacaccacctctgtgtggtacaccagcaagggcagcgctgtgtatgccatcttcctgcactggccagaaaatggagtgctgaacctggagagccccatcaccaccagcaccaccaagatcaccatgctgggcatccagggcgacctgaagtggagcacagatcctgacaagggcctcttcatcagcctgccccagctgcccccatctgctgtgcctgctgagtttgcctggaccatcaagctgactggagtgaagtag

SEQ ID NO: 337674 - DNA, 768 bp, Artificial Sequence
  derived and/or modified sequence
atgcccgagctgtacgacctggtgaacagctacaagcccgacctgatttggtctgacggcgagtgggagtgtccagatacctactggaactctaccaactttctgagttggctgtacaacgattcacccgtgaaagatgaggttgttgtgaatgatagatggggacagaactgtagttgtcaccacggcggctactacaactgtgaagataaatttaaaccgcagagtctgcctgatcacaagtgggagatgtgcacatctatagataagttcagctggggataccgcagagacatggcgctcagtgacgtcacagaggaatcagaaatcattagcgagcttgtgcagactgtgtccctaggaggcaattacctgcttaacatcggtccgacaaaggacggactcattgtccccatcttccaggagagattgttggcagtaggaaaatggctcagcatcaacggggaagcgatctacgcttctaagccatggagagtacagtgggagaaaaatactacttctgtatggtacacgtcgaaaggttctgccgtgtatgcaatcttcttgcactggcccgagaatggagtgctcaacctagagagtcctatcactacgagcacaaccaagatcacaatgcttggcatccagggagacctcaaatggtctacagatcccgataagggactattcatctcccttcctcagttgcccccttctgctgtccccgccgagtttgcgtggaccatcaaacttacaggagttaagtag

SEQ ID NO: 337675 - DNA, 768 bp, Artificial Sequence
  derived and/or modified sequence
atgcctgagctttacgatttggtgaacagttacaaacccgatcttatttggtctgacggagagtgggagtgtcccgatacgtactggaacagcacgaacttcctatcttggctgtataacgacagccccgttaaagatgaagtcgtggtcaacgatcggtggggacagaactgctcctgccatcacggtggttattataactgcgaagataaatttaaaccacagagtctgcccgatcacaagtgggagatgtgcacatcaatcgacaagttcagttgggggtaccgcagggacatggccctgtctgacgtaacggaggaatccgaaattatctccgagctggtgcagaccgtctctctaggtgggaattatctgctgaacatcggacccacaaaggacgggctgattgtgccaatttttcaggagcgcctactggccgtcggcaagtggcttagcattaacggcgaagctatttatgccagcaaaccgtggagggtgcagtgggaaaagaacacaacatcagtttggtacacctcgaaaggttcagccgtttacgccattttcctgcattggcctgaaaatggcgtgcttaacctggagagtccgatcacaaccagtacaactaagataaccatgctgggcatacaaggtgaccttaagtggagcacagaccctgataaagggctgttcatcagcctgccacagcttcctccaagtgctgttccggcagaatttgcttggacgataaaactgaccggagtcaagtag

SEQ ID NO: 337676 - DNA, 768 bp, Artificial Sequence
  derived and/or modified sequence
atgcccgagctgtacgacctggtgaacagctacaagcccgacctgatctggagcgacggcgagtgggagtgccccgacacctactggaacagcaccaacttcctgagctggctgtacaacgacagccccgtgaaggacgaggtggtggtgaacgacagatggggccagaactgcagctgccaccacggcggctactacaactgcgaggacaagttcaagccccagagcctgcccgaccacaagtgggagatgtgcaccagcatcgacaagttcagctggggctacagaagagacatggccctgagcgacgtgaccgaggagagcgagatcatcagcgagctggtgcagaccgtgagcctgggcggcaactacctgctgaacatcggccccaccaaggacggcctgatcgtgcccatcttccaggagagactgctggccgtgggcaagtggctgagcatcaacggcgaggccatctacgccagcaagccctggagagtgcagtgggagaagaacaccaccagcgtgtggtacaccagcaagggcagcgccgtgtacgccatcttcctgcactggcccgagaacggcgtgctgaacctggagagccccatcaccaccagcaccaccaagatcaccatgctgggcatccagggcgacctgaagtggagcaccgaccccgacaagggcctgttcatcagcctgccccagctgccccccagcgccgtgcccgccgagttcgcctggaccatcaagctgaccggcgtgaagtag

SEQ ID NO: 337677 - DNA, 2114 bp, Artificial Sequence
  derived and/or modified sequence
acagcccggcccctgccctgcaccaggccactgccctgttggtgaggagggtcggaggggcgacctccctgccccctgctccaagctccccacccccacctggaacctgccggcaggaagcctggccctggagggtggtcacggcccctccccagatgcccggcccacgagaggccaatggggagcagccaggaggagggactccggtgtcagccaagccagccagaccacgacgcagatggacactgtgggccggacctggagggggcagaaagagcctctgccacacccggaccccctgggctcctgaacagccaccggcctgcagactcggatgacactaacgccgccgggccctcagctgccctcctggaggggctcctgctggggggtgggaagccatcgccccacagcacccggccggggcccttcttctacattggaggcagcaacggggccacaatcatcagctcctactgcaaaagcaagggctggcagcgcatccatgacagccgccgggacgactacacgctgaagtggtgtgaggtcaagagccgagacagctacggcagcttccgggaaggagagcagctgctgtaccagcttcccaacaacaagctcctcaccaccaagatcgggctgctcagcacccttcggggacgggcacgggccatgagcaaggccagcaaggtgccggggggggtccaggccaggctggaaaaggacgcagcagcgcccgccctggaggacctcccgtggacaagcccaggatacctcaggccacagagggtcctgagaatggaagagtttttcccagagacctaccgcctggacctcaaacacgagagagaggcctttttcaccttgtttgatgaaacccagatatggatctgcaagcccacagcctccaaccagggcaaaggcatcttcctgctccggaaccaggaggaagttgccgccctgcaggccaagacccggagcatggaggacgaccccatccaccacaagacgccgttccgggggcctcaggcgcgggtggtgcagaggtacatccagaacccgctgctggtggacgggagaaagtttgacgtgcgctcctacctgctcattgcctgcaccacaccctacatgatcttctttggccacggctatgctcgcctcacccttagcctttacgacccccattccagcgacctcggcggccacttgaccaaccagttcatgcagaagaagagccctctgtacatgctgctgaaggagcacacggtgtggagcatggaacacctcaaccgctacatcagtgacacgttctggaaggcccggggcctcgccaaggactgggtcttcaccaccctcaaggtgcgtccactgtgccctccagtctgggagtgagatccctcggggcgggggtgtgtggtcaggctgggcaccaggcacacagatgtccgtggcgtgcgtgggcggctgcgctgaagtgtgacctgaccgtgtggaaccaaacccttccagcgtctctgctcacttagctggcagtgcctgtccccagcagccagcaaaggcccggacggaaagcccagtcgggggtctgtcggcacgagtcccgcgggcagcctcgccgtagggtcaggggacagctcggcttcagtgacagccaccatgtgaagagtctttgttcctttcagatcctccacttggcaggcagggccaacagcagcccccgggccaggtgtcctggagcagcagcagctgcccgtgcaggcccggactctccctagctaagggccatgtgcggtggagtgtcctaattttgcagggttcctttctgtgggggtacctgtggggtacttcaaacagccctagcagcaaaggcccttgagcagcgcggtgtgaaactgggataaaaacggggcttggccgaaggacttttatctgtcttggtcaccccggccaggccccggaagcagcagccagggatggtccttcctcacccacaggcgtgtgtcactgtggctgggacggcagcgctcagaggagcctccagttactttcctcacatctcccaaactctctcttaattgcgataattcacagaacataaaattcacgatcttaaa

SEQ ID NO: 337678 - protein, 634 aa, Artificial Sequence
  derived and/or modified sequence
MAMWNRPCQRLPQQPLVAEPTAEGEPHLPTGRELTEANRFAYAALCGISLSQLFPEPEHSSFCTEFMAGLVQWLELSEAVLPTMTAFASGLGGEGADVFVQILLKDPILKDDPTVITQDLLSFSLKDGHYDARARVLVCHMTSLLQVPLEELDVLEEMFLESLKEIKEEESEMAEASRKKKENRRKWKRYLLIGLATVGGGTVIGVTGGLAAPLVAAGAATIIGSAGAAALGSAAGIAIMTSLFGAAGAGLTGYKMKKRVGAIEEFTFLPLTEGRQLHITIAVTGWLASGKYRTFSAPWAALAHSREQYCLAWEAKYLMELGNALETILSGLANMVAQEALKYTVLSGIVAALTWPASLLSVANVIDNPWGVCLHRSAEVGKHLAHILLSRQQGRRPVTLIGFSLGARVIYFCLQEMAQEKDCQGIIEDVILLGAPVEGEAKHWEPFRKVVSGRIINGYCRGDWLLSFVYRTSSVQLRVAGLQPVLLQDRRVENVDLTSVVSGHLDYAKQMDAILKAVGIRTKPGWDEKGLLLAPGCLPSEEPRQAAAAASSGETPHQVGQTQGPISGDTSKLAMSTDPSQAQVPVGLDQSEGASLPAAASPERPPICSHGMDPNPLGCPDCACKTQGPSTGLD

SEQ ID NO: 337679 - protein, 580 aa, Artificial Sequence
  derived and/or modified sequence
MAMWNRPCQRLPQQPLVAEPTAEGEPHLPTGRELTEANRFAYAALCGISLSQLFPEPEHSSFCTEFMAGLVQWLELSEAVLPTMTAFASGLGGEGADVFVQILLKDPILKDDPTVITQDLLSFSLKDGHYDARARVLVCHMTSLLQVPLEELDVLEEMFLESLKEIKEEESEMAEASRKKKENRRKWKRYLLIGLATVGGGTVIGVTGGLAAPLVAAGAATIIGSAGAAALGSAAGIAIMTSLFGAAGAGLTGYKMKKRVGAIEEFTFLPLTEGRQLHITIAVTGWLASGKYRTFSAPWAALAHSREQYCLAWEAKYLMELGNALETILSGLANMVAQEALKYTVLSGIVAALTWPASLLSVANVIDNPWGVCLHRSAEVGKHLAHILLSRQQGRRPVTLIGFSLGARVIYFCLQEMAQEKDCQGIIEDVILLGAPVEGEAKHWEPFRKVVSGRIINGYCRGDWLLSFVYRTSSVQLRVAGLQPVLLQDRRVENVDLTSVVSGHLDYAKQMDAILKAVGIRTKPGWDEKGLLLAPGCLPSEEPRQAAAAASSALESGCPSGGPEGSLGPEAPTPALPWPQ

SEQ ID NO: 337680 - DNA, 1905 bp, Artificial Sequence
  derived and/or modified sequence
atggccatgtggaacagaccctgccagagactgccccagcagcccctggtggccgagcccaccgccgagggcgagccccacctgcccaccggcagagagctgaccgaggccaacagattcgcctacgccgccctgtgcggcatcagcctgagccagctgttccccgagcccgagcacagcagcttctgcaccgagttcatggccggcctggtgcagtggctggagctgagcgaggccgtgctgcccaccatgaccgccttcgccagcggcctgggcggcgagggcgccgacgtgttcgtgcagatcctgctgaaggaccccatcctgaaggacgaccccaccgtgatcacccaggacctgctgagcttcagcctgaaggacggccactacgacgccagagccagagtgctggtgtgccacatgaccagcctgctgcaggtgcccctggaggagctggacgtgctggaggagatgttcctggagagcctgaaggagatcaaggaggaggagagcgagatggccgaggccagcagaaagaagaaggagaacagaagaaagtggaagagatacctgctgatcggcctggccaccgtgggcggcggcaccgtgatcggcgtgaccggcggcctggccgcccccctggtggccgccggcgccgccaccatcatcggcagcgccggcgccgccgccctgggcagcgccgccggcatcgccatcatgaccagcctgttcggcgccgccggcgccggcctgaccggctacaagatgaagaagagagtgggcgccatcgaggagttcaccttcctgcccctgaccgagggcagacagctgcacatcaccatcgccgtgaccggctggctggccagcggcaagtacagaaccttcagcgccccctgggccgccctggcccacagcagagagcagtactgcctggcctgggaggccaagtacctgatggagctgggcaacgccctggagaccatcctgagcggcctggccaacatggtggcccaggaggccctgaagtacaccgtgctgagcggcatcgtggccgccctgacctggcccgccagcctgctgagcgtggccaacgtgatcgacaacccctggggcgtgtgcctgcacagaagcgccgaggtgggcaagcacctggcccacatcctgctgagcagacagcagggcagaagacccgtgaccctgatcggcttcagcctgggcgccagagtgatctacttctgcctgcaggagatggcccaggagaaggactgccagggcatcatcgaggacgtgatcctgctgggcgcccccgtggagggcgaggccaagcactgggagcccttcagaaaggtggtgagcggcagaatcatcaacggctactgcagaggcgactggctgctgagcttcgtgtacagaaccagcagcgtgcagctgagagtggccggcctgcagcccgtgctgctgcaggacagaagagtggagaacgtggacctgaccagcgtggtgagcggccacctggactacgccaagcagatggacgccatcctgaaggccgtgggcatcagaaccaagcccggctgggacgagaagggcctgctgctggcccccggctgcctgcccagcgaggagcccagacaggccgccgccgccgccagcagcggcgagaccccccaccaggtgggccagacccagggccccatcagcggcgacaccagcaagctggccatgagcaccgaccccagccaggcccaggtgcccgtgggcctggaccagagcgagggcgccagcctgcccgccgccgccagccccgagagaccccccatctgcagccacggcatggaccccaaccccctgggctgccccgactgcgcctgcaagacccagggccccagcaccggcctggactag

SEQ ID NO: 337681 - DNA, 1743 bp, Artificial Sequence
  derived and/or modified sequence
atggccatgtggaacagaccctgccagagactgccccagcagcccctggtggccgagcccaccgccgagggcgagccccacctgcccaccggcagagagctgaccgaggccaacagattcgcctacgccgccctgtgcggcatcagcctgagccagctgttccccgagcccgagcacagcagcttctgcaccgagttcatggccggcctggtgcagtggctggagctgagcgaggccgtgctgcccaccatgaccgccttcgccagcggcctgggcggcgagggcgccgacgtgttcgtgcagatcctgctgaaggaccccatcctgaaggacgaccccaccgtgatcacccaggacctgctgagcttcagcctgaaggacggccactacgacgccagagccagagtgctggtgtgccacatgaccagcctgctgcaggtgcccctggaggagctggacgtgctggaggagatgttcctggagagcctgaaggagatcaaggaggaggagagcgagatggccgaggccagcagaaagaagaaggagaacagaagaaagtggaagagatacctgctgatcggcctggccaccgtgggcggcggcaccgtgatcggcgtgaccggcggcctggccgcccccctggtggccgccggcgccgccaccatcatcggcagcgccggcgccgccgccctgggcagcgccgccggcatcgccatcatgaccagcctgttcggcgccgccggcgccggcctgaccggctacaagatgaagaagagagtgggcgccatcgaggagttcaccttcctgcccctgaccgagggcagacagctgcacatcaccatcgccgtgaccggctggctggccagcggcaagtacagaaccttcagcgccccctgggccgccctggcccacagcagagagcagtactgcctggcctgggaggccaagtacctgatggagctgggcaacgccctggagaccatcctgagcggcctggccaacatggtggcccaggaggccctgaagtacaccgtgctgagcggcatcgtggccgccctgacctggcccgccagcctgctgagcgtggccaacgtgatcgacaacccctggggcgtgtgcctgcacagaagcgccgaggtgggcaagcacctggcccacatcctgctgagcagacagcagggcagaagacccgtgaccctgatcggcttcagcctgggcgccagagtgatctacttctgcctgcaggagatggcccaggagaaggactgccagggcatcatcgaggacgtgatcctgctgggcgcccccgtggagggcgaggccaagcactgggagcccttcagaaaggtggtgagcggcagaatcatcaacggctactgcagaggcgactggctgctgagcttcgtgtacagaaccagcagcgtgcagctgagagtggccggcctgcagcccgtgctgctgcaggacagaagagtggagaacgtggacctgaccagcgtggtgagcggccacctggactacgccaagcagatggacgccatcctgaaggccgtgggcatcagaaccaagcccggctgggacgagaagggcctgctgctggcccccggctgcctgcccagcgaggagcccagacaggccgccgccgccgccagcagcgccctggagagcggctgccccagcggcggccccgagggcagcctgggccccgaggcccccacccccgccctgccctggccccagtag

SEQ ID NO: 337682 - DNA, 1905 bp, Artificial Sequence
  derived and/or modified sequence
atggccatgtggaatcggccatgccaaaggctgccacagcaacccctggtggcagaaccaacagctgaaggagagccacatctgcccacaggtcgggagctcacagaggctaaccgctttgcttacgctgccctgtgcggtatctctctgtcccagctgttccctgagcccgagcatagttccttttgtacagaatttatggcaggactggtccagtggctggagttgagtgaggcagtcctaccgaccatgacggctttcgcaagcggcttgggcggagagggggccgacgtgtttgttcagatcctattgaaggatcccatattaaaggacgatcccaccgttatcactcaagacctgctgagctttagtctgaaggacgggcattacgacgcccgtgctagagtcttggtgtgccacatgacaagtttactgcaggtacctctggaggaactcgacgtcctggaggagatgtttctcgaaagtcttaaagagatcaaagaagaggagagcgagatggcggaagcctctagaaaaaagaaggaaaatcgccgcaagtggaagaggtatctgctgataggccttgccactgttgggggaggaaccgttatcggcgttaccggtggcctggcagcccccctggttgccgctggcgcagccactatcataggttcagccggagcagccgccctgggttccgccgctggtatagcgattatgactagcctcttcggcgccgcaggagccggcctgactggctataaaatgaagaaacgtgtcggtgctatcgaggaattcacctttctgcccctgacggaagggagacagctgcacatcactattgccgtcacgggctggctcgcctctggaaaatatagaacgttcagtgctccatgggcagccctggcccacagtagggagcagtactgcctggcttgggaagccaagtatctaatggaactgggcaatgctctggaaacaatccttagcggtctggctaacatggtggcacaggaagctctaaagtatacagtcctgagcgggattgtggctgcactaacttggccggcttccctcctgtccgttgcgaacgttattgacaacccctggggagtctgcctgcatagaagtgctgaggtggggaaacacctcgcccatatactcttgtcaaggcagcagggacggaggcctgtgaccctcattgggtttagtctcggagccagggtcatttacttctgtctccaggaaatggctcaagagaaagactgccagggcattatcgaagatgtcatcttgctcggagcgcccgtagagggtgaggccaagcactgggagccatttcgaaaagtcgtgagtggaagaatcataaatggctactgccgaggggactggctgctgagttttgtctacaggacctcctctgtgcaactgagggtggcgggtcttcagccagttcttttgcaggaccgccgggtggagaatgttgatctgacttccgtcgtctctggacatctagactacgccaaacaaatggacgccatactgaaggcagtaggtatcagaactaaaccaggctgggacgaaaagggtcttctactggcacctgggtgcttgccttccgaagagccacggcaggcagccgccgctgcgagctccggtgaaaccccacaccaggtaggccaaacacagggccccatttccggggatacgtctaaacttgccatgagcaccgacccatcacaagcacaggtgcccgtaggtttggaccagagcgagggtgcatcactcccagctgccgcaagtcctgaacgccctccaatttgctcccacgggatggatcccaacccactagggtgtccagactgcgcttgtaaaacgcagggccctagcacaggcctggactag

SEQ ID NO: 337683 - DNA, 1743 bp, Artificial Sequence
  derived and/or modified sequence
atggctatgtggaacagaccctgccagcgcctccctcagcagccgctggttgccgagccaaccgccgaaggcgagcctcacctacccacggggcgagagctgactgaggccaacaggtttgcttacgcagcattatgcggaatttcactgtcacaactttttcccgaacctgagcacagctcattctgtacagagtttatggccggtctagtccagtggttggagttgtcagaagcggttctgcctactatgaccgccttcgccagtggactggggggggaaggggccgacgtcttcgtgcagatcctgttgaaggaccctattctcaaggacgaccccacggtcattactcaagacctgctcagcttttcactcaaggatggacactatgacgcccgggcccgcgtattggtttgccacatgacatcccttttgcaggtgcccttggaagaattggacgtgttggaggagatgttcctggaatcattaaaggagatcaaggaggaggaatccgaaatggcggaagcgtcgcgcaaaaagaaagaaaaccgacgcaaatggaaacgctatttgctgataggtttagcgaccgtgggggggggtacagtaattggggtgacgggtgggttggcagcccctctggtagcagccggcgccgctaccattataggctccgccggggctgcagcactgggatccgccgcaggaattgccattatgacctccttgttcggggcagccggggcaggcctgacaggatacaagatgaagaagcgggtgggggctatcgaagagttcacgtttctcccgctcaccgagggcaggcaattacacattacgatcgctgtcacaggttggcttgcaagcggcaagtaccgtacattctctgccccatgggctgctcttgctcactcccgtgagcagtactgcttggcatgggaagccaagtacctgatggagctggggaacgctctggaaacgatactgagcgggctcgccaacatggtggcccaagaagctctaaagtatactgtactgtcaggaatcgtcgctgcgctgacatggcctgcctctctcctctccgtggcgaacgttatagataatccatggggggtgtgcctgcaccgcagtgccgaagtaggaaaacacctggcgcacattttgctcagccgccagcagggtcgacgcccagtcaccttaatcgggttttccctgggtgcccgggtcatctacttctgtctacaggagatggcccaggaaaaggactgccaaggaatcatcgaggatgttatactccttggagctccagtagaaggggaagcgaagcattgggagcccttcaggaaggtggtatctgggcgcatcattaacggctactgccgcggggactggcttctctcattcgtctaccgaacttccagcgtccagcttagagtggctggactccagcccgtcctactccaggaccgcagagtggagaatgtcgatcttaccagcgtcgtttccggccatctggactacgctaagcaaatggatgcgatcttaaaggcagtgggcatacgcacaaaaccaggatgggatgaaaaaggactcctgcttgctcctgggtgcttgccctccgaggagccaagacaggctgcagccgccgccagctcagctctggagtccggatgcccctctgggggacctgaggggtccctcgggcccgaggcccccaccccggccctgccttggcctcaatag

SEQ ID NO: 337684 - DNA, 1905 bp, Artificial Sequence
  derived and/or modified sequence
atggccatgtggaaccggccctgccagaggctgccccagcagcccctggtggccgagcccacagctgagggggagccccacctgcccaccggccgggagctgacagaggccaacagatttgcctatgctgccctgtgtggcatcagcctgagccagctgtttcctgagcctgagcacagcagcttctgcacagagttcatggccggcctggtgcagtggctggagctgtctgaggccgtgctgcccaccatgacagcctttgccagcggcctgggcggggagggcgcagatgtgtttgtgcagatcctgctgaaggaccccatcctgaaggatgaccccaccgtcatcacccaggacctgctgtccttcagcctgaaggatggccactatgatgcccgggcccgggtgctggtgtgccacatgaccagcctgctgcaggtgcccctggaggagctggatgtgctggaggagatgttcctggagagcctgaaggagatcaaggaggaggagagcgagatggccgaggccagcaggaagaagaaggagaacagaaggaagtggaagcgctacctgctgattggcctggccaccgtgggcggcggcaccgtcatcggcgtgactggaggcctggccgcccccctggtggccgccggggccgccaccatcatcggcagcgctggagctgctgccctgggcagcgctgctggcatcgccatcatgaccagcctgtttggagctgctggagctggcctgaccggctacaagatgaagaagagggtgggcgccatcgaggagttcaccttcctgcccctgacagagggccggcagctgcacatcaccatcgctgtgacaggctggctggccagcggcaagtaccgcaccttcagcgccccctgggccgccctggcccacagccgggagcagtactgcctggcctgggaggccaagtacctgatggagctgggcaatgccctggagaccatcctgagcggcctggccaacatggtggcccaggaggccctgaagtacacagtgctgtctggaattgtggccgccctgacctggccagccagcctgctgtctgtggccaacgtcatcgacaacccctggggcgtgtgcctgcacaggtctgctgaggtgggcaagcacctggcccacatcctgctgagccggcagcagggcagaagacctgtgaccctgattggcttcagcctgggcgcccgggtcatctacttctgcctgcaggagatggcccaggagaaggactgccagggcatcattgaagatgtgatcctgctgggcgcccctgtggagggggaggccaagcactgggagcccttcaggaaggtggtgtctggccgcatcatcaatggctactgccgcggggactggctgctgagctttgtgtaccgcaccagctctgtgcagctgcgggtggccggcctgcagcctgtgctgctgcaggaccggcgggtggagaatgtggacctgacctctgtggtgtctggccacctggactatgccaagcagatggatgccatcctgaaggctgtgggcatccgcaccaagccaggctgggatgagaagggcctgctgctggcccctggctgcctgcccagcgaggagccccggcaggccgctgctgctgccagcagcggggagaccccccaccaggtgggccagacccagggccccatcagcggggacaccagcaagctggccatgagcacagaccccagccaggcccaggtgcctgtgggcctggaccagagcgagggcgccagcctgcctgctgctgccagccctgagaggcctcccatctgcagccacggcatggaccccaaccccctgggctgcccagactgtgcctgcaagacccagggccccagcacaggcctggactag

SEQ ID NO: 337685 - DNA, 1743 bp, Artificial Sequence
  derived and/or modified sequence
atggccatgtggaaccggccctgccagaggctgccccagcagcccctggtggccgagcccacagctgagggggagccccacctgcccaccggccgggagctgacagaggccaacagatttgcctatgctgccctgtgtggcatcagcctgagccagctgtttcctgagcctgagcacagcagcttctgcacagagttcatggccggcctggtgcagtggctggagctgtctgaggccgtgctgcccaccatgacagcctttgccagcggcctgggcggggagggcgcagatgtgtttgtgcagatcctgctgaaggaccccatcctgaaggatgaccccaccgtcatcacccaggacctgctgtccttcagcctgaaggatggccactatgatgcccgggcccgggtgctggtgtgccacatgaccagcctgctgcaggtgcccctggaggagctggatgtgctggaggagatgttcctggagagcctgaaggagatcaaggaggaggagagcgagatggccgaggccagcaggaagaagaaggagaacagaaggaagtggaagcgctacctgctgattggcctggccaccgtgggcggcggcaccgtcatcggcgtgactggaggcctggccgcccccctggtggccgccggggccgccaccatcatcggcagcgctggagctgctgccctgggcagcgctgctggcatcgccatcatgaccagcctgtttggagctgctggagctggcctgaccggctacaagatgaagaagagggtgggcgccatcgaggagttcaccttcctgcccctgacagagggccggcagctgcacatcaccatcgctgtgacaggctggctggccagcggcaagtaccgcaccttcagcgccccctgggccgccctggcccacagccgggagcagtactgcctggcctgggaggccaagtacctgatggagctgggcaatgccctggagaccatcctgagcggcctggccaacatggtggcccaggaggccctgaagtacacagtgctgtctggaattgtggccgccctgacctggccagccagcctgctgtctgtggccaacgtcatcgacaacccctggggcgtgtgcctgcacaggtctgctgaggtgggcaagcacctggcccacatcctgctgagccggcagcagggcagaagacctgtgaccctgattggcttcagcctgggcgcccgggtcatctacttctgcctgcaggagatggcccaggagaaggactgccagggcatcattgaagatgtgatcctgctgggcgcccctgtggagggggaggccaagcactgggagcccttcaggaaggtggtgtctggccgcatcatcaatggctactgccgcggggactggctgctgagctttgtgtaccgcaccagctctgtgcagctgcgggtggccggcctgcagcctgtgctgctgcaggaccggcgggtggagaatgtggacctgacctctgtggtgtctggccacctggactatgccaagcagatggatgccatcctgaaggctgtgggcatccgcaccaagccaggctgggatgagaagggcctgctgctggcccctggctgcctgcccagcgaggagccccggcaggccgctgctgctgccagcagcgccctggagagcggctgccccagcggcggccctgagggcagcctgggccctgaggcccccaccccagccctgccctggccccagtag

SEQ ID NO: 337686 - DNA, 1905 bp, Artificial Sequence
  derived and/or modified sequence
atggccatgtggaaccggccctgccagcggctgccccagcagcccctggtcgccgaacccacggccgaaggggagccccatctgcctactggtcgggaacttacggaggctaatcgctttgcgtacgcagccctttgtgggattagcctttctcagctatttccagaaccggagcactcgagcttctgcaccgagttcatggccgggcttgtgcaatggttagaactgtccgaggccgtcctgccaactatgaccgctttcgcctctggtctaggaggcgaaggggccgatgtttttgtgcagatccttcttaaagacccaatactgaaagacgatcccaccgtaataactcaggacttgttgtccttctctctgaaggatggacactatgacgctagggccagggtcctggtgtgtcacatgacctccctgctgcaggtacccctagaagagctggacgtcctggaagaaatgttcctggaaagcctgaaggaaatcaaggaagaagagtctgaaatggctgaagcatctagaaagaagaaagaaaatcggagaaagtggaagcgttacctgttaattgggctggctacagttggaggcgggactgtgatcggagttactggcggcctggccgcccctttggtggctgcaggggctgcgaccattataggctcagcaggcgctgccgcattaggctcagcagcgggtattgctataatgacatccctcttcggggcagcaggggcaggactgactggatacaagatgaaaaagcgggtcggggccattgaggaatttacatttctccctttgaccgaggggcgacagttgcatataacaatagccgtgaccgggtggctggccagcggcaagtaccggacattttctgccccctgggcagcgctggctcactctagagaacagtactgcctcgcttgggaggcgaagtacttgatggagctgggcaatgctcttgaaactatcctgagcgggttagcgaacatggtcgcccaggaagccctgaaatacactgttctgtctgggatcgtcgccgctcttacatggccggccagtcttctgtcagtcgccaatgttatcgacaacccttggggcgtgtgcctccacagaagcgcagaagtgggtaagcatcttgcacatatcctactttcccgacaacaagggcgccgtcctgtgacccttattggcttttccctgggggcgagggtaatttatttctgtctgcaggagatggctcaggagaaggactgccaaggcattatcgaagacgtgattctgctcggggcccccgtcgagggggaagccaagcattgggagcccttcaggaaagttgtgagtggacgaatcatcaacgggtattgccggggcgattggctcctgtcctttgtttataggacgtcctcagtgcaactacgagttgccgggctgcagccagttttactacaggatagacgagtcgaaaatgtcgatctgacctccgtagtcagcggccatctggattacgctaaacagatggacgccattctcaaagccgtggggatcaggactaagccaggctgggacgagaagggactgctgctggctcccgggtgcctcccttctgaagagcccaggcaggctgctgccgccgcatcttcgggtgagacgccccatcaggtcgggcagactcaagggcctatcagcggagacacctcaaagctggctatgtccacggacccctcccaagcacaagtgcctgtcgggttagatcagagcgagggggctagtctgcctgctgcggctagtcctgagcggccccctatatgcagtcatggcatggaccccaacccactgggttgtccagattgcgcctgcaagacccaaggaccgtcaaccggactagattag

SEQ ID NO: 337687 - DNA, 1743 bp, Artificial Sequence
  derived and/or modified sequence
atggccatgtggaaccggccctgccagcggctgccccagcagccccttgtagccgaacccaccgcagagggggaacctcacctgcctacgggccgggaacttaccgaagcaaaccgtttcgcctatgctgcgctgtgtggcatttcactatcccagttgtttcctgagccagagcattccagcttctgcacagaattcatggccgggctggtgcaatggcttgaactctcagaggcggtgctccctaccatgacggccttcgcctcaggactgggcggtgagggcgccgacgtcttcgtgcaaatcctcctgaaggaccctatccttaaggacgaccccaccgtcatcactcaagacctgttgtccttttcactgaaggatgggcattacgacgcccgagcccgcgtgttggtgtgtcacatgacttcactcctgcaagtcccactggaggaactcgatgtgctggaagagatgttcttggagagcctgaaagaaatcaaagaagaagagagtgagatggcggaagcctccaggaagaagaaggagaatcggagaaaatggaagagataccttcttatcggactcgcgaccgtaggaggtggtactgtcattggggtcaccgggggcctcgctgcaccactggtggccgccggagcagccacaattatcggctcagcaggggccgccgcgctgggctcagccgcaggtatagccataatgacatcactattcggggccgcaggagctgggcttactggctataagatgaaaaagcgcgtgggcgcaatagaggagttcacattcttgccactgaccgagggccgtcaattgcacatcaccatcgcggtcaccggctggctggctagcggcaaataccggacattctcagctccctgggcggcactggctcatagcagggaacagtattgcctggcgtgggaggctaagtacctgatggaattgggcaatgcactggagaccattctcagcggcctcgcaaatatggtcgcacaggaagccctgaagtataccgtcttgtcgggcattgtggcagctctcacctggccagcttccttgctgtccgtagctaatgtcattgacaacccttggggggtgtgcctgcaccgaagtgctgaagtgggcaaacacctggcacacattctgctcagcaggcagcaaggacgcagacccgtgacattgatcggtttctctcttggagccagggttatatacttctgtctgcaggagatggcgcaggagaaggactgccagggtatcattgaggatgtcattttacttggcgctcctgttgagggggaagccaagcattgggagcccttcagaaaagtcgtgagcggcaggattattaatggttattgccgtggcgattggcttctcagctttgtgtatagaacctcgagcgtccagcttagggtggcgggactgcagccagttctactgcaggataggcgcgtcgaaaatgtggacctgacctcagtcgtgagtggtcacctcgattacgccaagcagatggacgcaattttaaaagctgtcggcataaggacaaagcctggctgggacgaaaaagggctgctccttgcacccgggtgcctcccttctgaggagccccgacaagccgccgctgctgcatctagcgcactcgagtctggctgtccgtccggggggcctgagggaagtctgggacccgaggcaccgacacctgccctgccgtggccccaatag

SEQ ID NO: 337688 - DNA, 1905 bp, Artificial Sequence
  derived and/or modified sequence
atggcgatgtggaaccgaccttgccagagactgccacaacagccgctggtggcggagcccactgcggagggggagcctcacttacctaccggaagggagctgaccgaggcgaatagattcgcgtacgccgcactgtgtgggatctccctgagccagctttttccagagcccgagcattcctctttttgtactgagtttatggccggtctggtccagtggttggaactttcagaggccgtcctccccactatgacagcctttgcatctgggctgggtggcgagggagcggacgtgtttgttcaaatcttactgaaggatcccatcctgaaagacgaccccaccgtaattacccaggacttgttgtctttttctcttaaggacggacattacgatgctagagcccgagtccttgtctgtcacatgacctccctgctacaggtgccccttgaagagctcgatgtgctggaagagatgttcctcgagagcctcaaagagatcaaagaggaggaaagcgagatggccgaagcctcccgtaagaagaaagagaatcggcgaaagtggaagcgttatttgctgatcggtcttgccaccgtgggagggggaaccgtcatcggagttacaggcggactggccgctcctctggtcgctgcaggggcagctactatcattgggagcgcgggtgcggcagccctgggttccgctgccggaattgccattatgacttcactgttcggggctgcaggtgccggactcacgggctataaaatgaaaaagcgggtgggcgcaatagaagaatttacttttctccccctaactgagggtcgccagctacatattacaattgccgtcactggctggctagcatccgggaagtacagaacgttcagtgccccatgggccgcactcgctcacagcagggaacagtactgtttggcctgggaggccaaatatctaatggaacttgggaatgccttagagaccatcctatccggtttggcgaatatggtcgctcaagaagccttgaagtacacagtgctttctggcattgtggctgctctcacatggcctgcctctctgttgtccgtagctaacgtaatcgataacccttggggcgtctgcctgcatcgcagtgcagaggtgggtaaacacttggcacacatcctgttaagcagacaacaagggcgtaggccagtcacccttattggattctctctaggcgcacgcgtgatctacttttgcctgcaggagatggcccaggagaaagactgtcagggcatcattgaggatgtcattctgctgggcgctcccgtggaaggggaggcgaaacactgggagccctttcgaaaggtggttagcggaaggataataaatgggtactgcaggggtgattggcttctgagttttgtgtaccgcaccagttccgtccagctgcgcgtggcaggccttcaaccggtccttctgcaggataggcgagtagagaatgttgacctgacaagtgtggtcagcggccacctagattatgcaaagcagatggacgcaatattaaaagcggtcgggatacgaacaaaacccggttgggacgaaaagggcctgttattggccccaggttgcctgccctctgaggagcccagacaggccgctgccgctgcatcttctggtgagacgccacaccaggttggacagacccagggacctattagcggagacacctccaaacttgccatgagtaccgacccctcacaagcgcaggtacccgtgggactggaccagagcgaaggagcttcccttcccgcagccgcatctcctgagaggccccctatatgctcgcacggaatggaccccaatccattgggatgccccgactgcgcatgtaagacgcagggcccaagcaccggtttggattag

SEQ ID NO: 337689 - DNA, 1743 bp, Artificial Sequence
  derived and/or modified sequence
atggctatgtggaatcggccatgtcagcgacttccccaacagccactggttgcagaacctaccgccgaaggggaaccacacctgccaaccgggagggagctgaccgaggcaaaccggtttgcttacgccgctctgtgtggcatctcactgagccagctgtttcctgagcccgagcactcttcattttgtacagaattcatggcagggctcgtgcagtggttagagctgagtgaggctgtccttccgaccatgaccgctttcgcctcagggttgggtggggaaggtgccgatgtgttcgtgcagattcttctcaaggatcctatactcaaggatgatcctactgttataacccaggatctgctgtcattctccttaaaagatggccattacgatgctcgcgctagagttctggtttgccacatgacatctctgctgcaggtgccactcgaggaactggacgttctcgaggagatgttcctcgaatcattgaaggaaatcaaggaagaagagtcagaaatggccgaggcctcccgtaagaaaaaggagaataggaggaaatggaagcggtacctgctgatcgggctggctaccgttggaggcggaacagtgatcggggtgactgggggattggcggctccgctggtagccgctggagctgctaccattatcggatcagctggcgcagctgctctgggaagtgcagctggcattgcaattatgaccagcctctttggcgcagcaggggcaggcctgactggctataagatgaaaaagcgggtgggggcaatcgaggagttcaccttcctgccccttaccgaaggcagacagctgcacataaccatcgctgtcacggggtggttggcctccgggaagtaccgcaccttttctgctccctgggccgctctggcccacagtagagagcaatactgtttagcttgggaggccaagtatcttatggaactgggcaacgcactcgagactatcctctcaggcctcgccaatatggttgcccaggaagccttgaagtataccgtgttatcgggaattgtggccgcactcacatggccggcatccctcctgtcagtggctaacgtaattgacaatccatggggtgtgtgcctgcaccgttctgcggaggttggcaagcacctcgcccacatcctcctaagcaggcagcagggcagacggccagtaaccctgatcggatttagcctgggagctcgggttatttacttttgtcttcaggaaatggcccaggaaaaggattgccagggcattattgaagatgtcatcctgttgggggcaccagtggagggggaagccaaacactgggagccctttaggaaagtggttagtgggcgaattatcaatgggtactgcagaggggattggctcctcagctttgtttacaggacaagctcggtgcagcttcgagttgcagggttacagccagtgctcctccaagatagacgagtggaaaatgtggaccttacctccgttgtctccggacacttagattatgcaaagcaaatggacgccattcttaaggctgtgggcattagaacgaagcctgggtgggatgaaaagggccttctcctggcaccagggtgtttaccttctgaggaaccacgccaggctgcggcagccgcaagtagtgcactggagagtggttgtccgagtgggggaccagagggcagcctaggccctgaagcacctacaccagccctcccctggccccaatag

SEQ ID NO: 337690 - DNA, 2974 bp, Artificial Sequence
  derived and/or modified sequence
cgggcgggaggagccgctcgccggttttgccgcctccgcctttgccttcgcagccgcctccagtgttgtacattataaaccggggctgctgatgaggagtggggaactggctctctggaacgtgtgacagcaggcagaagggggcaatttgcatatttctccaaagaaccatccagaacctgagcagcctgtcttcagacagagagaggcccacggctgtttcttgaaatctggcgctgggaatggccatgtggaacaggccatgccagaggctgcctcagcagcctctggtagctgagcccactgcagagggggagccacacctgcccacgggccgggagctgactgaggccaaccgcttcgcctatgctgccctctgtggcatctccctgtcccagttatttcctgaacccgaacacagctccttctgcacagagttcatggcaggcctggtgcagtggctggagttgtctgaagctgtcttgccaaccatgactgcttttgcgagcggcctgggaggtgaaggagcagatgtgtttgttcaaattttactgaaggaccccatcttgaaggacgacccgacggtgatcactcaggaccttctgagcttctcactcaaggatgggcactatgacgcccgggccagagtcctcgtttgccacatgacctccctgctccaagtgcccttggaggagctggatgtccttgaagagatgttcctggagagcctgaaggaaatcaaagaagaggaatctgaaatggccgaggcatcccgaaagaagaaagaaaaccggaggaaatggaagcgttatctcctgataggcctggcgactgtcggaggcggaacggtgatcggtgtgactggaggtctagctgcaccccttgttgccgctggagcagcgacgattattggcagcgccggggcagcggctctgggctcagcagccggcatagccatcatgacctcgctgtttggtgcagctggagctggcctgacaggatacaagatgaagaagcgagtgggagccattgaagagttcacgtttctgcctctgacggagggcaggcagctgcacatcaccatcgccgtcacggggtggctcgcttctggcaaataccgcaccttcagtgccccgtgggctgccctggcccacagccgtgagcagtactgcctggcctgggaagccaagtacctgatggagctcggcaatgccctggagaccatcctcagtggtctcgccaacatggtggcccaggaggccctaaagtacacagtgttgtctggcattgtggctgccctgacctggccagcctcactcctcagtgtcgccaatgtcatcgacaacccctggggggtgtgtctccatcgatcagcagaggttggcaagcacctggcccacatcctgctctcccggcagcaggggcgacgacctgtcaccttgattggcttcagcctgggagccagagtcatctacttctgtctgcaggagatggctcaagagaaagattgccaaggaatcatcgaggacgtcatcctgctgggtgcgcctgtggagggagaagccaagcattgggagcctttccggaaggtggtgtccgggaggatcatcaacggctactgcaggggagactggctgctgagtttcgtgtaccgcacatcctcggtgcagctccgtgtcgccggcctacagcccgtgctgctgcaggacaggagggtggagaacgtggacctgacctctgtggtcagcggccacctggactatgccaagcagatggatgccatcctgaaggccgtgggcatccgcaccaagccaggctgggacgagaaggggctcttgctggccccaggctgcctgccctccgaggagcctcgccaggcagcagctgccgcctcatcaggcgagaccccccaccaggttgggcaaacccagggtcccatatccggagacacctccaaattggccatgtccacagaccccagccaagcccaggtgccagtagggctggaccagtctgaaggggcctcccttcctgctgctgccagccctgaaaggccccccatctgcagccatggcatggaccccaacccactgggctgccccgattgtgcctgcaagacccagggccccagcacggggctggactgaccacagcaggggacctgagccgtcttccccagtctccatatgcagctctctcttataccctcgggttcctcccaggagctctggaggtacaggatttccacaggcctctttcctaaatggaaggaattggaactgaaagggaaaggaaatggaaggaaggggaatttggaggagagaacacgcccacccttgggaagctgcctgtccccagaggagccccaccagggagcagctgccccctcatcagagacctgcagagtcaaccaagcacaggttagagtcccaggaccggaaaccaactgtgggctttctgtacttctcatagctttggagtctggctgtccatcaggaggtcccgagggctctctggggcctgaggctcccacaccagctctcccctggcctcaataaaaccaggtgcatgcctgttcttccatccacactccagggctgcccaccagctgacaggcaccatcaactggcagcaacagagcaggcgcaggtacaaagaaggcagctcactcctgctcttaggagatccaatcagatctgccctgtacagccatgtaggctgtgcgctgcataactccagggacatgagtcacacagacacaatgtgagtgtgctcccccgtcatgcaacatctggacaccactaacagagcatggtgaatacatgctgaattgcattcagtatggctgtgaactaggcctggggacaagaatgaattttacatggaaagaatttcctgtagcaggaacagaggggataacaacagcaataaataataataagaagaagctaccacttcttgagcatgtaccaca

SEQ ID NO: 337691 - DNA, 2403 bp, Artificial Sequence
  derived and/or modified sequence
caaacagagaattccaggagggcttggggagcctctggagaaaaaccaggctcctcatgttacaaggaggccatgtcttctggtgcccatgcctgaagttacaggagggaagaattactgctgctgacttttgagtggattttacagctgggtaaactgaggctcagagagggcaatttgcatatttctccaaagaaccatccagaacctgagcagcctgtcttcagacagagagaggcccacggctgtttcttgaaatctggcgctgggaatggccatgtggaacaggccatgccagaggctgcctcagcagcctctggtagctgagcccactgcagagggggagccacacctgcccacgggccgggagctgactgaggccaaccgcttcgcctatgctgccctctgtggcatctccctgtcccagttatttcctgaacccgaacacagctccttctgcacagagttcatggcaggcctggtgcagtggctggagttgtctgaagctgtcttgccaaccatgactgcttttgcgagcggcctgggaggtgaaggagcagatgtgtttgttcaaattttactgaaggaccccatcttgaaggacgacccgacggtgatcactcaggaccttctgagcttctcactcaaggatgggcactatgacgcccgggccagagtcctcgtttgccacatgacctccctgctccaagtgcccttggaggagctggatgtccttgaagagatgttcctggagagcctgaaggaaatcaaagaagaggaatctgaaatggccgaggcatcccgaaagaagaaagaaaaccggaggaaatggaagcgttatctcctgataggcctggcgactgtcggaggcggaacggtgatcggtgtgactggaggtctagctgcaccccttgttgccgctggagcagcgacgattattggcagcgccggggcagcggctctgggctcagcagccggcatagccatcatgacctcgctgtttggtgcagctggagctggcctgacaggatacaagatgaagaagcgagtgggagccattgaagagttcacgtttctgcctctgacggagggcaggcagctgcacatcaccatcgccgtcacggggtggctcgcttctggcaaataccgcaccttcagtgccccgtgggctgccctggcccacagccgtgagcagtactgcctggcctgggaagccaagtacctgatggagctcggcaatgccctggagaccatcctcagtggtctcgccaacatggtggcccaggaggccctaaagtacacagtgttgtctggcattgtggctgccctgacctggccagcctcactcctcagtgtcgccaatgtcatcgacaacccctggggggtgtgtctccatcgatcagcagaggttggcaagcacctggcccacatcctgctctcccggcagcaggggcgacgacctgtcaccttgattggcttcagcctgggagccagagtcatctacttctgtctgcaggagatggctcaagagaaagattgccaaggaatcatcgaggacgtcatcctgctgggtgcgcctgtggagggagaagccaagcattgggagcctttccggaaggtggtgtccgggaggatcatcaacggctactgcaggggagactggctgctgagtttcgtgtaccgcacatcctcggtgcagctccgtgtcgccggcctacagcccgtgctgctgcaggacaggagggtggagaacgtggacctgacctctgtggtcagcggccacctggactatgccaagcagatggatgccatcctgaaggccgtgggcatccgcaccaagccaggctgggacgagaaggggctcttgctggccccaggctgcctgccctccgaggagcctcgccaggcagcagctgccgcctcatcagctttggagtctggctgtccatcaggaggtcccgagggctctctggggcctgaggctcccacaccagctctcccctggcctcaataaaaccaggtgcatgcctgttcttccatccacactccagggctgcccaccagctgacaggcaccatcaactggcagcaacagagcaggcgcaggtacaaagaaggcagctcactcctgctcttaggagatccaatcagatctgccctgtacagccatgtaggctgtgcgctgcataactccagggacatgagtcacacagacacaatgtgagtgtgctcccccgtcatgcaacatctggacaccactaacagagcatggtgaatacatgctgaattgcattcagtatggctgtgaactaggcctggggacaagaatgaattttacatggaaagaatttcctgtagcaggaacagaggggataacaacagcaataaataataataagaagaa

SEQ ID NO: 337692 - DNA, 246 bp, Artificial Sequence
  derived and/or modified sequence
atgcacctgagagcccacagaaccagaagaggcaaggtgagccccaccgccaagaccaagagcctgctgcacttcatcgtgctgtgcgtggccggcgtggtggtgcacgcccaggagcagggcatcgacatcctgcaccagctgggcctgggcggcaaggacgtgagacacagcagccccgccaccgccgtgcccagcgccagcacccccctgccccagggcgtgcacctgaccgagagcggctag

SEQ ID NO: 337693 - DNA, 246 bp, Artificial Sequence
  derived and/or modified sequence
atgcacctgagggctcaccggacccgacgcggcaaagtatccccgaccgcaaaaactaagtcactgctgcacttcatcgtgctttgtgtagctggggtggtggtccatgcacaggagcaagggatagatatcttgcaccagctggggctcggaggtaaagatgtccgtcattcatcccctgcgactgccgtgccctcggcttccactccactgccccagggcgttcatcttacagaatctggctag

SEQ ID NO: 337694 - DNA, 246 bp, Artificial Sequence
  derived and/or modified sequence
atgcacctgcgggcccacaggacccggcggggcaaggtgagccccacagccaagaccaagagcctgctgcacttcatcgtgctgtgtgtggccggcgtggtggtgcacgcccaggagcagggcatcgacatcctgcaccagctgggcctgggcggcaaggatgtgcgccacagcagccctgccacagctgtgcccagcgccagcacccccctgccccagggcgtgcacctgacagagagcggctag

SEQ ID NO: 337695 - DNA, 246 bp, Artificial Sequence
  derived and/or modified sequence
atgcacctgcgggcccaccggacccggcggggcaaggtgagccccacggctaaaacgaaatcactacttcattttatagtcctgtgcgtggccggtgtggtagtacatgcacaggagcagggcattgacatcctgcatcagttgggactgggcggcaaggacgttcgccatagctccccggctactgccgtaccaagcgcgagtacccccttaccacagggggtccatctgaccgaatctggatag

SEQ ID NO: 337696 - DNA, 366 bp, Artificial Sequence
  derived and/or modified sequence
gcgcctgcagttgccaccggccccctcgcaccgacttgatttccgaatacctgcaccctaagcagttcagagttggcttctgttttccgttagcgctttgctgcacggacaaatgcatacaaatgcatttaagagcccacagaacaaggcgtggaaaagtctcccccacggcaaaaacgaaatcacttcttcattttattgtactatgtgtggctggggtggttgttcatgcacaagaacaaggcatagatattcttcatcaactaggccttggaggcaaagacgtaagacactcatcaccagcgactgctgtaccatcagcatctacaccgttacctcagggggtccatttaacagaatcaggag

SEQ ID NO: 337697 - DNA, 246 bp, Artificial Sequence
  derived and/or modified sequence
atgcacctgcgggctcacaggactaggaggggaaaggtgtcccccactgctaaaacaaaaagccttcttcatttcattgtgctgtgcgtggctggagtagtcgtccacgcccaggaacagggcattgatattcttcaccagctcggcctggggggtaaagacgtgcgacatagcagcccagccactgcagttccatcagcctccacacccctgccacagggtgtacatctgaccgagagcggctag

SEQ ID NO: 337698 - protein, 524 aa, Artificial Sequence
  derived and/or modified sequence
MKEESAAQLGCCHRPMALGGTGGSLSPSLDFQLFRGDQVFSACRPLPDMVDAHGPSCASWLCPLPLAPGRSALLACLQDLDLNLCTPQPAPLGTDLQGLQEDALSMKHEPPGLQASSTDDKKFTVKYPQNKDKLGKQPERAGEGAPCPAFSSHNSSSPPPLQNRKSPSPLAFCPCPPVNSISKELPFLLHAFYPGYPLLLPPPHLFTYGALPSDQCPHLLMLPQDPSYPTMAMPSLLMMVNELGHPSARWETLLPYPGAFQASGQALPSQARNPGAGAAPTDSPGLERGGMASPAKRVPLSSQTGTAALPYPLKKKNGKILYECNICGKSFGQLSNLKVHLRVHSGERPFQCALCQKSFTQLAHLQKHHLVHTGERPHKCSIPWVPGRNHWKSFQAWREREVCHKRFSSSSNLKTHLRLHSGARPFQCSVCRSRFTQHIHLKLHHRLHAPQPCGLVHTQLPLASLACLAQWHQGALDLMAVASEKHMGYDIDEVKVSSTSQGKARAVSLSSAGTPLVMGQDQNN

SEQ ID NO: 337699 - DNA, 1670 bp, Artificial Sequence
  derived and/or modified sequence
aggaacctgagcagatgccttgacccagaccagagacccaagccaaggaaagcccatgatcaccagagtaatggggatatgaaggaagaatcagctgcacaattaggttgttgtcataggcccatggccctgggaggtacagggggctccctgtcccccagcctggacttccagctcttccgaggtgaccaggtcttctcagcctgcagaccacttccagacatggtggatgctcatggcccatcctgtgccagctggctgtgtcccttgcccctggcaccgggcaggtctgcactgctggcctgcctacaggacctggacctgaacctgtgcaccccacagccggcacccctgggcacagacctgcagggcctccaagaggacgccttgagcatgaagcacgagccaccagggctgcaggccagctccaccgatgacaagaaattcacagtcaagtacccacagaacaaggacaagctgggaaaacagccagaaagagctggcgagggggccccctgcccagccttctcctctcataacagctcttccccaccaccgctgcagaacagaaagagccccagccccttggctttctgcccctgtccccctgtcaactccatctccaaggagctcccatttctcctccacgccttctaccctggatacccacttctcctgcctccaccccacctgttcacctatggggccctaccttctgaccaatgtccccacctcctcatgctgccccaagacccctcctaccccaccatggctatgcctagcctgctgatgatggtcaatgagctggggcaccccagcgctcggtgggagaccctgcttccctacccaggggccttccaagcctctggccaagctctgccttcccaggcccgaaatccaggtgctggagctgccccaaccgactccccaggcctggagcgtggtggcatggcatctccagcaaagcgggtcccattgagttcccagacaggcaccgcagccttgccttacccgctgaaaaagaagaatggcaaaatcctgtacgagtgcaacatatgtggcaagagctttgggcagctctccaatctcaaggtccacctgcgtgtgcacagtggagagcgtccattccagtgtgccttgtgccagaagagcttcactcaacttgcccacctgcagaagcaccacctggtgcacactggggagcggccccacaagtgctcgataccgtgggttccaggaagaaatcactggaaaagcttccaggcctggagggaaagagaggtgtgccacaagcgcttcagcagctccagtaacctcaagacccacctgcgcctgcactccggggcccggcccttccagtgcagtgtctgccggagtcgcttcacccagcacatccacctgaagctgcaccatcggctgcatgccccacagccctgtggcctggtgcacacccagctgcccctggcctctctggcctgccttgcccaatggcaccagggggcactagatcttatggcggtggcatctgagaaacacatgggctatgacatagatgaggtcaaagtgtcctcgacatcccaggggaaagcaagagcagtgagcctgagcagtgccgggactcccctggtgatggggcaggaccagaacaattaaaaatgtttcttctgtca

SEQ ID NO: 337700 - DNA, 1428 bp, Artificial Sequence
  derived and/or modified sequence
atggagggtctcttaacccgttgtcgcgcactccctgctttggcaacctgttcacgccaactctccggatatgtgccctgccgttttcaccactgtgcccccaggcgcggcagacgcttgctcttatctagagtgttccagccacagaaccttcgggaggatcgagtgttatctctgcaggacaaaagcgatgatcttacatgcaagagccaacgcctgatgctgcaggtgggtctcatttacccagcttcccccggctgctaccacctgttgccatacacagtacgtgctatggagaagctcgtccgcgtaatagatcaagaaatgcaggcaatcggcgggcagaaggttaatatgccctcactgtctcccgctgaactgtggcaggctacgaataggtgggatttaatgggaaaggaattacttagactgagagatcggcatggcaaagaatactgcttagggccaacccacgaggaagcaattacagcccttatcgcatcacaaaagaagctcagctacaagcagctgcccttcctgctgtatcaggtgacacgtaaatttagggacgaacctcggcccagattcgggcttctcaggggtcgggagttttacatgaaggatatgtacaccttcgattcgtcccctgaagctgcgcagcaaacctactcactagtttgcgatgcttattgctccctttttaacaaacttggactcccctttgtcaaggtccaagctgatgtgggcactatcgggggaacagtgtcccatgagtttcaactgccagtcgacattggggaggatcgacttgccatttgccctcgctgcagctttagcgcgaacatggagacactcgatttgtcacagatgaactgccctgcctgccaagggccattgaccaagactaagggaatagaggttggacacactttctatttgggcacaaagtacagcagtatatttaatgcccagttcactaatgtttgtgggaagcctaccctggcagaaatgggttgctacgggctgggtgtgacgcgtatccttgccgctgcgatcgaggttctgtccaccgaagattgtgtgcgctggccttcccttttggccccataccaggcatgtctaatacctccaaagaaagggtccaaggagcaagcggcttccgaattaattggtcagctgtatgatcatattacggaagcagtaccgcaattgcacggggaagtgctactggatgaccggacgcatcttacaatcggcaacaggctaaaggacgctaacaaatttgggtacccctttgtgatcatcgccggcaaacgggcgctggaggaccctgctcacttcgaggtgtggtgccagaatactggcgaggtcgcatttctaaccaaggacggcgtgatggacctccttacaccggtgcagacagtttag

SEQ ID NO: 337701 - DNA, 1428 bp, Artificial Sequence
  derived and/or modified sequence
atggagggcctgctgacccgctgccgggccctgcctgccctggccacctgcagccggcagctgagcggctacgtgccctgccgcttccaccactgtgccccccggcggggccggcggctgctgctgagcagggtcttccagccccagaacctgagagaagatagagtgctgagcctgcaggacaagagtgatgacctgacctgcaagagccagaggctgatgctgcaggtgggcctcatctacccagccagccctggctgctaccacctgctgccctacacagtgcgggccatggagaagctggtgcgggtgattgaccaggagatgcaggccatcggcggccagaaggtgaacatgcccagcctgagccctgctgagctgtggcaggccaccaaccgctgggacctgatgggcaaggagctgctgcggctgcgggacagacatggcaaggagtactgcctgggccccacccatgaggaggccatcacagccctgattgccagccagaagaagctgagctacaagcagctgcccttcctgctgtaccaggtgaccaggaagttcagagatgagccccggccccgcttcggcctgctgcggggccgggagttctacatgaaggacatgtacacctttgacagcagccctgaggccgcccagcagacctacagcctggtgtgtgatgcctactgcagcctcttcaacaagctgggcctgccctttgtgaaggtgcaggctgatgtgggcaccatcggcggcaccgtgtcccatgagttccagctgcctgtggacattggagaagatcggctggccatctgcccccgctgcagcttcagcgccaacatggagaccctggacctgagccagatgaactgcccagcctgccagggccccctgaccaagaccaagggcatcgaggtgggccacaccttctacctgggcaccaagtacagcagcatcttcaatgcccagttcaccaacgtgtgtgggaagcccaccctggccgagatgggctgctacggcctgggcgtgacccgcatcctggccgccgccatcgaggtgctgagcacagaggactgtgtgcgctggcccagcctgctggccccctaccaggcctgcctgatcccccccaagaagggcagcaaggagcaggccgccagcgagctgattggccagctgtatgaccacatcacagaggccgtgccccagctgcatggagaggtgctgctggatgacaggacccacctgaccatcggcaaccggctgaaggatgccaacaagtttggctaccccttcgtcatcatcgccggcaagagggccctggaggaccctgcccactttgaggtgtggtgccagaacacaggagaggtggccttcctgaccaaggatggagtgatggacctgctgacccctgtgcagacagtgtag

SEQ ID NO: 337702 - DNA, 1428 bp, Artificial Sequence
  derived and/or modified sequence
atggagggcctgctgacccggtgccgggccctgcccgccctggccacttgtagcagacaactgagtggatatgtgccatgcaggtttcatcactgtgctcctagacggggcagacgcttgctgctgagccgggtattccagccccagaacctcagggaagaccgagtgctgagcctgcaggacaagtctgacgacctgacctgcaagagtcagagattgatgctgcaggttggcctcatatatcccgctagccccggatgttatcatctgctgccctatacagtccgggctatggagaaactggtgcgcgtcatcgatcaggagatgcaagctatcggaggtcagaaggtgaatatgccctccttatcacccgccgagctgtggcaggcaacaaacaggtgggatctaatgggcaaggaactgctgagactccgagatagacatgggaaagagtactgtctggggccaacccacgaagaagccattaccgcactcatcgcttctcagaagaagctgagctataaacagttgcctttcctgttataccaggtgacgcgcaagtttagggacgaacctcgccccagatttgggctattgagaggtagagaattctacatgaaggatatgtacacattcgactcgtcacccgaggcggcccagcagacatactccttagtgtgcgacgcctattgttccctcttcaataaactgggactgccttttgttaaggtacaggccgatgtcggcaccattggcgggaccgttagccacgagtttcaactgcccgttgatattggggaggacagacttgctatatgtcctcgctgtagtttctctgccaatatggagacattagatctttcccagatgaattgtccagcgtgccaaggccctctgaccaaaacaaagggcatcgaagtaggccatacattttacctgggcacaaagtacagctcaattttcaatgctcagtttacgaatgtgtgtggaaaacctactcttgcagaaatgggctgctatggcctgggagtcacgaggatactcgcagccgccattgaagtactatccaccgaagactgtgtcaggtggccctcactgctggctccttaccaggcatgcctcatcccccccaagaaaggtagcaaagagcaggcagccagcgaattgatcggccaattatatgaccatattaccgaagcggtaccacagctgcacggggaggttctgctcgatgatcggactcacctgacaatcggaaataggctcaaagacgcgaataagtttgggtaccctttcgttataattgccggaaagagagcgttggaggatccagcacactttgaagtctggtgtcagaatacaggcgaagtggccttcttgactaaggatggggtaatggacttactgacaccagtacagacagtgtag

SEQ ID NO: 337703 - DNA, 1428 bp, Artificial Sequence
  derived and/or modified sequence
atggaaggtttgctcacacgctgccgcgctttgccagccttagctacctgttccaggcagctcagcggttacgtgccgtgccggtttcatcactgcgcaccacgtcgcggtagaaggctactgctatcccgggtattccagccacaaaacctgcgagaagacagagtattgtcacttcaggacaagtctgatgatctgacttgcaaatcccagcgactgatgctgcaggtggggcttatataccctgcatctccaggttgttaccaccttctgccctacaccgtgagagcaatggaaaagcttgtaagggtgattgatcaagaaatgcaggccatcgggggacaaaaggttaacatgccctccctttctcccgctgagctgtggcaagctacaaaccgctgggacttgatgggaaaggaactccttagattgcgcgatagacacggaaaggaatactgtcttggacccacccatgaggaggcaattaccgcgctgatcgccagccaaaagaagctaagctacaagcagctaccatttctcctttaccaggttactcgcaagttccgcgatgaacctagacctaggttcggtctgctgcgcggaagggagttctacatgaaagatatgtacacctttgactcttccccagaggcagcccaacaaacatatagcttggtgtgcgatgcctactgttccctctttaacaaactcgggctgccatttgtgaaggttcaagccgatgtgggtacaataggcggaacggtgtcgcacgagtttcagctgccagtggacataggagaagatagactcgcgatatgtcccagatgcagttttagtgccaacatggagaccctggacctgagccaaatgaactgtcccgcttgtcagggacccttaacaaagacaaagggcattgaggttggccataccttttacctgggtacaaagtactctagcattttcaatgcccaatttaccaatgtgtgtggtaaacctaccttggcagaaatgggatgctatgggctgggcgtcacacgcattctcgcagccgctatagaggtgctttctaccgaggattgcgtgagatggcccagcctgctggccccataccaggcatgcctgatcccacctaagaagggctccaaagaacaagctgccagcgagctgataggtcaactgtatgaccatatcacggaggctgtgcctcagctccacggcgaggtcctattagatgacagaacccacttaacaattggaaaccgtctcaaggacgcaaacaaatttggctacccatttgttattatcgcaggcaaacgagctctggaggatccagctcattttgaggtatggtgccaaaataccggcgaagtggcatttctgactaaggatggtgtcatggacttactgaccccggtgcaaacagtctag

SEQ ID NO: 337704 - DNA, 2347 bp, Artificial Sequence
  derived and/or modified sequence
gcgcgctggcccggcacggcggtggtcttgcgggaggcgtgggctgggattgcggtgcctgtgcttcccggtgccagggtgtcatggaagggctgctgacaagatgcagagcattgcccgccctggccacctgcagccgccagctctctgggtatgttccttgcaggtttcaccactgtgccccaagaagagggcggcgcctgctgctgtctcgtgtgttccagccacagaaccttcgggaagaccgggtgctctccctgcaggacaaatctgatgacctgacctgtaagagccagcggctgatgctgcaggtgggcctgatctacccagcaagccccggctgttaccacctcctgccatataccgtccgtgccatggagaagctcgtgcgagtgatagaccaggagatgcaggccatcgggggccagaaagtcaacatgcccagcctcagcccggcagagctctggcaagccaccaaccggtgggacttgatgggcaaagagctgctaagacttagagacaggcatggcaaggaatactgcttaggaccaactcacgaggaagccattacggccttaattgcctcccagaagaaactgtcctacaagcagcttcccttcctgctgtaccaagtgacaaggaagtttcgggatgagcccaggccccgctttggtcttctccgtggccgagagttttacatgaaggatatgtacacctttgactcctccccagaggctgcccagcagacctacagcctggtgtgtgatgcctactgcagcctgttcaacaagctagggctgccatttgtcaaggtccaggccgatgtgggcaccatcgggggcacagtgtctcatgagttccagctcccagtggatattggagaggaccggcttgccatctgtccccgctgcagcttctcagccaacatggagacactagacttgtcacaaatgaactgccctgcttgccagggcccattgactaaaaccaaaggcattgaggtggggcacacattttacctgggtaccaagtactcatccattttcaatgcccagtttaccaatgtctgtggcaaaccaaccctggctgaaatggggtgctatggcttgggtgtgacacggatcttggctgctgccattgaagtcctctctacagaagactgtgtccgctggcccagcctactggccccttaccaagcctgcctcatcccccctaagaagggcagtaaggagcaggcggcctccgagctcatagggcagctgtacgaccacatcacagaggcagtgcctcagcttcacggggaggtgctcctggacgacaggacccatctgaccatcggaaacagactgaaagatgccaacaagtttggctacccctttgtgataatcgctggcaagagggccctggaggaccctgcacattttgaggtttggtgtcagaacactggtgaggtggccttcctcaccaaagatggagtcatggatttactgaccccagtgcagactgtctaaatgcccccagcccacccctgcccccatttgcagccttggtgttcgttctaacactgcattttcctacacccctttcctggactgctctctccagaaacagcacagctcatggagggtgagatcatgttagggaaatcaatttttatctagtcatttgttcagattatttgtatttaaagtcattaacttgatccctttctccagactggccatgccgccatatacctttccttttgtattccattgtggaagcttctaggaggctgagaagcaggagatccaagctccagtcctgggtgttaccctgaggggggaagtcacttcccttctctcagctgagtttttcacgtgtaagatgagaatggctgatggctgagagcccaccaaccttccccaccccgtatcagtttgaccacgggccttttgctacattctatccagagagcaggcctgccagcccctctccactgagaagttgggctgagagtatggggaaaagaatcaagagacctgactgccgccaactcactagtgacttagatacatcccctccccctgctggggcctcagtttccccatctgtaacttgagaaaatagaactagatctgtaaagtctggaactagatctgtaacgtccttataggtgtcactagggggttccatgagaggtgtgtgacaggcagtctgattcctctcattctccatagtctgtttcctggaaagtcgatgtaattaactgatggcccaaaaactacctcaagagacctggccctgttaagacggcttaaccactgagatcccgttctattgatttaataaagtcaaactattggaa

SEQ ID NO: 337705 - DNA, 1428 bp, Artificial Sequence
  derived and/or modified sequence
atggagggcctgctgaccagatgcagagccctgcccgccctggccacctgcagcagacagctgagcggctacgtgccctgcagattccaccactgcgcccccagaagaggcagaagactgctgctgagcagagtgttccagccccagaacctgagagaggacagagtgctgagcctgcaggacaagagcgacgacctgacctgcaagagccagagactgatgctgcaggtgggcctgatctaccccgccagccccggctgctaccacctgctgccctacaccgtgagagccatggagaagctggtgagagtgatcgaccaggagatgcaggccatcggcggccagaaggtgaacatgcccagcctgagccccgccgagctgtggcaggccaccaacagatgggacctgatgggcaaggagctgctgagactgagagacagacacggcaaggagtactgcctgggccccacccacgaggaggccatcaccgccctgatcgccagccagaagaagctgagctacaagcagctgcccttcctgctgtaccaggtgaccagaaagttcagagacgagcccagacccagattcggcctgctgagaggcagagagttctacatgaaggacatgtacaccttcgacagcagccccgaggccgcccagcagacctacagcctggtgtgcgacgcctactgcagcctgttcaacaagctgggcctgcccttcgtgaaggtgcaggccgacgtgggcaccatcggcggcaccgtgagccacgagttccagctgcccgtggacatcggcgaggacagactggccatctgccccagatgcagcttcagcgccaacatggagaccctggacctgagccagatgaactgccccgcctgccagggccccctgaccaagaccaagggcatcgaggtgggccacaccttctacctgggcaccaagtacagcagcatcttcaacgcccagttcaccaacgtgtgcggcaagcccaccctggccgagatgggctgctacggcctgggcgtgaccagaatcctggccgccgccatcgaggtgctgagcaccgaggactgcgtgagatggcccagcctgctggccccctaccaggcctgcctgatcccccccaagaagggcagcaaggagcaggccgccagcgagctgatcggccagctgtacgaccacatcaccgaggccgtgccccagctgcacggcgaggtgctgctggacgacagaacccacctgaccatcggcaacagactgaaggacgccaacaagttcggctaccccttcgtgatcatcgccggcaagagagccctggaggaccccgcccacttcgaggtgtggtgccagaacaccggcgaggtggccttcctgaccaaggacggcgtgatggacctgctgacccccgtgcagaccgtgtag

SEQ ID NO: 337706 - protein, 58 aa, Artificial Sequence
  derived and/or modified sequence
MAASRSTRVTRSTVGLNGLDESFCGRTLRNRSIAHPEEISSNSQVRSRSPKKRPEPVP

SEQ ID NO: 337707 - DNA, 177 bp, Artificial Sequence
  derived and/or modified sequence
atggccgccagcagaagcaccagagtgaccagaagcaccgtgggcctgaacggcctggacgagagcttctgcggcagaaccctgagaaacagaagcatcgcccaccccgaggagatcagcagcaacagccaggtgagaagcagaagccccaagaagagacccgagcccgtgccctag

SEQ ID NO: 337708 - DNA, 177 bp, Artificial Sequence
  derived and/or modified sequence
atggcagccagtagatctactcgagtcacgcggtctactgtgggactgaatggcctggacgaatctttttgcggtaggacccttcggaacaggtctatcgcccacccagaggaaatttcgtctaattcacaggtccgatcaagatctcctaagaaacggcccgaaccggtgccttag

SEQ ID NO: 337709 - DNA, 177 bp, Artificial Sequence
  derived and/or modified sequence
atggccgccagccgcagcaccagggtgaccaggagcacagtgggcctgaatggcctggatgagagcttctgtggccgcaccctgaggaacagaagcatcgcccaccctgaggagatcagcagcaacagccaggtgcgcagccgcagccccaagaagaggcctgagcctgtgccctag

SEQ ID NO: 337710 - DNA, 177 bp, Artificial Sequence
  derived and/or modified sequence
atggccgccagccggagcacccgggtgacccggagcaccgtgggcttgaatggcctcgatgaatccttctgcgggagaactttgagaaatcgatccatcgcccaccccgaggagatttcatcaaatagccaagtgaggtcaagaagccctaagaagcgcccagagcctgtgccgtag

SEQ ID NO: 337711 - DNA, 177 bp, Artificial Sequence
  derived and/or modified sequence
atggctgctagcagatctacaagagttacacgttccactgtcgggctgaatggcctggacgagtcattctgtggacggaccctaagaaatcggtccattgcccatccagaggagatctccagcaatagtcaggtacggagccgatctcctaaaaaacgcccagagcctgtgccctag

SEQ ID NO: 337712 - DNA, 561 bp, Artificial Sequence
  derived and/or modified sequence
atcgagcttcctgcagcggtggccacccgagcaagtgccgtggcgggggcggagagcggccacggcggcggcgcctccccaagtggcccgttgcgtccgaccccgcgtgaaagatatcaagttattctagtacaaccatataaataaataatacctgaagtctcagtgtaacatggacaattaacagtgatgacagataaatacagacgcatggggatcaaatactaggcaaaacgctttttaaaagaaaaatttaggaggttctagtattcttcatggctgaagctgagagagtctgaaaccctgatgcttaagctccattctagatcatagctccaactccttcaggatataaggaaaagagattatatttccacaatgatagatctttggttgtacaggtttcccaatgagtggatcatgatgaccgtattgtagggacttgccatagtatggctgcttcccgatctactcgtgttacaagatcaacagtggggttaaacggcttggatgaatctttttgtggtagaactttaaggaatcgtagcattgcgcatcctg

SEQ ID NO: 337713 - DNA, 603 bp, Artificial Sequence
  derived and/or modified sequence
gattctcgcgggacctcgttggcagagcagttgtcctggatggcggagccttgggttccgggggcctgggacctgcaactctttctacaagatatcaagttattctagtacaaccatataaataaataatacctgaagtctcagtgtaacatggacaattaacagtgatgacagataaatacagacgcatggggatcaaatactaggcaaaacgctttttaaaagaaaaatttaggaggttctagtattcttcatggctgaagctgagagagtctgaaaccctgatgcttaagctccattctagatcatagctccaactccttcaggatataaggaaaagagattatatttccacaatgatagatctttggttgtacaggtttcccaatgagtggatcatgatgaccgtattgtagggacttgccatagtatggctgcttcccgatctactcgtgttacaagatcaacagtggggttaaacggcttggatgaatctttttgtggtagaactttaaggaatcgtagcattgcgcatcctgaagaaatctcttctaattctcaagtacgatcaagatcaccaaagaagagaccagagcctgtgcc

SEQ ID NO: 337714 - protein, 409 aa, Artificial Sequence
  derived and/or modified sequence
MGQSQANHIPGDRSALEGEIGKDVSTSYRHSWSDHKHLAQPDTAVISVVGSRHNQNLGCYPVELERGPRGFGFSLRGGKEYNMGLFILRLAEDGPAIKDGRIHVGDQIVEINGEPTQGITHTRAIELIQAGGNKVLLLLRPGTGLIPDHGDWDINNPSSSNVIYDEQSPLPPSSHFASIFEESHVPVIEESLRVQICEKAEELKDIVPEKKSTLNENQPEIKHQSLLQKNVSKRDPPSSHGHSNKKNLLKVENGVTRRGRSVSPKKPASQHSEEHLDKIPSPLKNNPKRRPRDQSLSPSKGENKSCQVSTRAGSGQDQCRKSRGRSASPKKQQKIEGSKAPSNAEAKLLEGKSRRIAGYTGSNAEQIPDGKEKSDVIRKDAKQNQLEKAEQGLQRKKSKEWLRNLFHPK

SEQ ID NO: 337715 - DNA, 387 bp, Artificial Sequence
  derived and/or modified sequence
atgaagcacaagtacaacaccctgagctggtacaagaaggagagaagcacccagctgagaagattcatcgtgcaccagcccgaggtgggcctgttcttcttcctgagagacgtggtgtacaactacatcaccgagaagaccacctgcagatgccccctgacccaggagagaccctgcgacaccggcggcaagttcggcagaatctggatctgccagcccgaggagctgggcaagatgcagatctggatctgccagcccgaggagctgggcaagatgcagatcgacaagaacagaaccatggtgcagcagatgtggtacatctggtacggcggcctggacaccagcaccaacagcctgctgcccatcctggtgagaggcatggcctag

SEQ ID NO: 337716 - DNA, 1230 bp, Artificial Sequence
  derived and/or modified sequence
atgggccagagccaggccaaccacatccccggcgacagaagcgccctggagggcgagatcggcaaggacgtgagcaccagctacagacacagctggagcgaccacaagcacctggcccagcccgacaccgccgtgatcagcgtggtgggcagcagacacaaccagaacctgggctgctaccccgtggagctggagagaggccccagaggcttcggcttcagcctgagaggcggcaaggagtacaacatgggcctgttcatcctgagactggccgaggacggccccgccatcaaggacggcagaatccacgtgggcgaccagatcgtggagatcaacggcgagcccacccagggcatcacccacaccagagccatcgagctgatccaggccggcggcaacaaggtgctgctgctgctgagacccggcaccggcctgatccccgaccacggcgactgggacatcaacaaccccagcagcagcaacgtgatctacgacgagcagagccccctgccccccagcagccacttcgccagcatcttcgaggagagccacgtgcccgtgatcgaggagagcctgagagtgcagatctgcgagaaggccgaggagctgaaggacatcgtgcccgagaagaagagcaccctgaacgagaaccagcccgagatcaagcaccagagcctgctgcagaagaacgtgagcaagagagacccccccagcagccacggccacagcaacaagaagaacctgctgaaggtggagaacggcgtgaccagaagaggcagaagcgtgagccccaagaagcccgccagccagcacagcgaggagcacctggacaagatccccagccccctgaagaacaaccccaagagaagacccagagaccagagcctgagccccagcaagggcgagaacaagagctgccaggtgagcaccagagccggcagcggccaggaccagtgcagaaagagcagaggcagaagcgccagccccaagaagcagcagaagatcgagggcagcaaggcccccagcaacgccgaggccaagctgctggagggcaagagcagaagaatcgccggctacaccggcagcaacgccgagcagatccccgacggcaaggagaagagcgacgtgatcagaaaggacgccaagcagaaccagctggagaaggccgagcagggcctgcagagaaagaagagcaaggagtggctgagaaacctgttccaccccaagtag

SEQ ID NO: 337717 - DNA, 1230 bp, Artificial Sequence
  derived and/or modified sequence
atgggacagtcccaggctaaccatattccgggagacaggtctgccctggagggggagatagggaaggacgtatcgacctcttacagacacagctggtctgaccacaagcacttagcccaacctgatacagctgtcatttcagtagttggttccagacacaatcaaaacctggggtgctaccccgtggagctggaaagaggcccgcggggatttggcttctctctgcggggaggaaaagagtataatatgggtttgtttattttgaggctagccgaggacggccccgctattaaagatggacgcattcacgtgggggaccaaatagtcgaaataaacggggagccaacacaagggatcacgcatactagggctatcgaactgattcaggccgggggaaacaaggtgctccttcttttgaggcccggaactggactgatccctgatcacggcgactgggacatcaacaacccatcttcgtccaatgtcatttatgacgagcagtctcctctgcctccttcgagccattttgcatccatctttgaggagagccacgtgccggtgatcgaggagagcctgagggtacagatttgtgaaaaggctgaagagcttaaagacatagtcccagaaaagaagtccacacttaatgaaaatcaacccgagattaagcatcagtccctgttgcaaaagaacgtgtctaaacgggaccccccctccagccatggacatagtaacaagaaaaatttgctgaaagtggaaaatggtgtaacccggcgcggcagaagtgtttccccaaaaaaaccagctagccagcacagtgaggagcacttagataaaataccctcaccattgaagaataatccgaagaggcgaccacgcgatcagagccttagcccgtccaagggtgagaataagagctgtcaggtgagcacccgggccgggtcaggtcaggaccaatgtagaaaatctaggggtaggagcgctagtccgaaaaagcagcagaaaatcgaagggtccaaggcccctagcaatgctgaggctaaactattggaaggtaagtcaagacgcattgccgggtacacaggcagtaatgctgagcagatccccgacggcaaggaaaaatccgacgtaattcgcaaggacgccaagcagaatcagcttgagaaggctgagcaggggctgcagaggaaaaaaagcaaggagtggctcagaaacctttttcaccccaaatag

SEQ ID NO: 337718 - DNA, 1230 bp, Artificial Sequence
  derived and/or modified sequence
atgggccagagccaggccaaccacatccctggggacagaagtgccctggagggggagatcggcaaggatgtgtccaccagctaccgccacagctggagcgaccacaagcacctggcccagcctgacacagctgtgatctctgtggtgggcagccgccacaaccagaacctgggctgctaccctgtggagctggagcggggcccccggggcttcggcttcagcctgcggggcggcaaggagtacaacatgggcctcttcatcctgcggctggccgaggatggccctgccatcaaggatggccgcatccacgtgggggaccagatcgtggagatcaacggggagcccacccagggcatcacccacacccgggccatcgagctgatccaggccggcggcaacaaggtgctgctgctgctgcggcccggcaccggcctcatcccagaccatggagactgggacatcaacaaccccagcagcagcaatgtcatctatgatgagcagagccccctgccccccagcagccactttgccagcatctttgaggagagccacgtgcctgtgattgaggagagcctgcgggtgcagatctgtgagaaggccgaggagctgaaggacatcgtgcctgagaagaagagcaccctgaatgaaaaccagcctgagatcaagcaccagagcctgctgcagaagaatgtgtccaagagggacccccccagcagccacggccacagcaacaagaagaacctgctgaaggtggagaatggagtgacccggcggggccgctctgtgagccccaagaagccagccagccagcacagcgaggagcacctggacaagatccccagccccctgaagaacaaccccaagagaagaccccgggaccagagcctgagccccagcaagggggagaacaagagctgccaggtgtccacccgggccggcagcggccaggaccagtgcaggaagagccggggccgcagcgccagccccaagaagcagcagaagattgagggcagcaaggcccccagcaatgctgaggccaagctgctggagggcaagagcagaagaattgctggctacacaggcagcaatgctgagcagatcccagatggcaaggagaagagtgatgtgatcaggaaggatgccaagcagaaccagctggagaaggccgagcagggcctgcagaggaagaagagcaaggagtggctgaggaacctcttccaccccaagtag

SEQ ID NO: 337719 - DNA, 1230 bp, Artificial Sequence
  derived and/or modified sequence
atgggccagagccaggccaaccacatccccggcgaccggagcgccctggaaggggagattggtaaagacgttagtacttcgtaccggcactcttggagcgatcacaagcacttagcgcagcctgatactgccgtgatttccgtcgtgggaagcaggcacaaccagaaccttggttgttacccagttgagctggagagaggcccacgaggctttgggttcagtctgaggggtggcaaggagtataacatgggtctattcatcctgaggctcgcagaggacggtccagccattaaggatgggcggatccatgtgggcgatcagatagttgaaataaacggagagcctactcagggcataacacatacaagggccattgagctgattcaggccggcggaaataaggtgcttttgctgctgaggccaggaacagggctgattcccgatcacggggactgggatattaataacccctcaagctcaaatgtaatctacgacgaacagtctccattgcccccctcatcccattttgctagcatttttgaggaatcacatgtaccggtgatcgaagagagcctccgcgtgcagatttgcgagaaggctgaggaactgaaagacatcgttcccgaaaagaaatccaccttgaatgagaaccaacccgagatcaaacaccagtcccttcttcaaaagaatgtatctaagcgagatccgccatcatctcacggacactccaacaaaaaaaacctgctcaaggtcgaaaacggagtgaccagaagggggcgctcagtttcgcctaaaaagcctgcctcacaacacagtgaagagcacctggacaagattccctccccactgaagaacaaccccaagagacgccctagggatcaaagtctcagcccaagcaaaggcgagaacaagtcctgccaggtctcgacacgggctggaagcggccaggatcaatgtcgcaaaagccggggtaggtccgccagccccaaaaagcagcaaaaaatagaaggatcaaaggccccaagtaacgcagaggctaagctgcttgagggcaagtcgagaaggatcgcaggctataccggatccaacgcggaacagattcctgatggtaaggaaaagagcgacgtgattaggaaagatgcaaagcaaaaccagcttgagaaagccgaacaggggcttcagcgaaaaaagagcaaggagtggcttcggaatttgttccacccaaaatag

SEQ ID NO: 337720 - DNA, 2267 bp, Artificial Sequence
  derived and/or modified sequence
gatcaaagatgctggtgtcaccgtcacactaacggtcattgctgaagaagagcatcatggtccaccatcaggaacaaactcagccaggcaaagcccagccctgcagcacaggcccatgggacagtcacaggccaaccacatacctggggacagaagtgccctagaaggtgaaattggaaaagatgtctccacttcttacagacattcttggtcagaccacaagcaccttgcacagcctgacaccgcagtaatttcagttgtaggcagtcggcacaatcagaaccttggttgttatccagtagagctggagagaggcccccggggctttggattcagcctccgaggggggaaggagtacaacatggggctgttcatccttcgtcttgctgaagatggtcctgccatcaaagatggcagaattcatgttggtgaccagattgttgaaatcaatggggaacctacacaaggaatcacacatactcgagcaattgagctcattcaggctggtggaaataaagttcttcttcttttgaggccaggaactggcttgatacctgaccatggtgattgggatattaataatccttcgtcttcaaatgtgatttatgatgaacagtcaccattacccccatcttcacattttgcttccatatttgaagagtctcacgtgccagtaattgaagaatctttgagagttcagatatgtgaaaaggcagaagaattaaaggacattgtgcctgaaaagaaaagcactttaaatgaaaatcagcctgagataaagcatcagtctcttctccagaaaaatgtgagtaagagggatccacccagcagtcatgggcacagtaacaagaaaaatctattaaaagtagaaaatggtgttacacgaagaggtagatcggttagtcccaaaaagccagccagtcaacattcagaggaacatttggataagattcctagtcctctaaaaaataaccccaaaagaagacccagagatcaatccctcagccccagcaaaggggaaaataaaagttgtcaggtcagcaccagggcaggctctggacaagatcagtgcagaaaaagcagaggtcggtcggccagcccaaaaaagcagcaaaaaattgaaggaagcaaagctccatcaaatgctgaggccaaattattagagggtaagagtcgaagaatagcaggctatacgggcagtaatgctgagcagatcccagatgggaaggaaaaatcagacgtcatcaggaaagatgcaaagcagaatcagttggaaaaagcagaacaaggtctccagagaaaaaaatcaaaagaatggttgagaaatctcttccatccaaaatgactaataagactacaagtaaagaagtatctgaaaatgaaaaaggaaagaaagtaaccacaggagaaacaagttctagtaacgataaaataggagaaaatgtccagctatcagaaaagaggctgaagcaagaacctgaagagaaggtagtttcaaacaaaacagaagatcacaaagggaaagaactagaggcagctgacaaaaacaaagagactggaaggttcaaaccggaaagcagttctccagttaagaaaacactgataactccagggccctggaaggttccaagtggaaataaagtcacaggcactattggtatggctgagaaacggcagtaacctttagtataaaacaaagaaaaacaagttgtaatcttttcttacagcagcatttttccagaaaaagcctttttttttttttcagatattctgaaacagataagtacatgttaatgtgagcctcaagttacctaggctgcatgaagggcctttaggattgctaagaaccaactgtccccctggccggctgccctccctcgctctcaggaaggagctgcatccacatgctcatctgacccgccctgctcaggctgcccagctcgtcttcatgagtgtctgaacaaatgacatatgttgatattaacaatgtggtcacaactcactttgtatttgtgccaagttatctactgtatcatgtctgtttttatcctttttgttcagctgtttccacagtaatgaaaaagttaggtttggcttggaagttgatgatctcaatagcatgttgcatgtttacagagagaaatatgtgagtccttgcagaagaagagactgttaactcatcgttaaagatggccgttgtctcttctaacagctactgatgatgtcccactttaaaaataaaacccccaaacatcactactttaagg

SEQ ID NO: 337721 - DNA, 1230 bp, Artificial Sequence
  derived and/or modified sequence
atgggacagagtcaggccaaccatattcctggcgataggtcagctctggaaggcgagataggaaaggacgttagtacatcctataggcatagctggagcgatcataagcacttggcgcagcctgatacagcggtgatatcagtggtgggaagccgccacaatcagaacttgggttgttatccagtggagctcgagcggggtcccagaggcttcggattctccctccggggaggaaaagagtacaacatggggctgtttattctacgcttggccgaagacggcccagccataaaggatggaagaatacacgtgggagatcagatcgtcgaaattaatggcgaaccgacccaagggattactcacaccagagccatcgaactgatacaggccggaggcaataaggtgcttctcctattaagacctgggactggactgatacccgatcacggtgactgggatattaacaatccatcttcatccaacgttatttacgacgagcagagtcccctgcctccgtccagccacttcgcttcaatcttcgaagaatcccacgtacccgtgattgaggagagtctcagggtgcagatctgcgaaaaggccgaagaactgaaggacatcgtaccagagaagaaatctactctcaatgagaaccagccagaaattaagcaccaaagtctgctgcaaaagaatgtaagcaagagggatccccctagctcacacggacatagtaataagaaaaatttgcttaaggttgaaaacggtgtaacgcggaggggccgtagcgtgtctcctaaaaagcctgcttcacagcacagtgaggagcacttagataagatccccagccccctaaagaataatccaaaaaggcgccctcgcgatcagtctctttctccttccaagggcgaaaataagtcgtgtcaagtaagcactcgggcaggctcgggacaggatcaatgccgaaagagtcggggtcgttccgcctctccaaaaaagcagcagaagatcgaggggtcaaaggcgccttccaatgccgaagccaaactgcttgaaggcaagtccagaagaatagcagggtacacaggatccaacgctgaacaaatccccgacggcaaggaaaagagtgatgtaattaggaaggatgcaaaacagaaccaacttgagaaggctgagcaggggctccagagaaagaagtccaaagaatggctcaggaatttattccaccccaagtag

SEQ ID NO: 337722 - protein, 181 aa, Artificial Sequence
  derived and/or modified sequence
MVLLQSSGFPEILDANKQPAEAVSATEPVTFNPQKEESDCLQSNEMVLQFLAFSRVAQDCRGTSWPKTVYFTFQFYRFPPATTPRLQLVQLDEAGQPSSGALTHILVPVSRDGTFDAGSPGFQLRYMVGPGFLKPGERRCFARYLAVQTLQIDVWDGDSLLLIGSAAVQMKETSHIFSVSQ

SEQ ID NO: 337723 - DNA, 1705 bp, Artificial Sequence
  derived and/or modified sequence
gcagcagatacctggcctgcttccagctcatggagaatccggcgacgctctccgaaagcctcgcctccagaagcccatcacggggcacttggatgacttattcttcaccctgtacccctccctggagaagtttgaggaagagctgctggagctccacgtccaggaccacttccaggagggatgtggcccactggacggtggtgccctggagatcctggagcggcgcctgcgtgtgggcgtgcacaatggtctgggcttcgtgcagaggccgcaggtcgttgtactggtgcctgagatggatgtggccttgacgcgctcagctagcttcagcaggaaagtggtctcctcttccaagaccagctccgggagccaagctctggttttgagaagccgcctccgcctcccagagatggtcggccaccctgcatttgcggtcatcttccagctggagtacgtgttcagcagccctgcaggagtggacggcaatgcagcttcggtcacctctctgtccaacctggcatgcatgcacatggtccgctgggctgtttggaaccccttgctggaagctgattctggaagggtgaccctgcctctgcagggtgggatccagcccaacccctcgcactgtctggtctacaaggtaccctcagccagcatgagctctgaagaggtgaagcaggtggagtcgggtacactccggttccagttctcgctgggctcagaagaacacctggatgcacccacggagcctgtcagtggccccaaagtggagcggcggccttccaggaaaccacccacgtccccttcgagcccgccagcgccagtacctcgagttctcgctgccccgcagaactcacctgtgggaccagggttgtcaatttcccagctggcggcctccccgcggtccccgactcagcactgcttggccaggcctacttcacagctaccccatggctctcaggcctccccggcccaggcacaggagttcccgttggaggccggtatctcccacctggaagccgacctgagccagacctccctggtcctggaaacatccattgccgaacagttacaggagctgccgttcacgcctttgcatgcccctattgttgtgggaacccagaccaggagctctgcagggcagccctcgagagcctccatggtgctcctgcagtcctccggctttcccgagattctggatgccaataaacagccagccgaggctgtcagcgctacagaacctgtgacgtttaaccctcagaaggaagaatcagattgtctacaaagcaacgagatggtgctacagtttcttgcctttagcagagtggcccaggactgccgaggaacatcatggccaaagactgtgtatttcaccttccagttctaccgcttcccacccgcaacgacgccacgactgcagctggtccagctggatgaggccggccagcccagctctggcgccctgacccacatcctcgtgcctgtgagcagagatggcacctttgatgctgggtctcctggcttccagctgaggtacatggtgggccctgggttcctgaagccaggtgagcggcgctgctttgcccgctacctggccgtgcagaccctgcagattgacgtctgggacggagactccctgctgctcatcggatctgctgccgtccagatgaaggagacttctcatatcttctcagtctcccagtga

SEQ ID NO: 337724 - protein, 563 aa, Artificial Sequence [sequence omitted]

SEQ ID NO: 337725 - DNA, 1692 bp, Artificial Sequence
  derived and/or modified sequence
atgttgctgaaggatggcattattcctgaaaacttcagcgtgttttctctgatccgagaaatgaggactcagagaccctctttggtccagacacaggaacagtatgagctagtgtataatgcagtgctggagttgtttaagcgtcagatggatgtcatcagagataaacatagcggaaccgagagccaggccaaacactgtattccagagaagaaccacaccttgcaagcggactcctatagcccaaatttgcctaagagcaccacaaaggctgccaaaatgatgaatcaacagagaaccaagatggagatcaaagaaagctcaagttttgacttcaggaccagtgaaatttcggctaaggaagaactggtgctccacccagccaaaagcagcacttcgttcgacttcctcgagctgaactactctttcgataagaatgcggacaccacaatgaaatggcagactaaagcattcccaatcgtgggcgagccacttcagaaacaccagtccctcgatctcgggagtctcctatttgaggggtgttcgaactctaagcctgtaaatgcagcagggcgctattttaattccaaagtgcctatcacccgaacaaagagtaccccttttgagctgattcagcagcgggagacaaaagaagtcgacagtaaagagaacttttcttatcttgaaagtcaaccccacgactcatgcttcgtagaaatgcaagcccagaaggttatgcatgtgtcttctgctgaactgaactactctctaccttatgactcaaaacaccagatccgaaatgcctcgaacgttaagcatcacgatagtagtgcacttggggtatatagttatataccactcgtggaaaacccatatttctctagctggccacctagcgggacaagctctaagatgagtctcgatctgcctgagaagcaggatgggaccgtgtttcctagcagtctactgccaacttctagcacaagcctgttctcttattacaatagccacgattccctgtccctgaattcacccactaatatctctagtcttctgaaccaggaatccgccgttctggcgaccgcaccacggatcgacgatgagatcccaccccctctgcccgtctggactccagagtcttttatcgtagtggaagaggctggggaattctcaccaaacgtgcccaagtctctctcctctgcggtaaaggtaaaaatcggcacgagtctcgaatggggagggacctcagaaccgaagaaatttgatgactcagtaatcctgaggccctccaagtctgtgaagctccggagcccaaagagtgaacttcaccaggatagaagcagtccacctcctcctcttcctgagcggacccttgaaagttttttcctcgctgacgaggactgtatgcaagcgcaatcaatagaaacctattccacaagttaccccgacacaatggagaacagtaccagttccaagcagacgctgaagacacccggtaagtcgtttacgaggtcaaagtcactcaagatcttacgcaatatgaagaaaagtatttgtaactcgtgtccacccaacaaacccgccgagagcgtccagtcaaacaattcctcttcctttctgaatttcggattcgccaatcgtttcagcaaaccgaagggaccccgaaaccccccaccaacgtggaacatttag

SEQ ID NO: 337726 - DNA, 1692 bp, Artificial Sequence
  derived and/or modified sequence
atgctgctgaaggatggcatcatccctgagaacttctctgtgttcagcctcatccgggagatgaggacccagaggcccagcctggtgcagacccaggagcagtatgagctggtgtacaatgctgtgctggagctgttcaagaggcagatggatgtgatccgggacaagcacagcggcacagagagccaggccaagcactgcatccctgagaagaaccacaccctgcaggccgacagctacagccccaacctgcccaagagcaccaccaaggccgccaagatgatgaaccagcagaggaccaagatggagatcaaggagagcagcagctttgacttccgcaccagcgagatcagcgccaaggaggagctggtgctgcacccagccaagagcagcaccagctttgacttcctggagctgaactacagctttgacaagaatgctgacaccaccatgaagtggcagaccaaggccttccccatcgtgggggagcccctgcagaagcaccagagcctggacctgggcagcctgctgtttgagggctgcagcaacagcaagcctgtgaatgctgctggccgctacttcaacagcaaggtgcccatcaccaggaccaagagcaccccatttgagctgatccagcagcgggagaccaaggaggtggacagcaaagaaaacttctcctacctggagagccagccccatgacagctgctttgtggagatgcaggcccagaaggtgatgcacgtgagcagcgctgagctgaactacagcctgccctatgacagcaagcaccagatcagaaatgccagcaatgtgaagcaccacgacagcagcgccctgggcgtgtacagctacatccccctggtggagaacccctacttcagctcctggcccccatctggcaccagcagcaagatgagcctggacctgcctgagaagcaggacggcaccgtcttccccagcagcctgctgcccaccagcagcaccagcctcttctcctactacaacagccatgacagcctgagcctgaacagccccaccaacatcagcagcctgctgaaccaggagagcgctgtgctggccacagcccccagaattgatgatgagatccccccacccctgcctgtgtggaccccagagagcttcatcgtggtggaggaggccggggagttcagccccaacgtgcccaagagcctgagcagcgctgtgaaggtgaagattggcaccagcctggagtggggcggcaccagcgagcccaagaagtttgatgacagcgtcatcctgcggcccagcaagtctgtgaagctgcggagccccaagtctgagctgcaccaggacaggagcagccccccaccacccctgcctgagaggaccctggagagcttcttcctggctgatgaggactgcatgcaggcccagagcattgagacctacagcaccagctacccagacaccatggagaacagcaccagcagcaagcagaccctgaagacccctgggaagagcttcaccaggagcaagagcctgaagatcctgaggaacatgaagaagagcatctgcaacagctgcccccccaacaagccagctgagagcgtgcagagcaacaacagcagcagcttcctgaactttggatttgccaaccgcttcagcaagcccaagggccccagaaatcctccacccacctggaacatctag

SEQ ID NO: 337727 - DNA, 1692 bp, Artificial Sequence
  derived and/or modified sequence
atgctgctgaaggacggcatcatccccgagaacttcagcgtgttctcactcatccgcgaaatgagaacacagagacccagcctggtgcaaacccaggagcagtatgaactggtgtataatgccgtgctcgagctgttcaagagacagatggacgttataagagacaagcatagcggcactgaaagtcaggccaagcactgtataccagagaagaatcacaccctgcaggcagactcctacagccctaacttacctaaaagtaccactaaggcagcaaaaatgatgaaccagcagcggacaaagatggagattaaagagtcctcctcctttgacttccgaacatcagagatcagtgcaaaagaggaactggtgctgcatcctgcaaaatctagtaccagctttgatttcttggaactgaattactctttcgacaaaaacgctgacactacaatgaaatggcagactaaagccttccctatcgtgggggaacccctccagaagcatcagtccttagacctaggcagtctccttttcgaaggatgctcaaatagcaagcctgtgaacgccgctggacggtattttaacagcaaagtcccaatcacacgaacaaagtccacccccttcgaattgattcagcaacgggagacaaaagaagtggatagtaaggagaactttagctatcttgaatctcagcctcacgacagctgtttcgtggagatgcaggctcagaaggtgatgcatgtgtcctccgccgaattgaactacagtttgccctatgattccaagcaccagattcgcaatgcttctaacgtgaagcaccacgactcttctgccctgggcgtctacagttacattcccttggtggagaatccttatttcagcagttggcccccttcaggaacttcctccaaaatgtccctcgacctacctgagaagcaggatggcaccgttttcccctcatccctattaccaacatcgtctacaagcctatttagctactataatagccacgatagcctaagcctgaatagtcccacgaacattagttcgctgctcaatcaggagtccgcagtcctggctactgccccaaggattgacgacgagatccctcccccactccctgtgtggactcccgagtctttcattgtcgtagaagaagcaggggaattttccccaaatgtgccgaaatccctctctagtgccgtgaaagtcaagataggtacatctctggagtggggaggaacatccgaaccaaagaaatttgacgactcggtgattctccgcccttcaaagtcagtgaaattgcggtccccaaaatcggaactccatcaggatcggtcaagtcctccacctccacttccggagaggacactggagagcttctttctggcagatgaagactgcatgcaagctcagtccatagagacctacagtacgtcttatcccgacaccatggaaaacagcacaagcagcaagcagaccctcaagacacctggaaagtcctttacaaggtccaaatctttgaagatcctgcgcaacatgaaaaagtcaatctgtaactcgtgccctccgaacaaacccgctgagtcagtgcagtccaacaatagttcatcgttcctgaattttggctttgcaaatcgtttctctaagcccaaggggcccaggaacccaccccccacctggaatatctag

SEQ ID NO: 337728 - DNA, 1692 bp, Artificial Sequence
  derived and/or modified sequence
atgttgttaaaggacggcatcatacccgagaacttctctgtattcagtctgatccgcgagatgaggacccagcggcctagtctcgtgcagactcaagaacaatatgagctcgtgtataatgctgttcttgagctttttaaacgacagatggacgtgatcagagacaagcactcgggaacggaatcacaagcaaaacactgtatccccgagaaaaatcacactcttcaagcggactcctactcccctaatttgcccaaatccactacgaaggcagcaaagatgatgaatcagcagcggacaaagatggagataaaagaatcatcctcctttgacttcagaacatccgagatatctgcaaaagaggagctggtgctccatcctgccaagtccagcacaagcttcgatttcctggagcttaactattcttttgataagaacgcagacactaccatgaagtggcagacgaaagcgtttcctattgtgggcgagcctctccaaaagcatcagtcgttagatcttggatctctgctgttcgaaggatgtagcaattctaagccagttaacgccgctggcaggtacttcaattccaaggtgcccatcaccagaaccaaaagcacccccttcgaactaattcagcagagagagacgaaggaggtcgatagcaaggaaaacttttcatacctggaaagtcaacctcatgatagctgctttgtggagatgcaggctcagaaggtcatgcacgtgtcaagtgctgaactgaactactcccttccctacgatagtaagcatcagattcgcaacgcttcaaatgtaaagcaccacgacagcagcgcgcttggcgtgtactcttacatccctctggtggaaaatccctatttctccagctggcccccatcaggaaccagttccaaaatgagtctagacctacctgaaaaacaagatgggacagtctttccttcctcgctactgccaacaagcagtactagtttgttctcctattacaactcccatgattctctgtcgcttaacagcccaaccaatatcagcagcctacttaaccaggaaagtgccgtgttagcaacagccccaagaatcgatgacgaaataccacctcccctccctgtctggactcccgaaagcttcatcgtggtggaagaggcgggtgaattctccccaaatgtgcctaaatctctgtcttcagccgtcaaggtgaaaattggcacttctttggaatggggaggaacgtccgaacccaaaaaatttgacgactcagtcattttgaggccatccaagagcgtgaagctgcgatctcctaagtcagaactccaccaggatcgctcttcaccgcctccgccactccccgaacggacacttgaatctttctttctggctgatgaggattgcatgcaggcacagtcaattgaaacctatagcacgagctatccggacactatggagaactctacgtcatccaaacagacactaaaaaccccaggaaaatcattcacccgctctaagtctctaaagatcctgcggaacatgaagaaatccatctgtaactcgtgccccccaaacaagcccgctgagtcagtccagagcaacaattcctctagttttctgaacttcggctttgccaatcgtttcagtaagcccaagggcccaaggaatcccccacccacctggaatatttag

SEQ ID NO: 337729 - DNA, 2414 bp, Artificial Sequence
  derived and/or modified sequence
ggaggtgtctcggccatgacacacatttgacatgccctccctcaacctacttatagactatttttcttgctctgcagcatggaccaaagagaaattctgcagaagttcctggatgaggcccaaagcaagaaaattactaaagaggagtttgccaatgaatttctgaagctgaaaaggcaatctaccaagtacaaggcagacaaaacctatcctacaactgtggctgagaagcccaagaatatcaagaaaaacagatataaggatattttgccctatgattatagccgggtagaactatccctgataacctctgatgaggattccagctacatcaatgccaacttcattaagggagtttatggacccaaggcttatattgccacccagggtcctttatctacaaccctcctggacttctggaggatgatttgggaatatagtgtcctttgctggctgtggaaggactggtgttatttgtgctattgattatacatggatgttgctaaaagatgggataattcctgagaacttcagtgttttcagtttgatccgggaaatgcggacacagaggccttcattagttcaaacgcaggaacaatatgaactggtctacaatgctgtattagaactatttaagagacagatggatgttatcagagataaacattctggaacagagagtcaagcaaagcattgtattcctgagaaaaatcacactctccaagcagactcttattctcctaatttaccaaaaagtaccacaaaagcagcaaaaatgatgaaccaacaaaggacaaaaatggaaatcaaagaatcttcttcctttgactttaggacttctgaaataagtgcaaaagaagagctagttttgcaccctgctaaatcaagcacttcttttgactttctggagctaaattacagttttgacaaaaatgctgacacaaccatgaaatggcagacaaaggcatttccaatagttggggagcctcttcagaagcatcaaagtttggatttgggctctcttttgtttgagggatgttctaattctaaacctgtaaatgcagcaggaagatattttaattcaaaggtgccaataacacggaccaaatcaactccttttgaattgatacagcagagagaaaccaaggaggtggacagcaaggaaaacttttcttatttggaatctcaaccacatgattcttgttttgtagagatgcaggctcaaaaagtaatgcatgtttcttcagcagaactgaattattcactgccatatgactctaaacaccaaatacgtaatgcctctaatgtaaagcaccatgactctagtgctcttggtgtatattcttacatacctttagtggaaaatccttatttttcatcatggcctccaagtggtaccagttctaagatgtctcttgatttacctgagaagcaagatggaactgtttttccttcttctctgttgccaacatcctctacatccctcttctcttattacaattcacatgattctttatcactgaattctccaaccaatatttcctcactattgaaccaggagtcagctgtactagcaactgctccaaggatagatgatgaaatcccccctccacttcctgtatggacacctgaatcatttattgtggttgaggaagctggagaattctcaccaaatgttcccaaatccttatcctcagctgtgaaggtaaaaattggaacatcactggaatggggtggaacatctgaaccaaagaaatttgatgactctgtgatacttagaccaagcaagagtgtaaaactccgaagtcctaaatcagaactacatcaagatcgttcttctcccccacctcctctcccagaaagaactctagagtccttctttcttgccgatgaagattgtatgcaggcccaatctatagaaacatattctactagctatcctgacaccatggaaaattcaacatcttcaaaacagacactgaagactcctggaaaaagtttcacaaggagtaagagtttgaaaattttgcgaaacatgaaaaagagtatctgtaattcttgcccaccaaacaagcctgcagaatctgttcagtcaaataactccagctcatttctgaattttggttttgcaaaccgtttttcaaaacccaaaggaccaaggaatccaccaccaacttggaatatttaataaaactccagatttataataatatgggctgcaagtacacctgcaaataaaactactagaatactgctagttaaaataagtgctctatatgcataatatcaaatatgaagatatgctaatgtgttaatagcttttaaaagaaaagcaaaatgccaataagtgccagttttgcattttcatatcatttgcattgagttgaaaactgcaaataaaagtttgtcacttg

SEQ ID NO: 337730 - DNA, 1692 bp, Artificial Sequence
  derived and/or modified sequence
atgctgctgaaggacggcatcatccccgagaacttcagcgtgttcagcctgatcagagagatgagaacccagagacccagcctggtgcagacccaggagcagtacgagctggtgtacaacgccgtgctggagctgttcaagagacagatggacgtgatcagagacaagcacagcggcaccgagagccaggccaagcactgcatccccgagaagaaccacaccctgcaggccgacagctacagccccaacctgcccaagagcaccaccaaggccgccaagatgatgaaccagcagagaaccaagatggagatcaaggagagcagcagcttcgacttcagaaccagcgagatcagcgccaaggaggagctggtgctgcaccccgccaagagcagcaccagcttcgacttcctggagctgaactacagcttcgacaagaacgccgacaccaccatgaagtggcagaccaaggccttccccatcgtgggcgagcccctgcagaagcaccagagcctggacctgggcagcctgctgttcgagggctgcagcaacagcaagcccgtgaacgccgccggcagatacttcaacagcaaggtgcccatcaccagaaccaagagcacccccttcgagctgatccagcagagagagaccaaggaggtggacagcaaggagaacttcagctacctggagagccagccccacgacagctgcttcgtggagatgcaggcccagaaggtgatgcacgtgagcagcgccgagctgaactacagcctgccctacgacagcaagcaccagatcagaaacgccagcaacgtgaagcaccacgacagcagcgccctgggcgtgtacagctacatccccctggtggagaacccctacttcagcagctggccccccagcggcaccagcagcaagatgagcctggacctgcccgagaagcaggacggcaccgtgttccccagcagcctgctgcccaccagcagcaccagcctgttcagctactacaacagccacgacagcctgagcctgaacagccccaccaacatcagcagcctgctgaaccaggagagcgccgtgctggccaccgcccccagaatcgacgacgagatccccccccccctgcccgtgtggacccccgagagcttcatcgtggtggaggaggccggcgagttcagccccaacgtgcccaagagcctgagcagcgccgtgaaggtgaagatcggcaccagcctggagtggggcggcaccagcgagcccaagaagttcgacgacagcgtgatcctgagacccagcaagagcgtgaagctgagaagccccaagagcgagctgcaccaggacagaagcagcccccccccccccctgcccgagagaaccctggagagcttcttcctggccgacgaggactgcatgcaggcccagagcatcgagacctacagcaccagctaccccgacaccatggagaacagcaccagcagcaagcagaccctgaagacccccggcaagagcttcaccagaagcaagagcctgaagatcctgagaaacatgaagaagagcatctgcaacagctgcccccccaacaagcccgccgagagcgtgcagagcaacaacagcagcagcttcctgaacttcggcttcgccaacagattcagcaagcccaagggccccagaaaccccccccccacctggaacatctag

SEQ ID NO: 337731 - DNA, 291 bp, Artificial Sequence
  derived and/or modified sequence
atgaaaacaatcggctacgaccctattataagtcccgaagtgagcgcttcttttggcgtgcagcagctccctctcgaggaaatatggcccctctgtgattttatcacagtgcatacccctctactgccttcaaccaccggacttctaaacgataacacgtttgcgcaatgtaagaagggggtgcgggtggtaaattgcgctcgcggtggcattgtcgacgagggcgcactcttaagagctctgcagagtggccaatgtgcgggcgcagccctagacgtgttcaccgaatag

SEQ ID NO: 337732 - DNA, 1221 bp, Artificial Sequence
  derived and/or modified sequence
atgaaggacggaaaatgggagcgcaaaaagttcatgggtaccgaactgaatggcaagacactgggtatacttggcctcggaagaatcggccgtgaagttgccacacgtatgcagtcatttgggatgaagaccattggatatgaccctataatttcccccgaggtgtccgctagctttggtgttcagcaattacctctggaagagatatggcccctgtgcgattttattacagttcacactcctctgttaccgtctacaaccggcctgctgaacgacaacacattcgcccagtgtaaaaaaggggtgagagtggtgaactgcgcccggggtggaatagtcgatgaaggcgcattgcttcgggcactgcagtccggccagtgcgcaggggccgctctcgatgtcttcactgaggaacctcctagagatagggcattggtcgaccacgagaatgtcatttcctgcccccatctgggtgcttctactaaggaagcccagagtcggtgtggagaagagatagctgtgcaattcgtagacatggttaagggcaagagtctgacaggggtagtaaacgcccaggcactaacctccgccttctccccccataccaaaccctggattggattggccgaagcactaggaacactgatgagagcgtgggccgggtcgcccaagggtaccatccaggtgatcactcaaggtacctcgttaaaaaatgctggcaactgtcttagtccggccgttattgtcggcttactgaaagaggccagcaagcaggctgacgttaatctggtgaatgccaaacttctcgtgaaagaagccgggctgaacgtgaccacatctcactcaccagccgcccctggcgagcaaggcttcggtgaatgcctgcttgccgttgccctagcaggcgctccttaccaagcagtagggctggtgcagggcaccaccccagtgttacagggactgaacggggctgtgtttagaccagaggtgcccctcaggagggatctgcccttgttattgtttcggacacagacaagcgaccccgccatgctgcccacaatgatcggactgctagctgaggccggcgtgcgccttctaagctatcagacctctctggtttctgacggtgagacatggcacgttatgggcatttctagtttgctaccctccctagaggcgtggaagcagcacgtaaccgaggcctttcagtttcacttctag

SEQ ID NO: 337733 - DNA, 291 bp, Artificial Sequence
  derived and/or modified sequence
atgaagaccatcggctatgaccccatcatcagccctgaggtgtctgccagctttggagtgcagcagctgcccctggaggagatctggcccctgtgtgacttcatcaccgtgcacacccccctgctgcccagcaccaccggcctgctgaatgacaacacctttgcccagtgcaagaagggcgtgcgggtggtgaactgtgcccggggcggcatcgtggatgaaggagccctgctgcgggccctgcagagcggccagtgtgccggggccgccctggatgtgttcacagaatag

SEQ ID NO: 337734 - DNA, 1221 bp, Artificial Sequence
  derived and/or modified sequence
atgaaggatggcaagtgggagaggaagaagttcatgggcacagagctgaatggcaagaccctgggcatcctgggcctgggcagaattggccgggaggtggccaccaggatgcagagctttggcatgaagaccatcggctatgaccccatcatcagccctgaggtgtctgccagctttggagtgcagcagctgcccctggaggagatctggcccctgtgtgacttcatcaccgtgcacacccccctgctgcccagcaccaccggcctgctgaatgacaacacctttgcccagtgcaagaagggcgtgcgggtggtgaactgtgcccggggcggcatcgtggatgagggcgccctgctgcgggccctgcagagcggccagtgtgccggggccgccctggatgtgttcacagaggagcccccccgggaccgggccctggtggaccatgaaaatgtcatcagctgcccccacctgggcgccagcaccaaggaggcccagagccgctgtggggaggagattgctgtgcagtttgtggacatggtgaagggcaagagcctgactggagtggtgaatgcccaggccctgaccagcgccttcagcccccacaccaagccctggattggcctggccgaggccctgggcaccctgatgagggcctgggccggcagccccaagggcaccatccaggtgatcacccagggcaccagcctgaagaatgccggcaactgcctgagccctgctgtgattgtgggcctgctgaaggaggccagcaagcaggctgatgtgaacctggtgaatgccaagctgctggtgaaggaggccggcctgaatgtgaccaccagccacagccctgctgcccctggagagcagggctttggagaatgtctgctggccgtggccctggccggggccccctaccaggccgtgggcctggtgcagggcaccacccctgtgctgcagggcctgaatggagctgtgttccggcctgaggtgcccctgcggcgggacctgcccctgctgctcttccgcacccagaccagtgaccctgccatgctgcccaccatgattggcctgctggccgaggccggcgtgcggctgctgagctaccagaccagcctggtgtctgatggagagacctggcacgtgatgggcatcagcagcctgctgcccagcctggaggcctggaagcagcacgtgacagaggccttccagttccacttctag

SEQ ID NO: 337735 - DNA, 291 bp, Artificial Sequence
  derived and/or modified sequence
atgaagaccatcggctacgaccccatcatcagccccgaggtgagcgctagctttggagtacagcaactgcctttagaggagatctggcctctgtgtgattttatcaccgtgcacactccactcttgccttccacaacaggcctgttaaacgataacacatttgcacagtgtaagaagggtgtgcgggtggttaattgcgcgaggggggggatcgtggatgagggcgcactcttgagagccctacaatcgggtcagtgcgcgggggccgcccttgacgtgtttacagaatag

SEQ ID NO: 337736 - DNA, 1221 bp, Artificial Sequence
  derived and/or modified sequence
atgaaggacggcaagtgggagcggaagaagttcatgggcaccgagttgaatggaaagactctgggcatcctaggtctgggaaggatcgggagggaggtcgcaactaggatgcaaagcttcggaatgaagaccattggttacgacccaattattagtcctgaggtcagcgcctccttcggggttcaacagctgccactggaagagatctggcccctgtgcgactttattactgtgcacacccccctcctaccaagcacaacaggcttgctgaacgataacaccttcgcccagtgtaagaaaggggtaagggtcgttaattgcgctcggggcggtatcgtggatgagggcgctctccttagggctctccagagcgggcagtgtgccggggctgccttagacgtgtttactgaagagcccccaagagatcgcgcacttgtcgaccatgagaatgttatttcttgtccacacctcggagcttctacaaaggaagcgcagagccgatgcggtgaggagatcgccgtgcaatttgtggatatggtcaaagggaagtctttgaccggagtcgtcaacgctcaggctctgactagcgcatttagtccccacactaagccctggatcggcctagctgaagctctgggcactctgatgagagcctgggccgggtccccaaaaggaacgattcaggtaatcacacaagggaccagcttaaagaatgccggcaactgcctcagcccagcagtcattgtcggcctgctgaaggaagcaagcaagcaggccgacgtgaacctcgtcaatgctaagctcctcgtgaaggaagccggcttgaacgtgaccaccagccactcccctgccgcgccgggtgaacagggctttggcgaatgcctgctggctgtagctctggcaggtgcaccgtatcaggctgtcgggttggtgcaggggactacaccggtgctccagggcctcaacggagctgttttccgaccagaagtccccctgcggagggacctgcccctgctgctctttcggactcaaactagtgaccctgccatgctcccaaccatgattgggctacttgctgaggctggggttcgccttctgtcttaccaaacgtcgctggtaagtgatggcgagacctggcatgtgatggggatatcatctcttcttccctctctagaggcatggaagcagcatgtaactgaagcctttcagttccacttctag

SEQ ID NO: 337737 - DNA, 2196 bp, Artificial Sequence
  derived and/or modified sequence
agttactctagcgcgccaggccgaaccgcagcttcttggcttaggtacttctactcacagcggccgattccgaggccaactccagcaatggcttttgcaaatctgcggaaagtgctcatcagtgacagcctggacccttgctgccggaagatcttgcaagatggagggctgcaggtggtggaaaagcagaaccttagcaaagaggagctgatagcggagctgcaggactgtgaaggccttattgttcgctctgccaccaaggtgaccgctgatgtcatcaacgcagctgagaaactccaggtggtgggcagggctggcacaggtgtggacaatgtggatctggaggccgcaacaaggaagggcatcttggttatgaacacccccaatgggaacagcctcagtgccgcagaactcacttgtggaatgatcatgtgcctggccaggcctgaaaccttccgggaccaagaaattacttttcccatggcgagacctgctttccctcctgctggaggaggatctgggggaatttacctctgctctaactcctccctgcagtttccatctgagctctctggtattcactgatattcactggaccagctttgtttaaaggaatcggtgaaatgctgtggtttaaaagaagctccccattgtcaactgctcaccatgacctcactcatcaaaggtgcatcaaaactaggaaacacgcacaccctattgggaaggaatgcgttcgtttcatcagactgttcctagcagggaggacggtaggagagtgcagattccccaggcgacggcttcgatgaaggacggcaaatgggagcggaagaagttcatgggaacagagctgaatggaaagaccctgggaattcttggcctgggcaggattgggagagaggtagctacccggatgcagtcctttgggatgaagactatagggtatgaccccatcatttccccagaggtctcggcctcctttggtgttcagcagctgcccctggaggagatctggcctctctgtgatttcatcactgtgcacactcctctcctgccctccacgacaggcttgctgaatgacaacacctttgcccagtgcaagaagggggtgcgtgtggtgaactgtgcccgtggagggatcgtggacgaaggcgccctgctccgggccctgcagtctggccagtgtgccggggctgcactggacgtgtttacggaagagccgccacgggaccgggccttggtggaccatgagaatgtcatcagctgtccccacctgggtgccagcaccaaggaggctcagagccgctgtggggaggaaattgctgttcagttcgtggacatggtgaaggggaaatctctcacgggggttgtgaatgcccaggcccttaccagtgccttctctccacacaccaagccttggattggtctggcagaagctctggggacactgatgcgagcctgggctgggtcccccaaagggaccatccaggtgataacacagggaacatccctgaagaatgctgggaactgcctaagccccgcagtcattgtcggcctcctgaaagaggcttccaagcaggcggatgtgaacttggtgaacgctaagctgctggtgaaagaggctggcctcaatgtcaccacctcccacagccctgctgcaccaggggagcaaggcttcggggaatgcctcctggccgtggccctggcaggcgccccttaccaggctgtgggcttggtccaaggcactacgcctgtactgcaggggctcaatggagctgtcttcaggccagaagtgcctctccgcagggacctgcccctgctcctattccggactcagacctctgaccctgcaatgctgcctaccatgattggcctcctggcagaggcaggcgtgcggctgctgtcctaccagacttcactggtgtcagatggggagacctggcacgtcatgggcatctcctccttgctgcccagcctggaagcgtggaagcagcatgtgactgaagccttccagttccacttctaaccttggagctcactggtccctgcctctggggcttttctgaagaaacccacccactgtgatcaatagggagagaaaatccacattcttgggctgaacgcgggcctctgacactgcttacactgcactctgaccctgtagtacagcaataaccgtctaataaagagcctaccccc

SEQ ID NO: 337738 - DNA, 291 bp, Artificial Sequence
  derived and/or modified sequence
atgaagacaattggatatgacccaattatttcccccgaggtgtcggccagctttggtgttcagcaactgcctctggaagagatctggcccctctgcgattttattactgtacatacaccactgctgccctcaaccaccggactgttgaatgacaacacctttgctcaatgcaagaaaggcgtcagggttgtcaactgtgccagagggggaattgtcgacgaaggcgcactgctgcgcgcactgcagagtggccagtgtgcaggggcagcattggacgtattcaccgaatag

SEQ ID NO: 337739 - DNA, 1221 bp, Artificial Sequence
  derived and/or modified sequence
atgaaggacggtaaatgggagaggaagaaattcatgggtaccgaactcaatgggaagacacttggcatcctggggctgggcagaatcggacgggaggttgcgacaagaatgcagagttttggtatgaaaactatcggctacgaccccataattagtccagaggtttccgctagttttggggttcagcagctgccgcttgaggaaatctggcctctttgtgattttattacagttcataccccactgctgccatctaccactggtctgctaaacgataacacattcgcccagtgtaagaagggcgttagggtggtcaactgcgctaggggtggtattgtggacgaaggagccctcctgcgtgcgctgcagagtggccagtgcgccggagccgctttggacgtctttacagaggaaccgcctagggatagggccttggtcgatcacgagaatgtgattagttgtcctcacctcggcgcatcaacaaaagaagcgcaaagtcggtgcggagaggagattgcagtgcaattcgtggacatggtcaagggaaagtccctgaccggcgtggtgaacgcgcaggcccttacttccgctttttctccccacaccaagccgtggattggtctggccgaggctttggggacactgatgagagcctgggccggatctcctaaaggcacaatacaggtgattacacagggcaccagtcttaagaacgcaggtaattgcctgagtcctgccgtcattgtgggacttctgaaagaagcctccaagcaggcggacgtgaatcttgtaaatgccaagctacttgtcaaggaggcgggacttaatgtgacaacttctcacagccctgcagcacctggggaacagggtttcggtgagtgcctcctggccgtcgccctggctggggctccctaccaggcagtcggcctggtgcaaggcaccactccagtcctccaagggctcaacggcgctgtgtttcggcctgaagtccccctcaggagagatcttcctctgctgctcttccgtactcagactagcgatccagctatgttgcccactatgatcgggctgctcgccgaggccggagtcaggttactcagctatcagacgtctcttgtgtccgacggcgagacctggcacgtcatgggtatcagctccctgctgccctcactggaagcctggaaacagcacgtgacagaggcctttcagtttcacttttag

SEQ ID NO: 337740 - DNA, 291 bp, Artificial Sequence
  derived and/or modified sequence
atgaagaccatcggctacgaccccatcatcagccccgaggtgagcgccagcttcggcgtgcagcagctgcccctggaggagatctggcccctgtgcgacttcatcaccgtgcacacccccctgctgcccagcaccaccggcctgctgaacgacaacaccttcgcccagtgcaagaagggcgtgagagtggtgaactgcgccagaggcggcatcgtggacgagggcgccctgctgagagccctgcagagcggccagtgcgccggcgccgccctggacgtgttcaccgagtag

SEQ ID NO: 337741 - DNA, 1221 bp, Artificial Sequence
  derived and/or modified sequence
atgaaggacggcaagtgggagagaaagaagttcatgggcaccgagctgaacggcaagaccctgggcatcctgggcctgggcagaatcggcagagaggtggccaccagaatgcagagcttcggcatgaagaccatcggctacgaccccatcatcagccccgaggtgagcgccagcttcggcgtgcagcagctgcccctggaggagatctggcccctgtgcgacttcatcaccgtgcacacccccctgctgcccagcaccaccggcctgctgaacgacaacaccttcgcccagtgcaagaagggcgtgagagtggtgaactgcgccagaggcggcatcgtggacgagggcgccctgctgagagccctgcagagcggccagtgcgccggcgccgccctggacgtgttcaccgaggagccccccagagacagagccctggtggaccacgagaacgtgatcagctgcccccacctgggcgccagcaccaaggaggcccagagcagatgcggcgaggagatcgccgtgcagttcgtggacatggtgaagggcaagagcctgaccggcgtggtgaacgcccaggccctgaccagcgccttcagcccccacaccaagccctggatcggcctggccgaggccctgggcaccctgatgagagcctgggccggcagccccaagggcaccatccaggtgatcacccagggcaccagcctgaagaacgccggcaactgcctgagccccgccgtgatcgtgggcctgctgaaggaggccagcaagcaggccgacgtgaacctggtgaacgccaagctgctggtgaaggaggccggcctgaacgtgaccaccagccacagccccgccgcccccggcgagcagggcttcggcgagtgcctgctggccgtggccctggccggcgccccctaccaggccgtgggcctggtgcagggcaccacccccgtgctgcagggcctgaacggcgccgtgttcagacccgaggtgcccctgagaagagacctgcccctgctgctgttcagaacccagaccagcgaccccgccatgctgcccaccatgatcggcctgctggccgaggccggcgtgagactgctgagctaccagaccagcctggtgagcgacggcgagacctggcacgtgatgggcatcagcagcctgctgcccagcctggaggcctggaagcagcacgtgaccgaggccttccagttccacttctag

SEQ ID NO: 337742 - protein, 422 aa, Artificial Sequence
  derived and/or modified sequence
MPRSFLVKSKKAHSYHQPRSPGPDYSLRLENVPAPSRADSTSNAGGAKAEPRDRLSPESQLTEAPDRASASPDSCEGSVCERSSEFEDFWRPPSPSASPASEKSMCPSLDEAQPFPLPFKPYSWSGLAGSDLRHLVQSYRPCGALERGAGLGLFCEPAPEPGHPAALYGPKRAAGGAGAGAPGSCSAGAGATAGPGLGLYGDFGSAAAGLYERPTAAAGLLYPERGHGLHADKGAGVKVESELLCTRLLLGGGSYKCIKCSKVFSTPHGLEVHVRRSHSGTRPFACEMCGKTFGHAVSLEQHKAVHSQERSFDCKICGKSFKRSSTLSTHLLIHSDTRPYPCQYCGKRFHQKSDMKKHTFIHTGEKPHKCQVCGKAFSQSSNLITHSRKHTGFKPFGCDLCGKGFQRKVDLRRHRETQHGLK

SEQ ID NO: 337743 - DNA, 2802 bp, Artificial Sequence
  derived and/or modified sequence
gagggtgcgcccaccggtcccgccgggcgcccgcgggacgcgccgccagggccctctccgccgggggctcggcgctcgcccacctcttccaaatttaaccattacctaaatccgaagggaaatgagcaaacctctcggattgggtgtcaaggtctcctccgggctggggctgagcaagccctcggagtgaccgtgggtgacagcggctccagggactcttggggcgcagtggggaaagtgccggaccaccatgccgcgctcatttctcgtcaaaagcaagaaggctcacagctaccaccagccgcgctccccaggaccagactattccctccgtttagagaatgtaccggcgcctagccgagcagacagcacttcaaatgcaggcggggcgaaggcggagccccgggaccgtttgtcccccgaatcgcagctgaccgaagccccagacagagcctccgcatccccagacagctgcgaaggcagcgtctgcgaacggagctcggagtttgaggacttctggaggcccccgtcaccctccgcgtctccagcctcggagaagtcaatgtgcccatcgctggacgaagcccagcccttccccctgcctttcaaaccgtactcatggagcggcctggcgggttctgacctgcggcacctggtgcagagctaccgaccgtgtggggccctggagcgtggcgctggcctgggcctcttctgcgaacccgccccggagcctggccacccggccgcgctgtacggcccgaagcgggctgccggcggcgcgggggccggggcgccagggagctgcagcgcaggggccggtgccaccgctggccctggcctagggctctacggcgacttcgggtctgcggcagccgggctgtatgagaggcccacggcagcggcgggcttgctgtaccccgagcgtggccacgggctgcacgcagacaagggcgctggcgtcaaggtggagtcggagctgctgtgcacccgcctgctgctgggcggcggctcctacaagtgcatcaagtgcagcaaggtgttctccacgccgcacgggctcgaggtgcacgtgcgcaggtcccacagcggtaccagaccctttgcctgcgagatgtgcggcaagaccttcgggcacgcggtgagcctggagcagcacaaagccgtgcactcgcaggaacggagctttgactgtaagatctgtgggaagagcttcaagaggtcatccacactgtccacacacctgcttatccactcagacactcggccctacccctgtcagtactgtggcaagaggttccaccagaagtcagacatgaagaaacacactttcatccacactggtgagaagcctcacaagtgccaggtgtgcggcaaggcattcagccagagctccaacctcatcacccacagccgcaaacacacaggcttcaagcccttcggctgcgacctctgtgggaagggtttccagaggaaggtggacctccgaaggcaccgggagacgcagcatgggctcaaatgagcaccctggctggctgcaagcagcagctacacaacactacagagggcagcctccctgcttgccaccactctgctccctgcttgcctccactcccttctgactttccagaccccaggtccagtctgcagatcctaccaggttgctcctccttcgccttacctcctggagctgccagaagaaatgaggtaccttttcaaagtgcagccgagagtgagaaccaagtgactctctaggcttcggacacaaataggctcctctacacctgaagacaaaggcaaagtcaaatggggaccagaataaatcttagaccccacagtccttcccatttccagccctaatctacagacaggaatgcccttcaggtttcttccctcccccctcttgacctaccccagatatttgtgtggaagaggaggaatcaccatttacaaggtggacaaatgctaatatttttatctagaaagaagagtgagtgttaacttttatttttttccttctggggggtctgttgactcctttcttttgggtgctgcctataaatcttggaggaatcatttctcctcctcaaaaactgattcagaaactgacttggggaaggaatttaatactttgaagtcatgagatgcaccatcgaggctacccccaagaagaagcagaagagaagttggtaatgagaggggattagaggtcctcccttcagtagggctgtgaaaacctcatcactggaggtaaaagcacaagcaatgcctgtggacaagatgtcattcattcactcagcaaatgttcatggatcaccggctaccaaggtaccaggcaccatgctaggtattggggaagagagactgaagtcacaacccctgactgctcctcaaaagctaacggttgcacctccaagtggctgggtctgttcttactcttggagggaattctgagaagacagcacagaattgtaaaccttcccttttgacccttttggattttatcaggtgtaaacaaaaagctgaacagttacttcaaagatatgtgtgtatattcagttttttattgttaagctgatattttaaagatttctgagctagcaggcatgtgggaaggaaggctctgtcttcaactctttgaccctccatgtgtaccatagaggggggaaaggtggtattttcactttgatgaggttggtaaatgtttttagatcttctggtaagcattatgtttgttaatacatatttattagagtgatgttttaagttaataaagtattaagagtattaaaaaaaaaaaaaaaa

SEQ ID NO: 337744 - DNA, 1269 bp, Artificial Sequence
  derived and/or modified sequence
atgccccgaagcttcctggtgaaatctaagaaagcacattcatatcaccagccgcgcagccccggtccagattacagtcttcggcttgaaaacgtacccgctccgagccgggcagatagcacgtcaaacgcaggcggagccaaggccgaacctcgcgaccgccttagtccagagtcccagcttactgaagcccctgatagagcgtccgcctcccccgattcctgtgagggttccgtgtgtgagaggtcttctgagtttgaagatttctggcgccctccttcaccttctgcctcaccagcctccgagaaaagcatgtgcccgtcattagacgaagcccaaccttttccacttccattcaagccttacagttggtccggtctggcgggctccgatttgcggcacttggttcagtcctatcggccatgtggcgctctggagaggggcgcaggtctggggttattctgtgagccagccccggagcccgggcatcccgctgctctctatggaccaaaacgagccgccgggggggctggggccggtgctccaggtagctgcagcgccggggctggggctacagccgggccaggacttggcctgtacggggatttcggcagcgccgccgccggcctctatgagagacctacagctgcagctgggctgttgtacccagagcgaggacatggactgcatgccgataagggagctggtgtcaaagtggagtctgagctcctgtgtactagactgttactcggcggaggctcttacaaatgcataaagtgtagtaaggtgttctccacccctcacgggcttgaggtgcacgtgcgtcggtctcactcggggacgcggccatttgcctgtgaaatgtgcggtaaaacttttggccacgctgtctccctcgaacagcacaaagcagtgcattcccaggagcgcagctttgattgcaagatatgcggcaaatcgttcaaaaggagcagtacgttgagcacacatcttcttatacactctgatacgagaccttacccatgtcaatattgcggcaaaagattccatcagaagtccgatatgaaaaaacacaccttcattcacactggtgagaaaccacacaagtgtcaggtgtgcggaaaagccttttcccagtcatcaaatctcatcacacacagtcgaaagcatacaggcttcaaaccgtttggatgtgatttgtgcggaaaagggttccaacgcaaggttgacctcaggcgacaccgagagacacagcatggcctcaaatag

SEQ ID NO: 337745 - DNA, 1269 bp, Artificial Sequence
  derived and/or modified sequence
atgcctcggagcttcctggtaaagtcaaaaaaggcccattcatatcatcagccaagatcacctgggcctgattactccctccggctggaaaacgttccagccccgtcgagggctgacagcaccagcaacgccggaggggcgaaggccgagcctcgggatcgccttagccctgagtcccagcttactgaggctccagaccgggcaagcgctagccctgattcctgcgagggttccgtttgtgaaagaagtagcgagttcgaggacttttggaggccgccttccccttcagcctctcctgcttccgaaaagtccatgtgtccctctctggatgaggcccaaccattcccacttccattcaagccctattcatggtctggcctggctggctctgacctacgccatctcgtgcagtcgtatcgcccttgcggtgctctggagcggggcgctgggcttggcctgttttgcgaacccgcccccgaacccggtcacccggcagcgttgtacgggccaaaaagagctgcaggtggggcaggtgcgggagctcccggatcctgcagtgcaggcgccggagccacggcgggaccgggtcttgggctgtatggcgacttcggctccgcagctgccgggttgtacgaaaggcccacagcagcggcaggcctgctctaccctgaacgaggacacggactgcatgccgacaaaggtgctggtgtgaaagtggaaagtgagttgctctgcacgaggctgctgttggggggtggctcatataaatgcatcaagtgtagtaaagtgttcagcactccacacggtctcgaggtgcacgtaagaaggtctcacagcggtacgaggccattcgcatgtgagatgtgtgggaaaaccttcgggcatgcagtgagcctggaacagcataaggccgttcattctcaggagcgttcttttgactgtaagatttgcggaaagtccttcaaaaggagctcgactttgagtactcatctgctgatccatagcgacactagaccatacccgtgtcagtactgcggtaaacgatttcatcagaaatctgatatgaaaaaacacacttttatacacactggagaaaaaccacacaaatgccaggtgtgtggtaaggccttttctcagtcttctaatctgatcacccattcccgaaagcacaccggctttaagccctttggatgcgatctctgtgggaaggggttccagagaaaagttgacctgaggcgccatcgggaaactcagcatggactgaaatag

SEQ ID NO: 337746 - DNA, 1269 bp, Artificial Sequence
  derived and/or modified sequence
atgccaaggtcatttctggtgaagtctaaaaaagcacactcctatcatcagccgcggtcacctggacccgactattccctgaggctggagaatgtgccggccccttcgagagccgattccacgtcaaacgcaggtggggctaaggctgagcctcgcgacagattaagccctgagagccagctgacggaagctccagatcgagcctccgcctctccagactcctgtgagggcagcgtctgtgaacgcagcagcgaattcgaggacttctggcgccctccttctccctcggcctctcccgcaagcgagaagtccatgtgcccgagcctcgacgaggcgcagccctttccccttccattcaaaccatactcctggtccgggcttgcagggtccgacttacgacatctggtccagtcgtacaggccctgcggcgctttggagagaggtgcgggtctggggctattttgtgagcccgcgccagagccaggtcacccagcagccctgtacggcccaaagcgggctgcaggtggagcgggcgcaggtgcacctggttcctgctctgcgggggcaggggctacggcaggcccagggctgggactgtatggggacttcggctccgccgcggcaggactatatgagcgacctacagcagcagcgggcctgctgtatcccgaacgcggtcacgggttacacgcagataagggggccggagtgaaggtcgaaagcgaacttctgtgtacccgcctgttgctggggggcggatcttataagtgcatcaagtgctctaaggtctttagcaccccacacggactcgaagtgcatgtgcgcagatcccacagtggcacccggccatttgcttgcgagatgtgtgggaagacctttggtcatgccgtgagcctggagcaacataaagccgtgcactcacaggaaagatctttcgattgtaaaatatgtgggaagagtttcaagcgttcctctacactgtcgacccatctgttgatccattccgataccagaccctacccttgtcagtattgtggaaagcggtttcatcagaaatccgacatgaaaaaacatacattcatccacacgggtgaaaaaccacacaagtgccaggtctgcggtaaagccttttcacagagctctaatctcatcacacactctcgcaagcataccggctttaagccatttgggtgtgatctctgcggcaagggcttccagaggaaggtagaccttaggagacatcgagagacccagcacggattaaaatag

SEQ ID NO: 337747 - DNA, 2784 bp, Artificial Sequence
  derived and/or modified sequence
gagggtgcgcccaccggtcccgccgggcgcccgcgggacgcgccgccagggccctctccgccgggggctcggcgctcgcccacctcttccaaatttaaccattacctaaatccgaagggaaatgagcaaacctctcggattgggtgtcaaggtctcctccgggctggggctgagcaagccctcggagtgaccgtgggtgacagcggctccagggactcttggggcgcagtggggaaagtgccggaccaccatgccgcgctcatttctcgtcaaaagcaagaaggctcacagctaccaccagccgcgctccccaggaccagactattccctccgtttagagaatgtaccggcgcctagccgagcagacagcacttcaaatgcaggcggggcgaaggcggagccccgggaccgtttgtcccccgaatcgcagctgaccgaagccccagacagagcctccgcatccccagacagctgcgaaggcagcgtctgcgaacggagctcggagtttgaggacttctggaggcccccgtcaccctccgcgtctccagcctcggagaagtcaatgtgcccatcgctggacgaagcccagcccttccccctgcctttcaaaccgtactcatggagcggcctggcgggttctgacctgcggcacctggtgcagagctaccgaccgtgtggggccctggagcgtggcgctggcctgggcctcttctgcgaacccgccccggagcctggccacccggccgcgctgtacggcccgaagcgggctgccggcggcgcgggggccggggcgccagggagctgcagcgcaggggccggtgccaccgctggccctggcctagggctctacggcgacttcgggtctgcggcagccgggctgtatgagaggcccacggcagcggcgggcttgctgtaccccgagcgtggccacgggctgcacgcagacaagggcgctggcgtcaaggtggagtcggagctgctgtgcacccgcctgctgctgggcggcggctcctacaagtgcatcaagtgcagcaaggtgttctccacgccgcacgggctcgaggtgcacgtgcgcaggtcccacagcggtaccagaccctttgcctgcgagatgtgcggcaagaccttcgggcacgcggtgagcctggagcagcacaaagccgtgcactcgcaggaacggagctttgactgtaagatctgtgggaagagcttcaagaggtcatccacactgtccacacacctgcttatccactcagacactcggccctacccctgtcagtactgtggcaagaggttccaccagaagtcagacatgaagaaacacactttcatccacactggtgagaagcctcacaagtgccaggtgtgcggcaaggcattcagccagagctccaacctcatcacccacagccgcaaacacacaggcttcaagcccttcggctgcgacctctgtgggaagggtttccagaggaaggtggacctccgaaggcaccgggagacgcagcatgggctcaaatgagcaccctggctggctgcaagcagcagctacacaacactacagagggcagcctccctgcttgccaccactctgctccctgcttgcctccactcccttctgactttccagaccccaggtccagtctgcagatcctaccaggttgctcctccttcgccttacctcctggagctgccagaagaaatgaggtaccttttcaaagtgcagccgagagtgagaaccaagtgactctctaggcttcggacacaaataggctcctctacacctgaagacaaaggcaaagtcaaatggggaccagaataaatcttagaccccacagtccttcccatttccagccctaatctacagacaggaatgcccttcaggtttcttccctcccccctcttgacctaccccagatatttgtgtggaagaggaggaatcaccatttacaaggtggacaaatgctaatatttttatctagaaagaagagtgagtgttaacttttatttttttccttctggggggtctgttgactcctttcttttgggtgctgcctataaatcttggaggaatcatttctcctcctcaaaaactgattcagaaactgacttggggaaggaatttaatactttgaagtcatgagatgcaccatcgaggctacccccaagaagaagcagaagagaagttggtaatgagaggggattagaggtcctcccttcagtagggctgtgaaaacctcatcactggaggtaaaagcacaagcaatgcctgtggacaagatgtcattcattcactcagcaaatgttcatggatcaccggctaccaaggtaccaggcaccatgctaggtattggggaagagagactgaagtcacaacccctgactgctcctcaaaagctaacggttgcacctccaagtggctgggtctgttcttactcttggagggaattctgagaagacagcacagaattgtaaaccttcccttttgacccttttggattttatcaggtgtaaacaaaaagctgaacagttacttcaaagatatgtgtgtatattcagttttttattgttaagctgatattttaaagatttctgagctagcaggcatgtgggaaggaaggctctgtcttcaactctttgaccctccatgtgtaccatagaggggggaaaggtggtattttcactttgatgaggttggtaaatgtttttagatcttctggtaagcattatgtttgttaatacatatttattagagtgatgttttaagttaataaagtattaagagta

SEQ ID NO: 337748 - DNA, 2855 bp, Artificial Sequence
  derived and/or modified sequence
agctgagttggggtaacccacccgatgggaactacagctctccagggagtttgattgccggagcgagcttcgctaggaaaggggaggagctggggggcgtgggcagggaggaggaaaggggcctgagacagggccccgggacaggttttaccgctgagctgtgtcagtggcggcggcggcaacgacggcgggttcgcgccacctgtccaagtgccacctggtctcctccgggctggggctgagcaagccctcggagtgaccgtgggtgacagcggctccagggactcttggggcgcagtggggaaagtgccggaccaccatgccgcgctcatttctcgtcaaaagcaagaaggctcacagctaccaccagccgcgctccccaggaccagactattccctccgtttagagaatgtaccggcgcctagccgagcagacagcacttcaaatgcaggcggggcgaaggcggagccccgggaccgtttgtcccccgaatcgcagctgaccgaagccccagacagagcctccgcatccccagacagctgcgaaggcagcgtctgcgaacggagctcggagtttgaggacttctggaggcccccgtcaccctccgcgtctccagcctcggagaagtcaatgtgcccatcgctggacgaagcccagcccttccccctgcctttcaaaccgtactcatggagcggcctggcgggttctgacctgcggcacctggtgcagagctaccgaccgtgtggggccctggagcgtggcgctggcctgggcctcttctgcgaacccgccccggagcctggccacccggccgcgctgtacggcccgaagcgggctgccggcggcgcgggggccggggcgccagggagctgcagcgcaggggccggtgccaccgctggccctggcctagggctctacggcgacttcgggtctgcggcagccgggctgtatgagaggcccacggcagcggcgggcttgctgtaccccgagcgtggccacgggctgcacgcagacaagggcgctggcgtcaaggtggagtcggagctgctgtgcacccgcctgctgctgggcggcggctcctacaagtgcatcaagtgcagcaaggtgttctccacgccgcacgggctcgaggtgcacgtgcgcaggtcccacagcggtaccagaccctttgcctgcgagatgtgcggcaagaccttcgggcacgcggtgagcctggagcagcacaaagccgtgcactcgcaggaacggagctttgactgtaagatctgtgggaagagcttcaagaggtcatccacactgtccacacacctgcttatccactcagacactcggccctacccctgtcagtactgtggcaagaggttccaccagaagtcagacatgaagaaacacactttcatccacactggtgagaagcctcacaagtgccaggtgtgcggcaaggcattcagccagagctccaacctcatcacccacagccgcaaacacacaggcttcaagcccttcggctgcgacctctgtgggaagggtttccagaggaaggtggacctccgaaggcaccgggagacgcagcatgggctcaaatgagcaccctggctggctgcaagcagcagctacacaacactacagagggcagcctccctgcttgccaccactctgctccctgcttgcctccactcccttctgactttccagaccccaggtccagtctgcagatcctaccaggttgctcctccttcgccttacctcctggagctgccagaagaaatgaggtaccttttcaaagtgcagccgagagtgagaaccaagtgactctctaggcttcggacacaaataggctcctctacacctgaagacaaaggcaaagtcaaatggggaccagaataaatcttagaccccacagtccttcccatttccagccctaatctacagacaggaatgcccttcaggtttcttccctcccccctcttgacctaccccagatatttgtgtggaagaggaggaatcaccatttacaaggtggacaaatgctaatatttttatctagaaagaagagtgagtgttaacttttatttttttccttctggggggtctgttgactcctttcttttgggtgctgcctataaatcttggaggaatcatttctcctcctcaaaaactgattcagaaactgacttggggaaggaatttaatactttgaagtcatgagatgcaccatcgaggctacccccaagaagaagcagaagagaagttggtaatgagaggggattagaggtcctcccttcagtagggctgtgaaaacctcatcactggaggtaaaagcacaagcaatgcctgtggacaagatgtcattcattcactcagcaaatgttcatggatcaccggctaccaaggtaccaggcaccatgctaggtattggggaagagagactgaagtcacaacccctgactgctcctcaaaagctaacggttgcacctccaagtggctgggtctgttcttactcttggagggaattctgagaagacagcacagaattgtaaaccttcccttttgacccttttggattttatcaggtgtaaacaaaaagctgaacagttacttcaaagatatgtgtgtatattcagttttttattgttaagctgatattttaaagatttctgagctagcaggcatgtgggaaggaaggctctgtcttcaactctttgaccctccatgtgtaccatagaggggggaaaggtggtattttcactttgatgaggttggtaaatgtttttagatcttctggtaagcattatgtttgttaatacatatttattagagtgatgttttaagttaataaagtattaagagtatt

SEQ ID NO: 337749 - DNA, 2693 bp, Artificial Sequence
  derived and/or modified sequence
aaagcaagattccgtttgaaaactctcctagcgcggtgcccgcgccgtgactccgcaggtctcctccgggctggggctgagcaagccctcggagtgaccgtgggtgacagcggctccagggactcttggggcgcagtggggaaagtgccggaccaccatgccgcgctcatttctcgtcaaaagcaagaaggctcacagctaccaccagccgcgctccccaggaccagactattccctccgtttagagaatgtaccggcgcctagccgagcagacagcacttcaaatgcaggcggggcgaaggcggagccccgggaccgtttgtcccccgaatcgcagctgaccgaagccccagacagagcctccgcatccccagacagctgcgaaggcagcgtctgcgaacggagctcggagtttgaggacttctggaggcccccgtcaccctccgcgtctccagcctcggagaagtcaatgtgcccatcgctggacgaagcccagcccttccccctgcctttcaaaccgtactcatggagcggcctggcgggttctgacctgcggcacctggtgcagagctaccgaccgtgtggggccctggagcgtggcgctggcctgggcctcttctgcgaacccgccccggagcctggccacccggccgcgctgtacggcccgaagcgggctgccggcggcgcgggggccggggcgccagggagctgcagcgcaggggccggtgccaccgctggccctggcctagggctctacggcgacttcgggtctgcggcagccgggctgtatgagaggcccacggcagcggcgggcttgctgtaccccgagcgtggccacgggctgcacgcagacaagggcgctggcgtcaaggtggagtcggagctgctgtgcacccgcctgctgctgggcggcggctcctacaagtgcatcaagtgcagcaaggtgttctccacgccgcacgggctcgaggtgcacgtgcgcaggtcccacagcggtaccagaccctttgcctgcgagatgtgcggcaagaccttcgggcacgcggtgagcctggagcagcacaaagccgtgcactcgcaggaacggagctttgactgtaagatctgtgggaagagcttcaagaggtcatccacactgtccacacacctgcttatccactcagacactcggccctacccctgtcagtactgtggcaagaggttccaccagaagtcagacatgaagaaacacactttcatccacactggtgagaagcctcacaagtgccaggtgtgcggcaaggcattcagccagagctccaacctcatcacccacagccgcaaacacacaggcttcaagcccttcggctgcgacctctgtgggaagggtttccagaggaaggtggacctccgaaggcaccgggagacgcagcatgggctcaaatgagcaccctggctggctgcaagcagcagctacacaacactacagagggcagcctccctgcttgccaccactctgctccctgcttgcctccactcccttctgactttccagaccccaggtccagtctgcagatcctaccaggttgctcctccttcgccttacctcctggagctgccagaagaaatgaggtaccttttcaaagtgcagccgagagtgagaaccaagtgactctctaggcttcggacacaaataggctcctctacacctgaagacaaaggcaaagtcaaatggggaccagaataaatcttagaccccacagtccttcccatttccagccctaatctacagacaggaatgcccttcaggtttcttccctcccccctcttgacctaccccagatatttgtgtggaagaggaggaatcaccatttacaaggtggacaaatgctaatatttttatctagaaagaagagtgagtgttaacttttatttttttccttctggggggtctgttgactcctttcttttgggtgctgcctataaatcttggaggaatcatttctcctcctcaaaaactgattcagaaactgacttggggaaggaatttaatactttgaagtcatgagatgcaccatcgaggctacccccaagaagaagcagaagagaagttggtaatgagaggggattagaggtcctcccttcagtagggctgtgaaaacctcatcactggaggtaaaagcacaagcaatgcctgtggacaagatgtcattcattcactcagcaaatgttcatggatcaccggctaccaaggtaccaggcaccatgctaggtattggggaagagagactgaagtcacaacccctgactgctcctcaaaagctaacggttgcacctccaagtggctgggtctgttcttactcttggagggaattctgagaagacagcacagaattgtaaaccttcccttttgacccttttggattttatcaggtgtaaacaaaaagctgaacagttacttcaaagatatgtgtgtatattcagttttttattgttaagctgatattttaaagatttctgagctagcaggcatgtgggaaggaaggctctgtcttcaactctttgaccctccatgtgtaccatagaggggggaaaggtggtattttcactttgatgaggttggtaaatgtttttagatcttctggtaagcattatgtttgttaatacatatttattagagtgatgttttaagttaataaagtattaagagtatt

SEQ ID NO: 337750 - DNA, 1269 bp, Artificial Sequence
  derived and/or modified sequence
atgcccaggagcttcctggtgaagagcaagaaggcccacagctaccaccagcccaggagccctggccctgactacagcctgcggctggagaatgtgcctgcccccagcagagctgacagcaccagcaatgctgggggcgccaaggccgagccccgggaccggctgagccctgagagccagctgacagaggccccagaccgggccagcgccagcccagacagctgtgagggctctgtgtgtgagaggagcagcgagtttgaggacttctggaggcctcccagccccagcgccagccctgccagcgagaagtccatgtgccccagcctggatgaggcccagcccttccccctgcccttcaagccctacagctggagcggcctggccggcagtgacctgcggcacctggtgcagagctaccggccctgtggggccctggagagaggagctggcctgggcctcttctgtgagcccgcccctgagcccggccaccctgctgccctgtatggccccaagagagctgctgggggcgctggggccggggcccctggcagctgcagcgctggagctggggccacagctggccctggcctgggcctgtatggagactttggatctgctgctgctggcctgtatgagcggcccacagctgctgctggcctgctgtacccagagcggggccacggcctgcatgctgacaagggagctggggtgaaggtggagagcgagctgctgtgcacccggctgctgctgggcggcggcagctacaagtgcatcaagtgcagcaaggtgttcagcaccccccacggcctggaggtgcacgtgagaagaagccacagcggcacccggccctttgcctgtgagatgtgtgggaagacctttggacatgctgtgtccctggagcagcacaaggctgtgcacagccaggagaggagctttgactgcaagatctgtgggaagagcttcaagaggagcagcaccctgagcacccacctgctgatccacagcgacacccggccctacccctgccagtactgcggcaagcgcttccaccagaagagtgacatgaagaagcacaccttcatccacactggagagaagccccacaagtgccaggtgtgtgggaaggccttcagccagagcagcaacctgatcacccacagcaggaagcacacaggcttcaagcccttcggctgtgacctgtgtgggaagggcttccagaggaaggtggacctgcggcggcaccgggagacccagcacggcctgaagtag

SEQ ID NO: 337751 - DNA, 1269 bp, Artificial Sequence
  derived and/or modified sequence
atgccccggagcttcctggtgaagagcaagaaggcccacagctaccaccagcctcggtcacctggcccagactacagcttgaggctggagaatgtgcctgccccgagcagagcggactcaaccagcaatgcagggggagccaaagccgagccacgcgacaggttatctccggagtcacaattgacagaggcgcccgatcgtgccagcgctagtcctgatagctgcgaaggaagcgtgtgcgagcggtccagcgaattcgaagatttctggcggccaccaagtccgtctgcgagtcccgcctctgagaagtccatgtgcccttctctggatgaggcacagcctttcccccttcctttcaagccatattcctggtctggactcgccgggtcagatctccgacaccttgtacaaagttacaggccctgtggtgcccttgagcgaggcgcaggtctcggactgttttgtgagccggcacccgagccaggacacccggcggccttatatggtcccaaacgcgcggctggcggagccggcgccggagccccgggcagttgctccgcaggagcaggagctaccgctggccctggactcggcctctatggcgacttcggtagcgccgccgccggcctttacgaaaggcctacggccgctgccggcctgctgtatccagaaagagggcatggtctccacgccgataagggagctggtgtgaaggtggagtctgaactcctttgtacccgcctgctgctggggggagggtcttacaaatgtatcaagtgttccaaagtattcagtacaccccacggactggaagtacacgtgagaagatcccattcaggcaccagaccgtttgcttgcgagatgtgtggaaagactttcggccacgccgtgtcactcgagcagcacaaggccgtgcactctcaagagaggagcttcgactgcaagatctgcggcaaatcttttaaacgcagtagcaccctaagcacccacctgttgatccattctgacacgaggccctacccgtgtcagtattgcgggaagcgctttcaccagaaatccgacatgaagaagcacaccttcattcacacaggcgagaaaccacacaaatgtcaggtgtgtggaaaggccttctcccagtccagcaacctgattacgcatagcagaaagcacaccgggttcaaaccattcggctgtgatttatgcggaaagggctttcagcgcaaagtggatcttcggcgtcacagggaaactcagcacggactgaagtag

SEQ ID NO: 337752 - DNA, 1269 bp, Artificial Sequence
  derived and/or modified sequence
atgccccggagcttcctggtgaagagcaagaaggcccacagctaccaccagccccggtcccccggtcccgactactctctgcgcttggagaatgtgcctgcacctagtagagcggactcaacttccaacgccggaggggccaaggctgaaccgagagacagactgtcacccgaaagccagctcactgaggcacctgatagagcaagcgctagcccagacagttgtgagggatccgtttgcgaaaggagtagtgaatttgaagacttctggcggcctccaagtccatcagcatccccagcctctgagaagtccatgtgcccctcactggatgaagcccaacctttccccctgccctttaaaccttattcttggagtggcctggctggttcagatctgcgtcatctggtgcagagttaccgtccgtgcggcgccttggaacgtggggcaggccttggcctgttttgcgagcccgcaccagagcctggacaccccgcggctctgtacggcccgaagagggctgcaggcggagctggagcaggagctcccggcagttgttccgctggggctggcgctaccgctgggccagggttgggcctgtacggcgactttggcagcgcagctgccggactgtatgaacgccctactgcagccgcaggcctgctgtatcctgaaaggggtcacgggctgcacgctgataagggggccggtgtcaaagtcgaatcagaactgttgtgcacacgtctcctgctggggggtgggtcctacaaatgcatcaaatgttctaaggttttcagcacccctcacggactggaagtccacgtacgacgcagtcacagcggtaccagacctttcgcctgtgagatgtgtggcaagacattcggccatgccgttagcttggaacagcataaggcagtccactcccaggagagatcttttgactgtaagatttgcggaaagtctttcaaacgtagctctactcttagcacccacctgttgatccatagcgacaccaggccctacccatgtcagtactgcgggaaacgctttcatcagaagtccgacatgaagaagcacacctttatacacactggagagaagcctcacaaatgtcaagtgtgtggaaaggccttctcacagtcaagcaatctgataactcactcccgtaagcatacaggatttaagccttttggttgcgacctctgtggaaaaggatttcagcggaaagtggacctgagacgccacagagaaactcagcatggtctgaagtag

SEQ ID NO: 337753 - DNA, 1269 bp, Artificial Sequence
  derived and/or modified sequence
atgccccggagcttcctggtgaagagcaagaaggcccacagctaccatcaaccacggagtccggggccggattactctctgcgtctcgagaacgtgcccgcccccagcagagccgattctacctctaacgcgggaggggccaaggccgaaccacgagatagactatcccctgagtcccagctgaccgaggcacctgacagagcttccgcctctccggattcttgtgaagggtcagtctgtgagcggagcagcgagtttgaagatttttggagacccccttctcccagcgcttcacctgccagcgaaaagagtatgtgcccgtcactcgacgaagcacagcctttccccctgcccttcaagccctacagttggtctggacttgccggaagcgatttaagacatctggttcagtcatacaggccctgcggcgctctggaacgaggggcagggctgggcctgttttgcgagccagcacccgagccaggtcaccctgctgcactctacggcccaaagcgtgccgccgggggcgcaggcgcaggcgcccctggctcttgcagtgcaggcgccggcgccacggcaggcccgggcctgggattatacggagatttcggatcggccgccgccggcctgtacgagagacccaccgcggccgctggcctgctgtacccagaacgtggccatggcctgcatgcagataaaggagctggtgtgaaagtcgagtctgagctactatgcacccggctgctcctagggggcggatcatacaaatgcatcaagtgttcaaaggttttcagtactccccatgggctcgaagtacacgtgcgtcggtctcactctgggacaagacctttcgcctgcgagatgtgtggcaagacattcggccatgccgtgtctttggaacagcacaaagccgtgcactctcaggagaggagtttcgactgtaaaatttgtggcaagtcttttaagcgctctagtaccttatcaacccacctgttgattcacagcgacacccgcccctatccttgtcagtactgcggtaagagattccatcagaagtcagatatgaagaagcataccttcatccacacaggagagaagccgcacaagtgtcaggtgtgtgggaaagcctttagccagtcttccaatctgatcacacattccagaaaacacaccggcttcaagccttttgggtgtgacctatgtgggaaaggcttccagagaaaagtcgaccttaggcgccacagggagacccagcatggcttgaagtag

SEQ ID NO: 337754 - DNA, 1269 bp, Artificial Sequence
  derived and/or modified sequence
atgcctaggagctttctggtgaagtccaagaaagctcactcctatcaccagcctaggagtccaggaccagattattctctgcgcctggagaatgtgcccgctcctagtcgagcggattcaaccagcaatgccggaggggctaaagcagagcctagggacagattgagccccgaatcgcaactgacagaagcccctgaccgagcctcagcaagccctgattcctgtgaaggtagcgtttgcgaacgctcatctgaattcgaggatttttggcgtccacccagccccagcgccagtcccgctagtgaaaaatcaatgtgtccgtcacttgatgaagctcagccattccctcttccattcaaaccttatagctggtctggcctggccggatcagatctgagacacctggtccaaagttacaggccatgtggtgctctggaacgaggcgctggactgggtctgttttgcgagcccgctcctgaaccagggcatccagccgcactgtatggccctaaaagagccgctggcggtgcaggcgcaggggctccagggtcctgctctgctggggctggagcaaccgcgggacccggtcttggcctgtacggcgatttcggatctgctgccgctggcttgtacgagcggccaaccgccgctgccggtttactatatcccgaaagaggacatggactgcatgccgacaaaggggctggcgttaaggtggaaagtgaattgttatgtactcgactgttgctcggtggtggatcgtacaagtgcattaagtgctccaaggtgttttccactccccatggactagaggtgcatgttcggcgtagccactctgggacgagacctttcgcatgtgaaatgtgcggcaagactttcggccacgcagtgagcctcgaacagcacaaggcagtgcatagccaggagcggagtttcgactgcaagatttgtggaaagtctttcaaacgaagctcaacacttagcacacaccttttgatccattccgacacgaggccatatccgtgccaatactgcgggaagaggtttcatcagaaatctgacatgaaaaagcatacctttatccacaccggggagaaaccccataagtgtcaggtgtgcggaaaagcgttcagtcagtcttctaaccttattacgcatagtaggaagcatactggattcaagcccttcggatgcgatctgtgcggaaagggtttccagcggaaggtcgatcttaggcgccaccgggagacgcaacacggcctcaagtag

SEQ ID NO: 337755 - DNA, 1269 bp, Artificial Sequence
  derived and/or modified sequence
atgcccagaagtttcctggtaaaaagcaagaaggcccactcttaccatcagcccagatcccccggtccagattactcattgaggctggagaacgtccccgctccatctagggctgattcaactagtaacgcgggtggcgctaaagccgagcctagagaccggttgagcccagagagccagctcaccgaagctcccgatcgtgcctccgctagccctgactcctgtgaagggtcagtatgtgaacgcagtagcgagttcgaagatttttggcgaccgccatctccctctgcttcgccggctagcgagaaatctatgtgccctagtctggacgaagcacaaccctttcctctcccgttcaagccatactcttggagcgggctggcgggtagcgatttaaggcatctggtgcagtcataccggccttgcggggctttagagagaggcgcagggctcggactgttctgcgagccagcccctgagcctgggcaccctgctgcactgtacggacccaagagggccgcaggaggtgctggggcaggtgcccctggcagctgcagcgccggagccggtgcaacggctgggcctggcttgggcctttatggcgacttcgggtccgctgccgcaggcctctacgaacggccaacagctgccgctggtctgctctaccctgaaagaggccacggtctgcacgcagataagggggctggcgtcaaggtcgagagcgagctgttgtgcactaggctgctcctgggagggggttcatataagtgtattaagtgctccaaggtcttttctaccccccatggcctggaagtccacgtgagaagatctcactctgggacaagaccattcgcctgcgaaatgtgtggaaaaacgttcggccatgccgtgtccctggagcagcataaggctgtacactcccaagagaggtccttcgactgcaaaatctgtggaaagtcgtttaagcgctcatccactctatcaacccacttgcttatacactccgatactcgaccctacccctgccaatactgtggcaagaggtttcatcagaagtcggacatgaagaagcacacatttatccacaccggcgagaagcctcacaaatgccaagtctgtggaaaggctttttcccagtcctccaatctcattacccatagccgcaagcacaccgggttcaagccgttcgggtgtgacctgtgcggcaaaggcttccagcgaaaggtcgacctgaggaggcaccgtgagactcagcatggcttgaagtag

SEQ ID NO: 337756 - DNA, 1269 bp, Artificial Sequence
  derived and/or modified sequence
atgcccaggagtttcctcgtcaagtcaaaaaaggctcactcgtaccaccagcctagaagccccggtcctgactactctttgaggcttgagaatgtccctgcccctagtcgcgctgattcaacctctaatgccggaggagccaaggcggagcccagagatcggctgtccccagaatcgcaactcacagaggctcccgatcgagcgtctgcttctccagattcctgtgagggttcagtatgcgaaaggtctagcgagttcgaggacttctggagacctccaagccccagcgcctctcccgcatccgaaaaatcaatgtgcccgtctctggacgaagcgcagcccttccctctccccttcaagccctactcttggtcggggctggccggatccgatttaaggcatctggtgcaatcatacagaccctgtggcgcactggaacgcggtgccggattggggctgttctgtgaacctgctcctgaacccggtcaccccgctgccttatatggtccaaaaagagccgctgggggtgccggagcgggagcacccggatcatgctcggcgggagccggtgcaacagctggcccaggactggggttgtacggggatttcgggagtgctgccgctggtctgtacgagcgtcccacagctgcagcaggattgctgtatcccgaaagaggccacgggctgcacgcggacaagggcgctggagtgaaggtagagtcagaattgctgtgcacaaggttattgctcggcggtggtagctataaatgcatcaagtgttctaaagtgttttctacaccccacggccttgaggtccatgtaagacgctcccactccggaacccgccctttcgcttgcgagatgtgcggcaagacatttggtcatgcagtgtcccttgagcaacacaaagccgtccattcacaggagaggagttttgactgcaagatatgcgggaaatccttcaagagatcaagtactctgtcaacgcacctccttatacatagcgataccaggccctacccctgccaatattgcggtaagagatttcaccagaagtccgacatgaagaaacacacatttatccacacaggagagaaaccacacaagtgtcaggtatgcggcaaagcattcagtcagtctagtaacttaatcactcactcgcgtaagcacactggtttcaagcctttcggatgcgacctgtgcggcaaaggcttccaacgcaaggtagatttacggcgacaccgagagacacagcatggactcaaatag

SEQ ID NO: 337757 - DNA, 1269 bp, Artificial Sequence
  derived and/or modified sequence
atgcccagaagcttcctggtgaagagcaagaaggcccacagctaccaccagcccagaagccccggccccgactacagcctgagactggagaacgtgcccgcccccagcagagccgacagcaccagcaacgccggcggcgccaaggccgagcccagagacagactgagccccgagagccagctgaccgaggcccccgacagagccagcgccagccccgacagctgcgagggcagcgtgtgcgagagaagcagcgagttcgaggacttctggagaccccccagccccagcgccagccccgccagcgagaagagcatgtgccccagcctggacgaggcccagcccttccccctgcccttcaagccctacagctggagcggcctggccggcagcgacctgagacacctggtgcagagctacagaccctgcggcgccctggagagaggcgccggcctgggcctgttctgcgagcccgcccccgagcccggccaccccgccgccctgtacggccccaagagagccgccggcggcgccggcgccggcgcccccggcagctgcagcgccggcgccggcgccaccgccggccccggcctgggcctgtacggcgacttcggcagcgccgccgccggcctgtacgagagacccaccgccgccgccggcctgctgtaccccgagagaggccacggcctgcacgccgacaagggcgccggcgtgaaggtggagagcgagctgctgtgcaccagactgctgctgggcggcggcagctacaagtgcatcaagtgcagcaaggtgttcagcaccccccacggcctggaggtgcacgtgagaagaagccacagcggcaccagacccttcgcctgcgagatgtgcggcaagaccttcggccacgccgtgagcctggagcagcacaaggccgtgcacagccaggagagaagcttcgactgcaagatctgcggcaagagcttcaagagaagcagcaccctgagcacccacctgctgatccacagcgacaccagaccctacccctgccagtactgcggcaagagattccaccagaagagcgacatgaagaagcacaccttcatccacaccggcgagaagccccacaagtgccaggtgtgcggcaaggccttcagccagagcagcaacctgatcacccacagcagaaagcacaccggcttcaagcccttcggctgcgacctgtgcggcaagggcttccagagaaaggtggacctgagaagacacagagagacccagcacggcctgaagtag

SEQ ID NO: 337758 - DNA, 513 bp, Artificial Sequence
  derived and/or modified sequence
agagcctggcgcggagccggcgagattttggtggggtctcacctgttgcgtgactcccccacagtccggccgcgggagtccgaccctgaatgcccagggagtgttgagagaaatctggacgagtttcgggtcccgctcccttgggagcacgtggcctaccagcctctcgattgcagggttgggtggtcgcgacaccggggtcgccttgaggccagtccggctgccgaggtctgcgggagtccacctccggccagctggcaattttgaaagactgccttactttccccatctcagtgccagggcaggggcccttggagtgacttggctggggtctgtggcccgatccccctgccgtccctcaggacccgggctttctgctgtacagacttctcgtgggcagcctcccctcggaactcgggcatcatggcctcagggcctcttccgcctgcggagccgctgcttcctgcatcagtcactcccgctgggggcggggcggaggaaggggttggatgt

SEQ ID NO: 337759 - protein, 263 aa, Artificial Sequence
  derived and/or modified sequence
MSGCELSPLGLRVGLSAGPAHGRRFPAPSGPWRGLNLASRQGAGPKPRDSRPYKAAAVGAWHARPEACAHTLSCPALARLGRARRRPWMSHRTSSTFRAERSFHSSSSSSSSSTSSSASRALPAQDPPMEKALSMFSDDFGSFMRPHSEPLAFPAAHPTARPGGAGNIKTLGDAYEFAVDVRDFSPEDIIVTTSNNHIEVRAEKLAADGTVMNTFAHKCQLPEDVDPTSVTSALREDGSLTIRARRHPHTEHVQQTFRTEIKI

SEQ ID NO: 337760 - protein, 175 aa, Artificial Sequence
  derived and/or modified sequence
MSHRTSSTFRAERSFHSSSSSSSSSTSSSASRALPAQDPPMEKALSMFSDDFGSFMRPHSEPLAFPAAHPTARPGGAGNIKTLGDAYEFAVDVRDFSPEDIIVTTSNNHIEVRAEKLAADGTVMNTFAHKCQLPEDVDPTSVTSALREDGSLTIRARRHPHTEHVQQTFRTEIKI

SEQ ID NO: 337761 - protein, 68 aa, Artificial Sequence
  derived and/or modified sequence
MSHRTSSTFRAERSFHSSSSSSSSSTSSSASRALPAQDPPMEKALSMFSDDFGSFMRPHSEPLAFPGK

SEQ ID NO: 337762 - DNA, 792 bp, Artificial Sequence
  derived and/or modified sequence
atgtccggttgtgaactttccccccttggactgcgagtcggactgagcgccggtcccgcccatgggcggcggttcccggcgccgagtggcccatggcgaggcctcaacctggcatcccggcaaggtgctggcccaaagccacgcgactctcggccttacaaggcagccgctgttggggcgtggcacgccagacccgaggcatgtgcacacacactgtcctgtcccgcgcttgcccgtttggggagggctcggcgtaggccatggatgtcccataggaccagtagtacttttcgggcagaaagaagtttccattccagctccagttcttcatcttcctcaacatcaagttcagcctctagagccctgcctgcccaagaccctcctatggaaaaggccctttccatgttcagtgacgactttggaagctttatgagaccccacagcgaaccattggcgtttcccgccgcgcatccaacagcgagacccggcggtgccggcaatatcaagaccctgggggatgcttacgaattcgcagtggacgtaagagacttctccccagaggatatcatcgtgactacatccaacaaccacatcgaggtacgggccgaaaagctcgcggccgacggcactgttatgaacacgttcgcacataaatgccagctgccggaggacgtggaccccacaagtgttacaagtgctctgcgggaagatggttcccttaccatccgagctaggcgacatccgcatactgaacatgtccagcagacattccgcacggagatcaaaatttag

SEQ ID NO: 337763 - DNA, 528 bp, Artificial Sequence
  derived and/or modified sequence
atgagtcatcgcacatctagtacattcagggccgagcgttcctttcactccagttcttccagctccagctcgagcacaagtagcagcgccagccgcgccctgccagcccaggacccccccatggagaaggcactgtctatgtttagtgacgatttcggatcttttatgcgtccccattcggagccactggcttttccagcggctcaccctacagcccgccctggaggcgcaggaaatatcaagacactgggcgacgcctatgagttcgccgtggacgttcgcgactttagcccagaagacattattgtgacgaccagtaataatcatatcgaggtcagggcagaaaagctggccgcagacggcactgtgatgaatacatttgcacataagtgtcagttacctgaagatgtggaccccacgagtgtcacaagcgccttacgcgaagacggcagcctcactatcagagctaggcggcaccctcacaccgagcacgtgcagcagacctttcgtactgagatcaagatctag

SEQ ID NO: 337764 - DNA, 2905 bp, Artificial Sequence
  derived and/or modified sequence
cttttacctctgactgaaatcccacctaaggcgctcgcaggcatcacctctgacacagagatggagcagacagttgccgggaacacaaccttctagacctttaaggagaaagctgccaactttgtcctcttggggctgctgaatgttctgagagtcagagggagtgcaggcacagaatccaggtccccatgggggctggcaggggacagctgcacattttacaccccctggcagggctcaacctttccttagagatgggctgtgaaggttgtctgccttgagggaaggagctcctgacgtcacagagcggtggtgcttccacctaccctgtccccaaggagcctgcacactgatggaggaggtacagccgtggaggagaaccagagtctggaggggaggcacagtcctcaggagcccccaggctgacgggggaaacaaaacacacaataaaccccaaacttgcaaggttctggggcaggcaccgaggtccgagtggcaaggagacaggatccagccctgtgcagtggtgaggaggcccctggggctgctgtgatcagcctggaatgtcaggctgtgagctcagccctctcggcctgcgtgtcgggctgtcagcagggccggcgcacgggagaagatttccagccccctctgggccatggagaggcctaaatttagctagtagacaaggggctggccccaagcccagggacagtcggccttataaagcggccgcagtcggagcctggcacgctcgcccagaggcctgcgcccacaccctctcctgtccagccctcgcccgcctgggcagggcccggcgccgtccgtggatgagccacagaacctcttccaccttccgagcggagagaagtttccattcctcttcctcttcctcctcctcttccacctcctcctcggcctcccgtgctctcccggcccaggacccgcccatggagaaggccctgagcatgttttccgatgactttggcagcttcatgcggccccactcggagcccctggccttcccagcagcccatcccacagcccgccccggtggggcaggcaacatcaagaccctaggagacgcctatgagtttgcggtggacgtgagagacttctcacctgaagacatcattgtcaccacctccaacaaccacatcgaggtgcgggctgagaagctggcggctgacggcactgtcatgaacaccttcgctcacaagtgccagctgccggaggacgtggacccgacgtcggtgacctcggctctgcgggaggacggcagcctcactatccgggcacggcgtcacccgcatacagaacacgtccagcagaccttccggacggagatcaaaatctgagtgcctctcccttccctttccctgtccccccgccccacgcctgccagcaaagcctcgctaaccccattacaacagctccaggacatctcagcccaggttctagcccccacgcaccccagaccccaggtggaccatcctcccaaactagggccctccactctatccagggcaggccagggactccctggcctgacacatgatgcccagatttcagatttggcctccgtcacttaatccagagtacaggggctggggtcagggaaggaagatctaaagaacccactgtgggtcaggggaatgggaccagcaggacatatgggcaagctctgcaggacagacagacagacaaaccctctgatctatgaagtctctgcagggcaaggggaccagggacctggaaccctcttggccaaggggagtgggagggacagagggaaggtcacaggcaagggtgcctatctaagtggaactaattgcccgagggctcagcaaggccaagaggagacagccgtgacggtaaacttcccctctaccagcctccaagccccacgccagcgagcaggctgcctgcccaccccgtgcccccagccagctggctgtgccagggcagagccatgccacatctgtatatagatggggtttttccaatacagctggttcgtgataaactgcatgaaactcctgccgtcctgcgcctgctggggcctccaggcaaggccaagtggggttgggggtggggctggtccttctccctcccacaggcctgtgttcttggggctgctcccatgcagacaggatcacctaacagagatggaagccagggcatggatggggctttgggtcctcgaggttggaccccagcttcttgccaccttcccctccgggcagtcagctctccatccatccccctctttaatctatgaatctataggctcggtgtgtgtaacacacacacccctatcgttgtccttcaaatactcagcattaccattggttgaggccaaattcagagctttctcaaatcagatttacaatctccattttcattaacggggaaacatccccgagccactgagtgctgtgctttgtcactgaaggttagatctgaacccagggtgtcaactgctgctctcaactccccacctctgggcactgaggagtatttcccctcattctacctctctaaggctatgcaaccctccccacgtcttccagctgggggatgggggggagtcataggaaaagcccccatctcccatctgggatagggaccttccatcagccttaaccctgggaaatgcctgctgcccccaatgactcttggtttcgtctcccacatacagaagcagggtggaggggaagggtgggtctcagttagcaggggtccccagggcaagtcagcctcctccctccatgcctctctggtcagtgtgccttagggtggcctctcactcccaccactctgggccccttgggggaggactggggagggggccgtgggagagccctgacgctggaacctgtatacacaataaaggacagtctcacag

SEQ ID NO: 337765 - DNA, 844 bp, Artificial Sequence
  derived and/or modified sequence
cttataaagcggccgcagtcggagcctggcacgctcgcccagaggcctgcgcccacaccctctcctgtccagccctcgcccgcctgggcagggcccggcgccgtccgtggatgagccacagaacctcttccaccttccgagcggagagaagtttccattcctcttcctcttcctcctcctcttccacctcctcctcggcctcccgtgctctcccggcccaggacccgcccatggagaaggccctgagcatgttttccgatgactttggcagcttcatgcggccccactcggagcccctggccttcccagcagcccatcccacagcccgccccggtggggcaggcaacatcaagaccctaggagacgcctatgagtttgcggtggacgtgagagacttctcacctgaagacatcattgtcaccacctccaacaaccacatcgaggtgcgggctgagaagctggcggctgacggcactgtcatgaacaccttcgctcacaagtgccagctgccggaggacgtggacccgacgtcggtgacctcggctctgcgggaggacggcagcctcactatccgggcacggcgtcacccgcatacagaacacgtccagcagaccttccggacggagatcaaaatctgagtgcctctcccttccctttccctgtccccccgccccacgcctgccagcaaagcctcgctaaccccattacaacagctccaggacatctcagcccaggttctagcccccacgcaccccagaccccaggtggaccatcctcccaaactagggccctccactctatccagggcaggccagggactccctggcctgacacatgatgccca

SEQ ID NO: 337766 - DNA, 792 bp, Artificial Sequence
  derived and/or modified sequence
atgagcggctgtgagctgagccccctgggcctgcgggtgggcctgtctgctggccctgcccatggaagacgcttccctgcccccagcggcccctggaggggcctgaacctggccagccggcagggcgccggccccaagccccgggacagccggccctacaaggctgctgctgtgggcgcctggcacgcccggcctgaggcctgtgcccacaccctgagctgcccagccctggcccggctgggccgggccaggagaagaccctggatgagccacaggaccagcagcaccttccgggcagagaggagcttccacagcagcagcagcagcagcagcagcagcaccagcagcagcgccagccgggccctgcctgcccaggacccccccatggagaaggccctgtccatgttcagtgatgactttggcagcttcatgaggccccacagcgagcccctggccttccctgctgcccaccccacagcccggcctgggggcgccggcaacatcaagaccctgggagatgcctatgaatttgctgtggatgtgcgggacttctccccagaggacatcatcgtgaccaccagcaacaaccacatcgaggtgcgggcagagaagctggccgcagatggcaccgtgatgaacacctttgcccacaagtgccagctgcctgaagatgtggaccccacctctgtgaccagcgccctgcgggaggatggcagcctgaccatccgggcccggcggcacccccacacagagcacgtgcagcagaccttcagaacagagatcaagatctag

SEQ ID NO: 337767 - DNA, 528 bp, Artificial Sequence
  derived and/or modified sequence
atgagccacaggaccagcagcaccttccgggcagagaggagcttccacagcagcagcagcagcagcagcagcagcaccagcagcagcgccagccgggccctgcctgcccaggacccccccatggagaaggccctgtccatgttcagtgatgactttggcagcttcatgaggccccacagcgagcccctggccttccctgctgcccaccccacagcccggcctgggggcgccggcaacatcaagaccctgggagatgcctatgaatttgctgtggatgtgcgggacttctccccagaggacatcatcgtgaccaccagcaacaaccacatcgaggtgcgggcagagaagctggccgcagatggcaccgtgatgaacacctttgcccacaagtgccagctgcctgaagatgtggaccccacctctgtgaccagcgccctgcgggaggatggcagcctgaccatccgggcccggcggcacccccacacagagcacgtgcagcagaccttcagaacagagatcaagatctag

SEQ ID NO: 337768 - DNA, 792 bp, Artificial Sequence
  derived and/or modified sequence
atgagcggctgcgagctgagccccctgggcctgcgggtgggcctgagcgcaggtccagcgcacggcagacggttccctgccccatctggcccgtggcggggcctaaacctagcaagccgacaaggagcaggccctaagccacgtgacagccgtccatacaaagcggcggccgtgggagcttggcacgctcgacccgaagcctgtgcccatacactcagttgtcctgccctcgcaaggctgggcagggctcgtagaaggccctggatgagccatcgcacaagctccactttccgggctgaacgctcctttcactctagcagcagctcctcatccagcagtacgtcctcatctgccagccgggctctcccagcccaggacccgccgatggagaaagctcttagcatgttcagtgatgattttgggagcttcatgaggccccacagcgaacccctcgcattccctgctgcccatcccacggcgaggccaggcggagcaggtaatattaagactctcggtgacgcctacgagttcgcagtcgacgtccgggacttcagtccagaagatatcatcgtgactactagcaataaccacatagaggtaagagccgagaagctcgcagcagatgggacagtgatgaacacgttcgctcataaatgccagcttcccgaagatgtagacccaacttcagtgacaagcgcattgcgcgaggatggctccctgacaatccgggcacgaagacatccacacactgagcatgtacagcagacattcagaaccgaaatcaaaatttag

SEQ ID NO: 337769 - DNA, 528 bp, Artificial Sequence
  derived and/or modified sequence
atgagccaccggaccagcagcaccttccgggccgagcggagcttccattcttctagttcctcttcatcctcttccacctccagcagtgcctcacgtgcgttgccagctcaggacccacctatggagaaggcgctgtccatgttcagtgacgatttcggcagcttcatgagaccacacagtgaacctttggccttccctgctgctcacccaactgcacggccaggtggtgctggaaatatcaagacactcggcgacgcatatgagtttgccgtagacgtgcgcgacttctcacccgaagacataatcgttactacctctaataatcatatcgaggttagagctgagaaacttgcggccgatggaacagtcatgaacacttttgcccacaagtgtcagctgcccgaggacgttgacccaacatccgttactagcgcactgcgggaagatggcagtctgaccataagggcacggcgtcatccccacaccgagcatgtgcaacaaacattcagaacggagattaagatctag

SEQ ID NO: 337770 - DNA, 792 bp, Artificial Sequence
  derived and/or modified sequence
atgtctggatgtgaactatcaccattaggactgagagttggcctgtccgcaggcccagctcacgggaggcgattcccggctccttcgggaccctggcggggtctcaacctagcctcacgtcagggcgcaggcccaaaacctcgcgatagtaggccgtacaaggccgcagccgtcggagcctggcatgcccgacctgaagcctgtgcgcacactttgagctgccctgccttggccagactaggtagggctaggcggcgaccttggatgagtcaccgaacgtctagcacattccgtgcagaaagaagcttccactctagtagctcctcttccagtagctcaaccagctcaagcgcttctcgcgcactgcctgcacaagacccccctatggaaaaggctctgtctatgttctcagacgattttgggtcttttatgaggccccatagcgagccactcgctttccccgctgcgcatccaacagcgagacccggaggggcagggaacattaagacactaggggacgcatacgaattcgccgtggatgtgagggacttctctcccgaggatataattgtgactacttccaataaccatatcgaggtacgcgcagagaagctggccgctgatgggacggtgatgaacaccttcgctcataaatgccagctcccagaggatgtggatcccacatccgtaaccagcgcccttcgggaggatggttccctgactattagggcacggcgtcacccacatacggagcacgtgcagcaaaccttccggaccgaaattaaaatatag

SEQ ID NO: 337771 - DNA, 528 bp, Artificial Sequence
  derived and/or modified sequence
atgtctcaccgcacaagctcaaccttcagggccgagcgatctttccattcctcttcaagctcgtcaagttcaagcaccagcagcagcgccagtcgcgcactgccagcccaggatccacctatggagaaggcgctaagcatgttctccgatgacttcggtagtttcatgcgccctcattccgagccacttgcttttccggcagcccatccgaccgcgaggcccggaggagcgggtaatattaaaacactgggggatgcctacgaattcgccgtcgacgtccgagactttagcccagaggatatcatagttacgacaagcaacaaccacattgaggtccgtgccgagaagctggcagccgacggtaccgttatgaatacctttgcccacaaatgtcaattgcctgaagacgtggaccctacgagtgtgaccagcgcacttcgagaggacggctccctgactatacgggcaagacggcacccccacactgaacatgtccagcagaccttccggactgaaattaaaatctag

SEQ ID NO: 337772 - DNA, 792 bp, Artificial Sequence
  derived and/or modified sequence
atgagcggctgcgagctgagccccctgggcctgagagtgggcctgagcgccggccccgcccacggcagaagattccccgcccccagcggcccctggagaggcctgaacctggccagcagacagggcgccggccccaagcccagagacagcagaccctacaaggccgccgccgtgggcgcctggcacgccagacccgaggcctgcgcccacaccctgagctgccccgccctggccagactgggcagagccagaagaagaccctggatgagccacagaaccagcagcaccttcagagccgagagaagcttccacagcagcagcagcagcagcagcagcagcaccagcagcagcgccagcagagccctgcccgcccaggacccccccatggagaaggccctgagcatgttcagcgacgacttcggcagcttcatgagaccccacagcgagcccctggccttccccgccgcccaccccaccgccagacccggcggcgccggcaacatcaagaccctgggcgacgcctacgagttcgccgtggacgtgagagacttcagccccgaggacatcatcgtgaccaccagcaacaaccacatcgaggtgagagccgagaagctggccgccgacggcaccgtgatgaacaccttcgcccacaagtgccagctgcccgaggacgtggaccccaccagcgtgaccagcgccctgagagaggacggcagcctgaccatcagagccagaagacacccccacaccgagcacgtgcagcagaccttcagaaccgagatcaagatctag

SEQ ID NO: 337773 - DNA, 528 bp, Artificial Sequence
  derived and/or modified sequence
atgagccacagaaccagcagcaccttcagagccgagagaagcttccacagcagcagcagcagcagcagcagcagcaccagcagcagcgccagcagagccctgcccgcccaggacccccccatggagaaggccctgagcatgttcagcgacgacttcggcagcttcatgagaccccacagcgagcccctggccttccccgccgcccaccccaccgccagacccggcggcgccggcaacatcaagaccctgggcgacgcctacgagttcgccgtggacgtgagagacttcagccccgaggacatcatcgtgaccaccagcaacaaccacatcgaggtgagagccgagaagctggccgccgacggcaccgtgatgaacaccttcgcccacaagtgccagctgcccgaggacgtggaccccaccagcgtgaccagcgccctgagagaggacggcagcctgaccatcagagccagaagacacccccacaccgagcacgtgcagcagaccttcagaaccgagatcaagatctag

SEQ ID NO: 337774 - DNA, 2892 bp, Artificial Sequence
  derived and/or modified sequence
cttttacctctgactgaaatcccacctaaggcgctcgcaggcatcacctctgacacagagatggagcagacagttgccgggaacacaaccttctagacctttaaggagaaagctgccaactttgtcctcttggggctgctgaatgttctgagagtcagagggagtgcaggcacagaatccaggtccccatgggggctggcaggggacagctgcacattttacaccccctggcagggctcaacctttccttagagatgggctgtgaaggttgtctgccttgagggaaggagctcctgacgtcacagagcggtggtgcttccacctaccctgtccccaaggagcctgcacactgatggaggaggtacagccgtggaggagaaccagagtctggaggggaggcacagtcctcaggagcccccaggctgacgggggaaacaaaacacacaataaaccccaaacttgcaaggttctggggcaggcaccgaggtccgagtggcaaggagacaggatccagccctgtgcagtggtgaggaggcccctggggctgctgtgatcagcctggaatgtcaggctgtgagctcagccctctcggcctgcgtgtcgggctgtcagcagggccggcgcacgggagaagatttccagccccctctgggccatggagaggcctaaatttagctagtagacaaggggctggccccaagcccagggacagtcggccttataaagcggccgcagtcggagcctggcacgctcgcccagaggcctgcgcccacaccctctcctgtccagccctcgcccgcctgggcagggcccggcgccgtccgtggatgagccacagaacctcttccaccttccgagcggagagaagtttccattcctcttcctcttcctcctcctcttccacctcctcctcggcctcccgtgctctcccggcccaggacccgcccatggagaaggccctgagcatgttttccgatgactttggcagcttcatgcggccccactcggagcccctggccttcccagcccgccccggtggggcaggcaacatcaagaccctaggagacgcctatgagtttgcggtggacgtgagagacttctcacctgaagacatcattgtcaccacctccaacaaccacatcgaggtgcgggctgagaagctggcggctgacggcactgtcatgaacaccttcgctcacaagtgccagctgccggaggacgtggacccgacgtcggtgacctcggctctgcgggaggacggcagcctcactatccgggcacggcgtcacccgcatacagaacacgtccagcagaccttccggacggagatcaaaatctgagtgcctctcccttccctttccctgtccccccgccccacgcctgccagcaaagcctcgctaaccccattacaacagctccaggacatctcagcccaggttctagcccccacgcaccccagaccccaggtggaccatcctcccaaactagggccctccactctatccagggcaggccagggactccctggcctgacacatgatgcccagatttcagatttggcctccgtcacttaatccagagtacaggggctggggtcagggaaggaagatctaaagaacccactgtgggtcaggggaatgggaccagcaggacatatgggcaagctctgcaggacagacagacagacaaaccctctgatctatgaagtctctgcagggcaaggggaccagggacctggaaccctcttggccaaggggagtgggagggacagagggaaggtcacaggcaagggtgcctatctaagtggaactaattgcccgagggctcagcaaggccaagaggagacagccgtgacggtaaacttcccctctaccagcctccaagccccacgccagcgagcaggctgcctgcccaccccgtgcccccagccagctggctgtgccagggcagagccatgccacatctgtatatagatggggtttttccaatacagctggttcgtgataaactgcatgaaactcctgccgtcctgcgcctgctggggcctccaggcaaggccaagtggggttgggggtggggctggtccttctccctcccacaggcctgtgttcttggggctgctcccatgcagacaggatcacctaacagagatggaagccagggcatggatggggctttgggtcctcgaggttggaccccagcttcttgccaccttcccctccgggcagtcagctctccatccatccccctctttaatctatgaatctataggctcggtgtgtgtaacacacacacccctatcgttgtccttcaaatactcagcattaccattggttgaggccaaattcagagctttctcaaatcagatttacaatctccattttcattaacggggaaacatccccgagccactgagtgctgtgctttgtcactgaaggttagatctgaacccagggtgtcaactgctgctctcaactccccacctctgggcactgaggagtatttcccctcattctacctctctaaggctatgcaaccctccccacgtcttccagctgggggatgggggggagtcataggaaaagcccccatctcccatctgggatagggaccttccatcagccttaaccctgggaaatgcctgctgcccccaatgactcttggtttcgtctcccacatacagaagcagggtggaggggaagggtgggtctcagttagcaggggtccccagggcaagtcagcctcctccctccatgcctctctggtcagtgtgccttagggtggcctctcactcccaccactctgggccccttgggggaggactggggagggggccgtgggagagccctgacgctggaacctgtatacacaataaaggacagtctcacagac

SEQ ID NO: 337775 - DNA, 485 bp, Artificial Sequence
  derived and/or modified sequence
acgctcgcccagaggcctgcgcccacaccctctcctgtccagccctcgcccgcctgggcagggcccggcgccgtccgtggatgagccacagaacctcttccaccttccgagcggagagaagtttccattcctcttcctcttcctcctcctcttccacctcctcctcggcctcccgtgctctcccggcccaggacccgcccatggagaaggccctgagcatgttttccgatgactttggcagcttcatgcggccccactcggagcccctggccttcccaggcaagtgatccgggccctgaggggaggggaggtgcacagggaggggacgtctgctccagggcgccaccgaaggcgctgtggctgccggtcggcctggaacaggtgctgcacagcctgcagccatgtgtggccaccaagacagatgtggccacagggacagatgtggccatgaaaacaggtgggctgtaggaatgaggaggagctta

SEQ ID NO: 337776 - protein, 413 aa, Artificial Sequence
  derived and/or modified sequence
MFASDLLRALDCCPGAGSSGLLPQLGPRQLLAFTVNCLGNHRYLGFFEDLEQRHKAQVLVEDISDILEEHAEKHFHPYIAYCSNEVYQQRTLQKLISSNAAFREALREIERRPACGGLPMLSFLILPMQRVTRLPLLMDTLCLKTQGHSERYKAASRALKAISKLVRQCNEGAHRMERMEQMYTLHTQLDFSKVKSLPLISASRWLLKRGELFLVEETGLFRKIASRPTCYLFLFNDVLVVTKKKSEESYMVQDYAQMNHIQVEKIEPSELPLPGGGNRSSSVPHPFQVTLLRNSEGRQEQLLLSSDSASDRARWIVALTHSERQWQGLSSKGDLPQVEITKAFFAKQADEVTLQQADVVLVLQQEDGWLYGERLRDGETGWFPEDFARFITSRVAVEGNVRRMERLRVETDV

SEQ ID NO: 337777 - protein, 180 aa, Artificial Sequence
  derived and/or modified sequence
MFASDLLRALDCCPGAGSSGLLPQLGPRQLLAFTVNCLGNHRYLGFFEDLEQRHKAQVLVEDISDILEEHAEKHFHPYIAYCSNEVYQQRTLQKLISSNAAFREALREIERRPACGGLPMLSFLILPMQRVTRLPLLMDTLCLKTQGHSERYKAASRALKAISKLVRQCNEGAHRMERME

SEQ ID NO: 337778 - DNA, 1242 bp, Artificial Sequence
  derived and/or modified sequence
atgttcgccagcgacctgctgagagccctggactgctgccccggcgccggcagcagcggcctgctgccccagctgggccccagacagctgctggccttcaccgtgaactgcctgggcaaccacagatacctgggcttcttcgaggacctggagcagagacacaaggcccaggtgctggtggaggacatcagcgacatcctggaggagcacgccgagaagcacttccacccctacatcgcctactgcagcaacgaggtgtaccagcagagaaccctgcagaagctgatcagcagcaacgccgccttcagagaggccctgagagagatcgagagaagacccgcctgcggcggcctgcccatgctgagcttcctgatcctgcccatgcagagagtgaccagactgcccctgctgatggacaccctgtgcctgaagacccagggccacagcgagagatacaaggccgccagcagagccctgaaggccatcagcaagctggtgagacagtgcaacgagggcgcccacagaatggagagaatggagcagatgtacaccctgcacacccagctggacttcagcaaggtgaagagcctgcccctgatcagcgccagcagatggctgctgaagagaggcgagctgttcctggtggaggagaccggcctgttcagaaagatcgccagcagacccacctgctacctgttcctgttcaacgacgtgctggtggtgaccaagaagaagagcgaggagagctacatggtgcaggactacgcccagatgaaccacatccaggtggagaagatcgagcccagcgagctgcccctgcccggcggcggcaacagaagcagcagcgtgccccaccccttccaggtgaccctgctgagaaacagcgagggcagacaggagcagctgctgctgagcagcgacagcgccagcgacagagccagatggatcgtggccctgacccacagcgagagacagtggcagggcctgagcagcaagggcgacctgccccaggtggagatcaccaaggccttcttcgccaagcaggccgacgaggtgaccctgcagcaggccgacgtggtgctggtgctgcagcaggaggacggctggctgtacggcgagagactgagagacggcgagaccggctggttccccgaggacttcgccagattcatcaccagcagagtggccgtggagggcaacgtgagaagaatggagagactgagagtggagaccgacgtgtag

SEQ ID NO: 337779 - DNA, 543 bp, Artificial Sequence
  derived and/or modified sequence
atgttcgccagcgacctgctgagagccctggactgctgccccggcgccggcagcagcggcctgctgccccagctgggccccagacagctgctggccttcaccgtgaactgcctgggcaaccacagatacctgggcttcttcgaggacctggagcagagacacaaggcccaggtgctggtggaggacatcagcgacatcctggaggagcacgccgagaagcacttccacccctacatcgcctactgcagcaacgaggtgtaccagcagagaaccctgcagaagctgatcagcagcaacgccgccttcagagaggccctgagagagatcgagagaagacccgcctgcggcggcctgcccatgctgagcttcctgatcctgcccatgcagagagtgaccagactgcccctgctgatggacaccctgtgcctgaagacccagggccacagcgagagatacaaggccgccagcagagccctgaaggccatcagcaagctggtgagacagtgcaacgagggcgcccacagaatggagagaatggagtag

SEQ ID NO: 337780 - DNA, 1242 bp, Artificial Sequence
  derived and/or modified sequence
atgttcgcttctgacctgctccgcgccctggattgctgccctggcgcagggtcttccgggctgttgccacaattaggcccgcggcagctgttggccttcaccgtcaattgcctgggtaaccacagatatcttggattttttgaagatctcgagcaaaggcataaggcccaagttctggtggaggacatttcagatatcctggaagaacacgccgagaaacattttcacccctatatagcctactgctctaatgaggtgtaccagcagagaacgctgcagaaactcattagctcgaatgctgcctttagagaggccctgcgcgagatcgaacgccgcccagcgtgcggaggtctacccatgctgtcttttttgatcctccccatgcaaagagtgacacggctgccccttctgatggacaccctgtgcctgaaaactcaggggcactctgaacgctacaaggcagcctcacgtgcattaaaagcaatcagcaaactggttaggcaatgcaacgagggagctcaccgaatggaacgtatggagcaaatgtatacattgcacacgcagctcgacttctccaaagtgaagagcctccctctcatttcagcctcgaggtggctcctgaaacggggggaattgtttctcgtggaggagactggtctctttagaaaaatcgctagccggcccacatgctacctcttcctcttcaatgatgtcctggtcgtcacgaagaaaaaaagcgaggaatcatatatggttcaggactacgctcagatgaatcatatacaggtcgagaaaatcgagccaagtgaacttccccttccaggcggcggtaacaggagctcttccgtgccacacccttttcaagttactcttttaagaaatagcgagggccgacaagagcagctccttctctcttccgactcagccagtgacagagcccgatggatcgttgccctcacccatagtgagaggcagtggcaaggtctgtcctccaaaggagatcttccacaagttgagattaccaaggccttctttgctaagcaggccgacgaggtgaccttacagcaggcagacgttgtgctagtgcttcagcaggaagacggatggctgtatggagagaggctgcgcgacggagaaacaggatggtttcccgaagacttcgctagatttatcacctcccgggtcgccgtagagggtaatgtgcggaggatggagcggctgagggtagagacagacgtctag

SEQ ID NO: 337781 - DNA, 543 bp, Artificial Sequence
  derived and/or modified sequence
atgtttgcatcagatctcctcagagcactcgattgctgtccaggggccggatcatctggcttattgccccagttggggcccaggcagcttctggcttttaccgttaattgtctggggaatcaccggtatctcggattctttgaggatctggaacaacgtcataaagcccaggttctcgtggaggacatttctgacatcctggaggagcatgcagagaagcacttccacccctacattgcatactgttctaatgaggtgtatcaacagcgcaccctccagaagctgatctctagtaacgccgcattccgcgaagccttgcgtgagatcgaacgccgccctgcctgtggaggattacccatgttaagtttcctcatcctgccaatgcagagggtgacccgtctgcccctcctcatggacacgctctgcctgaagacccagggacactcagagcggtacaaggctgcatcccgtgccctaaaggccataagtaaactggtacggcagtgtaatgagggtgcccataggatggaacgcatggagtag

SEQ ID NO: 337782 - DNA, 1242 bp, Artificial Sequence
  derived and/or modified sequence
atgtttgccagtgacctgctgcgggccctggactgctgccctggggccggcagcagcggcctgctgccccagctgggcccccggcagctgctggccttcaccgtgaactgcctgggcaaccaccgctacctgggcttctttgaggacctggagcagaggcacaaggcccaggtgctggtggaggacatcagtgacatcctggaggagcacgccgagaagcacttccacccctacatcgcctactgcagcaatgaggtgtaccagcagaggaccctgcagaagctgatcagcagcaatgctgccttccgggaggccctgcgggagattgaaagaagacctgcctgtggcggcctgcccatgctgtccttcctgatcctgcccatgcagagggtgacccggctgcccctgctgatggacaccctgtgcctgaagacccagggccacagcgagcgctacaaggccgccagccgggccctgaaggccatcagcaagctggtgcggcagtgcaatgaaggagcccacaggatggagaggatggagcagatgtacaccctgcacacccagctggacttcagcaaggtgaagagcctgcccctcatcagcgccagccgctggctgctgaagagaggagagctgttcctggtggaggagaccggcctcttcaggaagatcgccagccggcccacctgctacctgttcctgttcaatgatgtgctggtggtgaccaagaagaagtctgaggagagctacatggtgcaggactatgcccagatgaaccacatccaggtggagaagattgagcccagcgagctgcccctgcccggcggcggcaacagaagcagctctgtgccccaccccttccaggtgaccctgctgagaaattctgagggccggcaggagcagctgctgctgagcagtgacagcgccagtgaccgggcccgctggatcgtggccctgacccacagcgagcggcagtggcagggcctgagcagcaagggggacctgccccaggtggagatcaccaaggccttctttgccaagcaggctgatgaggtgaccctgcagcaggctgatgtggtgctggtgctgcagcaggaggatggctggctgtatggagagcggctgagagatggagagaccggctggttcccagaagattttgcccgcttcatcaccagccgggtggccgtggagggcaatgtgcggaggatggagcggctgcgggtggagacagatgtgtag

SEQ ID NO: 337783 - DNA, 543 bp, Artificial Sequence
  derived and/or modified sequence
atgtttgccagtgacctgctgcgggccctggactgctgccctggggccggcagcagcggcctgctgccccagctgggcccccggcagctgctggccttcaccgtgaactgcctgggcaaccaccgctacctgggcttctttgaggacctggagcagaggcacaaggcccaggtgctggtggaggacatcagtgacatcctggaggagcacgccgagaagcacttccacccctacatcgcctactgcagcaatgaggtgtaccagcagaggaccctgcagaagctgatcagcagcaatgctgccttccgggaggccctgcgggagattgaaagaagacctgcctgtggcggcctgcccatgctgtccttcctgatcctgcccatgcagagggtgacccggctgcccctgctgatggacaccctgtgcctgaagacccagggccacagcgagcgctacaaggccgccagccgggccctgaaggccatcagcaagctggtgcggcagtgcaatgaaggagcccacaggatggagaggatggagtag

SEQ ID NO: 337784 - DNA, 1242 bp, Artificial Sequence
  derived and/or modified sequence
atgttcgccagcgacctgctgcgggccctggactgctgccccggcgccgggagcagcggcctcttaccacagctcggaccccgtcagttgttggctttcacagtgaactgtctggggaaccatcggtatcttggcttttttgaagatctagagcagaggcataaagctcaggtgctggtggaagacatctctgacattctcgaggagcatgcggagaaacactttcacccatacatcgcgtactgcagcaacgaagtctaccaacaaaggactcttcaaaaactgatctcttccaacgccgctttccgagaagccctccgtgagattgaacgacgacctgcttgcggtggcctgccaatgctctcttttttgatactgccaatgcaaagggtgacaaggctgcccctcctgatggatacattgtgcctgaaaactcagggacactcagaaaggtataaggccgcctccagagccctgaaggcgatcagcaagctggttcggcagtgtaatgagggcgcccacagaatggagaggatggaacaaatgtacaccttgcatacccagctggatttttctaaagtcaaatcacttcctctcattagtgctagcaggtggctgctcaaacgcggggaactcttcctggtcgaggagacaggtctgttccgcaaaatcgccagcaggccaacctgctacctgttcctcttcaatgacgtgttggtcgtgaccaagaaaaaaagcgaggagagttacatggtacaggactacgcgcagatgaaccacatccaggtcgaaaaaattgagccgtccgaattacctctcccaggggggggtaaccgtagttccagcgttcctcaccccttccaggtgactctgctgcgaaattccgagggacgacaggagcagcttctcttgagctctgattccgcctctgatcgtgcccggtggatcgtcgcattgactcactccgaaagacaatggcagggcctcagcagtaaaggagacctaccccaggtcgagatcacaaaagcttttttcgccaaacaggcggatgaggtgaccctgcagcaagccgacgttgttttggttctgcagcaggaagacggctggctgtacggagagcgcttacgggatggcgaaacagggtggttccctgaagattttgcaagatttataacctcccgagttgcagtggaaggcaacgtacgacggatggaaagacttagggtggagaccgacgtgtag

SEQ ID NO: 337785 - DNA, 543 bp, Artificial Sequence
  derived and/or modified sequence
atgttcgccagcgacctgctgcgggccctggactgctgccccggcgcaggatcttcagggttgttgccccaacttggcccacgccaactcctggcatttacggtgaactgccttggcaaccatagatacctcgggttcttcgaggatttggagcagagacacaaggctcaagttctggtcgaagacatctcggatattctagaggaacacgcagagaagcatttccacccatacattgcctactgtagcaatgaagtttaccaacagaggacactgcagaagctgatatcttctaatgcagcgttcagagaagccctccgcgagattgagcgccggcccgcatgcggtggcttaccaatgctgagctttttgatcctccctatgcagagagtgacacggttgcccctcctaatggacactctgtgcctgaagacacagggacacagcgaacggtacaaagctgccagtagggctcttaaggcaatatccaaacttgtgcggcagtgtaacgaaggcgcccacaggatggaacggatggagtag

SEQ ID NO: 337786 - DNA, 1504 bp, Artificial Sequence
  derived and/or modified sequence
gtgtcctccggtcccctctgcctcaggcagctgcatgtttgcctctgacctcctcagggctttagattgctgccctggggcgggaagctccggcctcctcccccagctgggcccccgacagctcctggcattcacagtgaactgtctggggaatcatcgctatttggggttcttcgaggacctggagcagcggcacaaggcccaggtgctggtcgaggacatcagtgacatcctggaggagcacgctgagaagcacttccacccctacatcgcctactgctccaacgaggtctaccaacagcgcacgctgcagaagctgataagcagcaacgccgccttccgagaggccctgagagagattgagaggcggccggcgtgcgggggcctgcccatgctctccttcctgatcctccccatgcagcgggtgacccggctgcccctcctgatggatacgctctgcctcaagacccagggccactccgaaaggtacaaggctgccagccgtgcactgaaggccatcagcaagctggtgaggcagtgcaacgagggggcccacaggatggagcgcatggagcagatgtacacgctgcacacacagctggacttcagcaaggtcaagtccctcccactgatctctgcctcccggtggctgctgaagcgcggagagctgttcttagtggaagaaaccggactttttcgaaaaattgccagccggccaacgtgctaccttttcctgttcaacgatgtcctggttgtgaccaagaagaagagcgaggagagctacatggtccaggactacgcccagatgaaccacatccaggtggagaagatagagccgtctgagctccctctgcccgggggcggcaaccgtagctcctccgtgccccaccccttccaggtgaccctgcttcgcaacagcgagggccgccaggagcagctcctgctctcctcggactccgcgagtgaccgggcacggtggatcgtggcgctcacacacagtgagagacagtggcagggcctctccagcaaaggagacctgccccaggtggagatcaccaaggccttcttcgcgaagcaagcagacgaggtcacactgcagcaggcggacgtggtcctggttctgcagcaggaggatgggtggctctatggcgagaggctccgggacggagagacgggatggttccccgaggactttgcccgcttcatcaccagccgtgtggccgtggagggcaatgtccgcaggatggagcgtctgcgggtggagacggacgtgtagccctggcgaggccagccggcggcagcacagcctgtctccaatcagcaagtggtcgtgcctggctctagagagcgtggggagctggtctcaaggacccagcatggttccctggggcttcccaagagcctgtggctgtggtgccgggctccagacacttcacggaaggaagatcacatgtccccagagaggcacccccaggcaagctcgagggggccacaccgtgtccca

SEQ ID NO: 337787 - DNA, 576 bp, Artificial Sequence
  derived and/or modified sequence
gtgtcctccggtcccctctgcctcaggcagctgcatgtttgcctctgacctcctcagggctttagattgctgccctggggcgggaagctccggcctcctcccccagctgggcccccgacagctcctggcattcacagtgaactgtctggggaatcatcgctatttggggttcttcgaggacctggagcagcggcacaaggcccaggtgctggtcgaggacatcagtgacatcctggaggagcacgctgagaagcacttccacccctacatcgcctactgctccaacgaggtctaccaacagcgcacgctgcagaagctgataagcagcaacgccgccttccgagaggccctgagagagattgagaggcggccggcgtgcgggggcctgcccatgctctccttcctgatcctccccatgcagcgggtgacccggctgcccctcctgatggatacgctctgcctcaagacccagggccactccgaaaggtacaaggctgccagccgtgcactgaaggccatcagcaagctggtgaggcagtgcaacgagggggcccacaggatggagcgcatggagca

SEQ ID NO: 337788 - DNA, 1242 bp, Artificial Sequence
  derived and/or modified sequence
atgttcgcctctgatttgctccgtgccctggactgctgcccaggtgccggaagcagcggcctgctccctcagttggggccacgccaactgcttgctttcaccgtgaactgtctgggaaaccacaggtatttaggattcttcgaagatctagagcaacgacacaaggctcaagtgctcgttgaagatatttcggatatcctggaagagcacgctgaaaaacatttccacccatacatcgcctattgttccaacgaagtgtaccagcaacggaccctacaaaaactgatcagctcgaatgcggctttccgggaggccttgcgagagattgaaaggcgtccagcctgcgggggacttcctatgctgagtttcttaattctaccgatgcagcgcgtgacacgactgcccttgttgatggatacgctctgcctcaagactcagggtcatagcgagcggtacaaggctgccagtagagctctcaaagctatcagtaagcttgtccgacaatgtaacgagggtgctcacagaatggaacggatggaacagatgtatactcttcatacacaactggattttagtaaggtaaaatcattacctcttataagtgcttccagatggctgctgaagcgcggtgagctcttcctggttgaggagacgggcttgtttcgaaagattgccagtagacccacgtgttacttgttcctctttaacgatgtgttagttgtaacgaagaaaaagagcgaagagtcatacatggtgcaagattacgcccaaatgaaccatatccaggtggaaaaaatcgaacccagcgaattgccacttcccggtgggggtaatcgatctagttctgtgccccaccctttccaggtcaccttactgaggaattccgagggtcgtcaggagcaattactgttgagtagcgatagcgcttcagaccgagccaggtggatagtggccctgactcactctgagcggcagtggcagggtctttcttcgaagggagatcttccacaggtagaaatcacaaaggctttctttgccaagcaggctgatgaagtcacgctccagcaggcggatgtggtgttagtcttacagcaggaggatggatggctgtatggtgagcgcctgagggacggagagacgggttggttccctgaagattttgcaaggtttatcactagtcgggtagctgtagagggaaatgtgcgccgaatggagcggttgagggtggaaactgacgtttag

SEQ ID NO: 337789 - DNA, 543 bp, Artificial Sequence
  derived and/or modified sequence
atgtttgctagcgatctattgagagctctggattgctgtcctggtgccggtagtagtggcctcttgcctcaactgggacccagacaactgttggcctttactgtgaactgtcttggcaatcatagatatctgggctttttcgaggatctagaacagcgtcacaaggcacaagtgctggtggaagatattagtgacatcttggaagagcatgccgaaaagcacttccatccatacattgcgtactgcagcaacgaagtgtaccaacagcgtactctgcagaagttaatctcatctaatgcagcctttcgggaggctctcagagaaattgaaagacgtccggcatgtggcggtttgcccatgctgtccttcttgatcctccctatgcaacgtgtaacacgcctccccctcctgatggataccctctgcctgaaaactcagggacatagcgagcgatacaaagcagcaagcagagcccttaaggccatttcgaagttggtgagacaatgtaatgagggagcccatcgcatggagaggatggagtag

SEQ ID NO: 337790 - protein, 269 aa, Artificial Sequence
  derived and/or modified sequence
MRLLAWLIFLANWGGARAEPEEAQGPCAQEKGKGPPPTSILASLAPGLEAGKFWHIADLHLDPDYKVSKDPFQVCPSAGSQPVPDAGPWGDYLCDSPWALINSSIYAMKEIEPEPDFILWTGDDTPHVPDEKLGEAAVLEIVERLTKLIREVFPDTKVYAALGNHDFHPKNQFPAGSNNIYNQIAELWKPWLSNESIALFKKGAFYCEKLPGPSGAGRIVVLNTNLYYTSNALTADMADPGQQFQWLEDVLTDASKAGDMVYIVGHVPP

SEQ ID NO: 337791 - DNA, 810 bp, Artificial Sequence
  derived and/or modified sequence
atgaggctgctggcttggctgatctttctggctaattggggcggagccagagccgaaccagaggaggctcagggcccttgcgctcaagaaaagggcaagggtcctccaccgacttcaatccttgcaagtctcgcccctgggctggaagccggtaagttctggcatattgcagaccttcatctggatccagattataaagtgtccaaggacccatttcaggtatgcccttccgctggctcccaaccagtcccagacgcaggcccttggggggactacttatgcgatagtccctgggcgctcattaacagttccatttacgccatgaaggagattgagccagagccggacttcatcctgtggacaggcgacgacacaccacacgtcccagacgaaaaattgggtgaagcggcagttctggagatcgtcgagagacttactaaacttatacgggaggtgtttcccgatacaaaggtttatgccgcactgggcaatcatgattttcacccaaagaaccagttcccagctgggtcaaataacatctacaatcaaatagccgagctgtggaaaccctggctgagtaacgagtcaatcgccctcttcaaaaagggcgcattctattgcgagaaactgcctggaccatctggagccggtcgtattgtggtgctgaataccaatctttattacacctctaatgcgttgaccgctgatatggccgatcctggccagcaattccagtggcttgaggacgtgctgacagacgcttcaaaagccggagatatggtgtatatcgtagggcacgtccccccatag

SEQ ID NO: 337792 - DNA, 810 bp, Artificial Sequence
  derived and/or modified sequence
atgcggctcttggcctggctgatcttcttggcaaactggggtggtgcacgagcggaacctgaagaagcacagggcccttgcgcacaggagaagggtaagggacctccaccaaccagcatcctggcatccttagcaccaggactggaagctggcaagttttggcatattgcagatttgcatttagaccccgactacaaggtatccaaggatccatttcaagtttgccccagtgcaggttcccagccagttcccgacgctggtccctggggtgactacctgtgtgactcgccctgggcattaatcaatagttccatctatgccatgaaagaaattgagcctgaacccgattttatcctttggacaggcgacgacaccccccacgtccccgacgaaaaactgggagaggctgcggtactggagattgtggagcgattaaccaaactgatccgggaagtgttccccgacacaaaggtgtatgccgccctcggcaaccacgacttccaccccaaaaaccagttccctgccggatcaaataacatttacaatcagatcgccgaactgtggaaaccttggctttccaatgagagtatcgccctcttcaaaaagggcgcattctactgtgaaaagctgcccgggccatcaggagcaggaaggattgtggtgctgaataccaatctctactacactagcaatgcactcacggctgatatggccgacccaggacagcagttccaatggcttgaggatgtattaacagacgccagtaaagctggagacatggtttatatagtgggacacgtgcccccttag

SEQ ID NO: 337793 - DNA, 810 bp, Artificial Sequence
  derived and/or modified sequence
atgaggctgttggcttggctcatctttttggctaattggggcggtgcacgagcagaacctgaagaagcccaaggaccttgcgcccaggaaaaaggaaaggggcccccccccacatcaatcctagcctccctagccccaggtctcgaagctgggaaattttggcacattgcagacctacatttagatccggattacaaggtgtccaaggaccctttccaggtgtgtccctctgcaggcagtcagcctgtaccagacgcgggcccctggggggactacctgtgtgattccccgtgggcgctgatcaattcttcaatttacgccatgaaggagattgaaccagagcccgacttcatcctgtggaccggtgacgatactccccatgtgcccgatgagaaactcggtgaagcagcagtccttgagatcgtggagcgcttaacaaaactcatccgcgaggtgttcccagatactaaagtgtacgccgccctaggtaatcatgatttccatcctaagaatcagttcccagcagggtccaacaatatttataatcagatcgcagagctctggaagccatggttatcaaacgaaagcattgccctgttcaagaaaggcgccttctattgcgaaaaactacctgggcccagcggagcaggcaggatcgttgtgctaaacacaaatttgtattatacttcgaatgcactgacagccgatatggctgatcctggtcagcagtttcaatggctagaagatgtcctgaccgatgctagtaaagcgggcgatatggtttacattgtgggtcacgtgcccccatag

SEQ ID NO: 337794 - DNA, 810 bp, Artificial Sequence
  derived and/or modified sequence
atgagactgctggcctggctgatcttcctggccaactggggcggcgccagagccgagcccgaggaggcccagggcccctgcgcccaggagaagggcaagggccccccccccaccagcatcctggccagcctggcccccggcctggaggccggcaagttctggcacatcgccgacctgcacctggaccccgactacaaggtgagcaaggaccccttccaggtgtgccccagcgccggcagccagcccgtgcccgacgccggcccctggggcgactacctgtgcgacagcccctgggccctgatcaacagcagcatctacgccatgaaggagatcgagcccgagcccgacttcatcctgtggaccggcgacgacaccccccacgtgcccgacgagaagctgggcgaggccgccgtgctggagatcgtggagagactgaccaagctgatcagagaggtgttccccgacaccaaggtgtacgccgccctgggcaaccacgacttccaccccaagaaccagttccccgccggcagcaacaacatctacaaccagatcgccgagctgtggaagccctggctgagcaacgagagcatcgccctgttcaagaagggcgccttctactgcgagaagctgcccggccccagcggcgccggcagaatcgtggtgctgaacaccaacctgtactacaccagcaacgccctgaccgccgacatggccgaccccggccagcagttccagtggctggaggacgtgctgaccgacgccagcaaggccggcgacatggtgtacatcgtgggccacgtgcccccctag

SEQ ID NO: 337795 - DNA, 810 bp, Artificial Sequence
  derived and/or modified sequence
atgagacttctcgcctggctcatctttttggctaattgggggggagctagagcagaacccgaagaagctcaggggccctgtgcccaggagaagggcaagggccccccgccaacatccatcctagcgtcgctagctcccggcttggaggccgggaagttctggcatatcgccgatctgcacttagaccctgattacaaagtatccaaggatccctttcaagtctgcccttcagccggaagccaacccgtgccagacgccgggccctggggggattatctctgcgacagtccgtgggctctcatcaacagttcaatttatgctatgaaagagattgagcctgagcctgacttcattctgtggaccggggacgacacccctcatgtgcctgatgagaaactgggcgaagcagcagtgcttgaaattgttgaacgtctcaccaaacttatcagagaggtctttccggacactaaggtctatgctgcactgggcaaccatgattttcaccccaaaaaccaatttcctgccggtagcaacaacatttataaccagatcgcagaactctggaaaccttggctttctaacgaatcaatcgctttgtttaagaagggggccttctattgcgaaaagctgccgggtccctccggggccggacgaatcgttgtgctgaacacaaacttgtattacacgagtaacgctctgaccgccgatatggcggaccccggtcagcagtttcagtggttagaggatgttctgacggatgcaagcaaggctggagatatggtgtatatcgtgggtcacgtccccccatag

SEQ ID NO: 337796 - DNA, 810 bp, Artificial Sequence
  derived and/or modified sequence
atgaggctgctggcctggctgatcttcctggccaactggggcggggcccgggcagagcctgaggaggcccagggcccctgtgcccaggagaagggcaaaggacctccacccaccagcatcctggccagcctggcccctggcctggaggccggcaagttctggcacatcgctgacctgcacctggaccctgactacaaggtgtccaaggaccccttccaggtgtgccccagcgctggcagccagcctgtgcctgatgctggcccctggggagactacctgtgtgacagcccctgggccctgatcaacagcagcatctatgccatgaaggagattgagcctgagccagacttcatcctgtggacaggagatgacacccctcatgtgcctgatgagaagctgggggaggccgctgtgctggagatcgtggagcggctgaccaagctgatccgggaggtgtttcctgacaccaaggtgtatgctgccctgggcaaccacgacttccaccccaagaaccagtttcctgctggcagcaacaacatctacaaccagattgctgagctgtggaagccctggctgagcaatgaaagcatcgccctcttcaagaagggggccttctactgtgagaagctgcccggccccagcggggccggcagaattgtggtgctgaacaccaacctgtactacaccagcaatgccctgacagctgacatggctgaccccggccagcagttccagtggctggaggatgtgctgacagatgccagcaaggccggggacatggtgtacatcgtgggccacgtgcccccatag

SEQ ID NO: 337797 - DNA, 1955 bp, Artificial Sequence
  derived and/or modified sequence
ataccctgctgggcaaaggaggaagagccagaggatccagacgccttggaggacttggaacacctgtaacaggacaaggagttctgctcaggcacgtggccacagaaaactacttaggaagcctgtggtgagaacaacaacagtgcctgagaatcccacggctctggggaagtgagccccgaggatgaggctgctcgcctggctgattttcctggctaactggggaggtgccagggctgaaccagaggaagcgcaaggaccatgtgcccaagagaaaggcaaagggcctcccccaacatccatcctggccagcctggctccgggcttggaagcagggaagttctggcacatcgctgacctgcaccttgaccctgactacaaggtatccaaagaccccttccaggtgtgcccatcagctggatcccagccagtgcccgacgcaggcccctggggtgactacctctgtgattctccctgggccctcatcaactcctccatctatgccatgaaggagattgagccagagccagacttcattctctggactggtgatgacacgcctcatgtgcccgatgagaaactgggagaggcagctgtactggaaattgtggaacgcctgaccaagctcatcagagaggtctttccagatactaaagtctatgctgctttgggaaatcatgattttcaccccaaaaaccagttcccagctggaagtaacaacatctacaatcagatagcagaactatggaaaccctggcttagtaatgagtccatcgctctcttcaaaaaaggtgccttctactgtgagaagctgccgggtcccagcggggctgggcgaattgtggtcctcaacaccaatctgtactataccagcaatgcgctgacagcagacatggcggaccctggccagcagttccagtggctggaagatgtgctgaccgatgcatccaaagctggggacatggtgtacattgtcggccacgtgcccccggggttctttgagaagacgcaaaacaaggcatggttccgggagggcttcaatgaaaaatacctgaaggtggtccggaagcatcatcgcgtcatagcagggcagttcttcgggcaccaccacaccgacagctttcggatgctctatgatgatgcaggtgtccccataagcgccatgttcatcacacctggagtcaccccatggaaaaccacattacctggagtggtcaatggggccaacaatccagccatccgggtgttcgaatatgaccgagccacactgagcctgaaggacatggtgacctacttcatgaacctgagccaggcgaatgctcaggggacgccgcgctgggagctcgagtaccagctgaccgaggcctatggggtgccggacgccagcgcccactccatgcacacagtgctggaccgcatcgctggcgaccagagcacactgcagcgctactacgtctataactcagtcagctactctgctggggtctgcgacgaggcctgcagcatgcagcacgtgtgtgccatgcgccaggtggacattgacgcttacaccacctgtctgtatgcctctggcaccacgcccgtgccccagctcccgctgctgctgatggccctgctgggcctgtgcacgctcgtgctgtgacctgccaggctcaccttcttcctggtaacgggtaacgggggcagcgcccaggatcacccagagctgggccttccaccatttcctccgcgcctgaggagtgaactgaaataggacaaccgaatcaggaagcgaagccccaggagctgcagccatccgtgatcgcgccactgcactccagcctgggtgacaaagccagactctctccaaaaacaaaccagaaacagaaaagaaatgacgacccaagacccccctacaagcatacttcttttgcgtattatgtttaactcacaaaacaaagctcatcatgcgtttg

SEQ ID NO: 337798 - DNA, 810 bp, Artificial Sequence
  derived and/or modified sequence
atgcggctgctggcctggctgatcttcctggccaactggggcggcgctagagccgagccagaggaagcccagggcccatgcgcccaggaaaaagggaagggaccccccccgacgtcgattctggccagtctcgctcccgggctggaagccggcaaattctggcacatcgctgacttgcatctcgacccagattataaagtctcaaaagacccatttcaggtgtgcccctccgccggcagccagcctgtccccgacgccggaccatggggcgactatctctgcgacagcccttgggcccttatcaactcctccatatatgcgatgaaggaaatcgagcccgaaccagactttatcctctggacaggagatgacacgccccatgtgccagatgagaaattgggcgaggctgctgtgctagaaatcgtggaacggctcacaaagctgatccgcgaagtattccccgatacaaaagtctatgcggcactgggcaatcatgactttcacccaaaaaatcagttccccgcaggatccaacaatatatacaaccaaatcgccgagctttggaaaccatggctgtccaacgagtccatcgctctgttcaagaaaggcgcattctactgcgagaagttgccaggcccctcgggagctgggaggatcgttgttctgaatacgaacttatactacacctctaatgccctaacagccgatatggccgaccccggtcagcagttccagtggctggaggacgtattgacagacgcttccaaggccggagacatggtttatatcgtcggtcacgtgcctccatag

SEQ ID NO: 337799 - RNA, 810 nt, Artificial Sequence
  derived and/or modified sequence
augcggcucuuggccuggcugaucuucuuggcaaacugggguggugcacgagcggaaccugaagaagcacagggcccuugcgcacaggagaaggguaagggaccuccaccaaccagcauccuggcauccuuagcaccaggacuggaagcuggcaaguuuuggcauauugcagauuugcauuuagaccccgacuacaagguauccaaggauccauuucaaguuugccccagugcagguucccagccaguucccgacgcuggucccuggggugacuaccugugugacucgcccugggcauuaaucaauaguuccaucuaugccaugaaagaaauugagccugaacccgauuuuauccuuuggacaggcgacgacaccccccacguccccgacgaaaaacugggagaggcugcgguacuggagauuguggagcgauuaaccaaacugauccgggaaguguuccccgacacaaagguguaugccgcccucggcaaccacgacuuccaccccaaaaaccaguucccugccggaucaaauaacauuuacaaucagaucgccgaacuguggaaaccuuggcuuuccaaugagaguaucgcccucuucaaaaagggcgcauucuacugugaaaagcugcccgggccaucaggagcaggaaggauuguggugcugaauaccaaucucuacuacacuagcaaugcacucacggcugauauggccgacccaggacagcaguuccaauggcuugaggauguauuaacagacgccaguaaagcuggagacaugguuuauauagugggacacgugcccccuuag

SEQ ID NO: 337800 - RNA, 810 nt, Artificial Sequence
  derived and/or modified sequence
augaggcuguuggcuuggcucaucuuuuuggcuaauuggggcggugcacgagcagaaccugaagaagcccaaggaccuugcgcccaggaaaaaggaaaggggcccccccccacaucaauccuagccucccuagccccaggucucgaagcugggaaauuuuggcacauugcagaccuacauuuagauccggauuacaagguguccaaggacccuuuccaggugugucccucugcaggcagucagccuguaccagacgcgggccccuggggggacuaccugugugauuccccgugggcgcugaucaauucuucaauuuacgccaugaaggagauugaaccagagcccgacuucauccuguggaccggugacgauacuccccaugugcccgaugagaaacucggugaagcagcaguccuugagaucguggagcgcuuaacaaaacucauccgcgagguguucccagauacuaaaguguacgccgcccuagguaaucaugauuuccauccuaagaaucaguucccagcaggguccaacaauauuuauaaucagaucgcagagcucuggaagccaugguuaucaaacgaaagcauugcccuguucaagaaaggcgccuucuauugcgaaaaacuaccugggcccagcggagcaggcaggaucguugugcuaaacacaaauuuguauuauacuucgaaugcacugacagccgauauggcugauccuggucagcaguuucaauggcuagaagauguccugaccgaugcuaguaaagcgggcgauaugguuuacauugugggucacgugcccccauag

SEQ ID NO: 337801 - protein, 1473 aa, Artificial Sequence
  derived and/or modified sequence
MTRMSCPWGSYQWEPGACPAAPRGIGGGDMAGGIPDVRGLQEAALGAGRSQEEARLVEEAQTPVMLPQDSGQRVEEVPGDLMAKRMSLILHVQKLPWDHVPCLRRTRQNLYQDVGGHAHGSGLGGAKRGAARSALRRPLPPATCRPAGIVSGPSPRLDSNPTGAHLIKQTRPLTVEWTKDTPVPEPMELRSDASHKENVSPKPAALPKPGKRLKQRRFRRSLGIGLSGRHDQWVPGCQVERGGPAATPSPGAVLDQEPCRVQTNLASPGPRLGLALKDTTGQLVNSSFWQQSNLQSLARRRQGKAREFAIQQSNLSINETSSPHLCPEPGGSSGPHKLPWGPLLSQEPLARPSSCLRQSGLPAPGTPSGDFRPTEAFAPLDGHTQPGLRSWGGLGSWRSRLVGEPLTLEDLAVPSQNQTQAPSRAAVHQLLASVHCLAQEAARLRCQAPQEPPAWGVSPKQKGEEGAPRERVHREEERTAFHLSDTVPASSASKNKAQNITAPESEAICWQLLSRCFRSWRHLVKRQREPAAAAVALGRWQLLRKCLQALWLREAQLEAAWGQYTKVLLVRSFREVSGLQVGPGGRVKQCPGSLREEEIAQRLLSHPRQRTDSRHERVQILQALQLAVFFLWCQQKKRARQERETLRKATRATQRTGSFPQAWHSTAAGVAWVAPLSPQHQRAWLCRCFGAWQQFVQRGSRYRDHLADRRTGTLRKCLEQWVRMKQLRESDGAKVTQLSLCRQKAGREAVYTAGPGACGLGAVGQAQGQQEQGRGSLQDACWTLALCWALLLWKMRLFQRQWANSFFQGLQQRMLQRSLRWWHLRALGPDATSSCTKTPSALEPLSSSTLQDSLEKVPRAPTLPDTLQGSLLWAAGQRQQGQCLLLWQARAQQFQGTARWYQHTRQRRIFLSWSRWATAQWAWRELASHRAWDRTCRAVLGLWRQRLLQSRLVEWWAQERGWRLARDALCHWHSCWQGQQFLHEKCQTWVQVHLQGLQKVVFRSWQQAAAHQRCTVTRPEQLLLQSYFQAWCEVVRDTGVLRAQHQAFQDGLRRRALGAVFATWREAQEVAAGAQEQRVAQASLARWRSCGQQGQEDGQQKKARAPQAFPAWPVAPGMHHEAQQQAGESAGAQAAQCWTWCWALWVHESCRGQVSRAHASWKPRAWVLEASVQSAVRGGVQRAILTQLRPAELRRFLRTVQLRVRLGLPGAGKTRSCWTQATELVPPAPSLQCSLGGRRKPRGTAWAQRCREHSLCPAFQLWPQWPGQSSWVPGLPLWTRDQGPRAHSSPEPRACKAQSKAHKRRLRARSCRILEKQAQAHGSALLLALKGHDALGHQEEVPAAPVPRGTASRAAGFPAGQVPGSGMAALGGCPRGRAAGADPAQGVAPEMGLADVVAADPATASGSAVTAAGRWAFKKWHQRLAARSPRRGAASSPRPWSKPGPKGPESGQEAARAPRGWGLGAEHGAQLQL

SEQ ID NO: 337802 - DNA, 4422 bp, Artificial Sequence
  derived and/or modified sequence
atgaccagaatgagctgcccctggggcagctaccagtgggagcccggcgcctgccccgccgcccccagaggcatcggcggcggcgacatggccggcggcatccccgacgtgagaggcctgcaggaggccgccctgggcgccggcagaagccaggaggaggccagactggtggaggaggcccagacccccgtgatgctgccccaggacagcggccagagagtggaggaggtgcccggcgacctgatggccaagagaatgagcctgatcctgcacgtgcagaagctgccctgggaccacgtgccctgcctgagaagaaccagacagaacctgtaccaggacgtgggcggccacgcccacggcagcggcctgggcggcgccaagagaggcgccgccagaagcgccctgagaagacccctgccccccgccacctgcagacccgccggcatcgtgagcggccccagccccagactggacagcaaccccaccggcgcccacctgatcaagcagaccagacccctgaccgtggagtggaccaaggacacccccgtgcccgagcccatggagctgagaagcgacgccagccacaaggagaacgtgagccccaagcccgccgccctgcccaagcccggcaagagactgaagcagagaagattcagaagaagcctgggcatcggcctgagcggcagacacgaccagtgggtgcccggctgccaggtggagagaggcggccccgccgccacccccagccccggcgccgtgctggaccaggagccctgcagagtgcagaccaacctggccagccccggccccagactgggcctggccctgaaggacaccaccggccagctggtgaacagcagcttctggcagcagagcaacctgcagagcctggccagaagaagacagggcaaggccagagagttcgccatccagcagagcaacctgagcatcaacgagaccagcagcccccacctgtgccccgagcccggcggcagcagcggcccccacaagctgccctggggccccctgctgagccaggagcccctggccagacccagcagctgcctgagacagagcggcctgcccgcccccggcacccccagcggcgacttcagacccaccgaggccttcgcccccctggacggccacacccagcccggcctgagaagctggggcggcctgggcagctggagaagcagactggtgggcgagcccctgaccctggaggacctggccgtgcccagccagaaccagacccaggcccccagcagagccgccgtgcaccagctgctggccagcgtgcactgcctggcccaggaggccgccagactgagatgccaggccccccaggagccccccgcctggggcgtgagccccaagcagaagggcgaggagggcgcccccagagagagagtgcacagagaggaggagagaaccgccttccacctgagcgacaccgtgcccgccagcagcgccagcaagaacaaggcccagaacatcaccgcccccgagagcgaggccatctgctggcagctgctgagcagatgcttcagaagctggagacacctggtgaagagacagagagagcccgccgccgccgccgtggccctgggcagatggcagctgctgagaaagtgcctgcaggccctgtggctgagagaggcccagctggaggccgcctggggccagtacaccaaggtgctgctggtgagaagcttcagagaggtgagcggcctgcaggtgggccccggcggcagagtgaagcagtgccccggcagcctgagagaggaggagatcgcccagagactgctgagccaccccagacagagaaccgacagcagacacgagagagtgcagatcctgcaggccctgcagctggccgtgttcttcctgtggtgccagcagaagaagagagccagacaggagagagagaccctgagaaaggccaccagagccacccagagaaccggcagcttcccccaggcctggcacagcaccgccgccggcgtggcctgggtggcccccctgagcccccagcaccagagagcctggctgtgcagatgcttcggcgcctggcagcagttcgtgcagagaggcagcagatacagagaccacctggccgacagaagaaccggcaccctgagaaagtgcctggagcagtgggtgagaatgaagcagctgagagagagcgacggcgccaaggtgacccagctgagcctgtgcagacagaaggccggcagagaggccgtgtacaccgccggccccggcgcctgcggcctgggcgccgtgggccaggcccagggccagcaggagcagggcagaggcagcctgcaggacgcctgctggaccctggccctgtgctgggccctgctgctgtggaagatgagactgttccagagacagtgggccaacagcttcttccagggcctgcagcagagaatgctgcagagaagcctgagatggtggcacctgagagccctgggccccgacgccaccagcagctgcaccaagacccccagcgccctggagcccctgagcagcagcaccctgcaggacagcctggagaaggtgcccagagcccccaccctgcccgacaccctgcagggcagcctgctgtgggccgccggccagagacagcagggccagtgcctgctgctgtggcaggccagagcccagcagttccagggcaccgccagatggtaccagcacaccagacagagaagaatcttcctgagctggagcagatgggccaccgcccagtgggcctggagagagctggccagccacagagcctgggacagaacctgcagagccgtgctgggcctgtggagacagagactgctgcagagcagactggtggagtggtgggcccaggagagaggctggagactggccagagacgccctgtgccactggcacagctgctggcagggccagcagttcctgcacgagaagtgccagacctgggtgcaggtgcacctgcagggcctgcagaaggtggtgttcagaagctggcagcaggccgccgcccaccagagatgcaccgtgaccagacccgagcagctgctgctgcagagctacttccaggcctggtgcgaggtggtgagagacaccggcgtgctgagagcccagcaccaggccttccaggacggcctgagaagaagagccctgggcgccgtgttcgccacctggagagaggcccaggaggtggccgccggcgcccaggagcagagagtggcccaggccagcctggccagatggagaagctgcggccagcagggccaggaggacggccagcagaagaaggccagagccccccaggccttccccgcctggcccgtggcccccggcatgcaccacgaggcccagcagcaggccggcgagagcgccggcgcccaggccgcccagtgctggacctggtgctgggccctgtgggtgcacgagagctgcagaggccaggtgagcagagcccacgccagctggaagcccagagcctgggtgctggaggccagcgtgcagagcgccgtgagaggcggcgtgcagagagccatcctgacccagctgagacccgccgagctgagaagattcctgagaaccgtgcagctgagagtgagactgggcctgcccggcgccggcaagaccagaagctgctggacccaggccaccgagctggtgccccccgcccccagcctgcagtgcagcctgggcggcagaagaaagcccagaggcaccgcctgggcccagagatgcagagagcacagcctgtgccccgccttccagctgtggccccagtggcccggccagagcagctgggtgcccggcctgcccctgtggaccagagaccagggccccagagcccacagcagccccgagcccagagcctgcaaggcccagagcaaggcccacaagagaagactgagagccagaagctgcagaatcctggagaagcaggcccaggcccacggcagcgccctgctgctggccctgaagggccacgacgccctgggccaccaggaggaggtgcccgccgcccccgtgcccagaggcaccgccagcagagccgccggcttccccgccggccaggtgcccggcagcggcatggccgccctgggcggctgccccagaggcagagccgccggcgccgaccccgcccagggcgtggcccccgagatgggcctggccgacgtggtggccgccgaccccgccaccgccagcggcagcgccgtgaccgccgccggcagatgggccttcaagaagtggcaccagagactggccgccagaagccccagaagaggcgccgccagcagccccagaccctggagcaagcccggccccaagggccccgagagcggccaggaggccgccagagcccccagaggctggggcctgggcgccgagcacggcgcccagctgcagctgtag

SEQ ID NO: 337803 - DNA, 4422 bp, Artificial Sequence
  derived and/or modified sequence
atgaccaggatgtcttgcccctggggctcttaccagtgggagccaggcgcctgcccagcagccccgaggggtatcggaggaggtgacatggcaggcgggattccagacgttcgagggctgcaggaggccgcattgggagctgggcgatctcaggaggaggcccggctcgttgaagaggcccagactccagtcatgctgccccaggacagcgggcaacgagtggaagaggttcccggcgatctaatggctaaacggatgtcactgatcctccacgtgcagaagctaccctgggaccacgtgccctgcctccgacgtactagacagaatttgtatcaggacgtcggggggcacgcccacggtagtgggcttggaggtgctaaaaggggagcagccaggtcagcattgcgcagaccattgcctccggcaacttgccgaccagccggaattgtttccggaccatctcctagactggactctaaccccaccggtgctcacttgatcaagcagacacgccccctcaccgtggagtggacgaaagatacccccgtgcccgaacctatggagctgcgatccgatgcttcgcacaaggaaaatgtcagccccaagcctgctgcccttcctaaacctggcaagcgtttgaaacagaggcggtttaggagatcgcttggcatcggcctctcaggacggcatgatcagtgggttcccggatgtcaagtggagagaggtggccctgcggccacaccttctccaggagccgtgctcgaccaggagccatgccgagttcagacaaacctagcctcacccggccctcgtctgggattggccctgaaagatactacggggcagctcgtgaactcttcattctggcagcagtctaatctgcagtcacttgcgcgacgccgccagggtaaggcccgcgaatttgcaatacaacagtccaacttgagtatcaacgagacctcctccccgcatttgtgtccagagcctggcggcagcagcggcccccacaagctgccttggggccccctgctaagtcaagagccgctggcgagaccctcctcctgcttgagacagtccggtctgcctgcaccgggcaccccctcaggcgattttcgacccacagaggcctttgccccactggacggccacacacaacccgggcttcgaagctggggagggctcgggtcgtggagaagccggttagtaggtgaaccattaaccttagaggacttagcggtgccttcccagaatcaaactcaagccccaagccgagcggcagtgcaccaactcctggctagtgtgcattgcctcgctcaggaagccgctaggctcagatgtcaggccccacaggagcccccagcatggggggtttcaccaaagcagaaaggggaagagggcgccccgcgggaaagagtccatcgggaggaagagcgcaccgcattccatttgagtgatacagtcccagcttcgtctgcctcaaaaaataaggcccaaaacattacagctcccgaaagtgaggcgatctgttggcagttgctcagccggtgttttcggtcatggcggcatctggtgaaacgtcaacgggagcctgcggcagctgcagttgcccttggacggtggcagcttcttaggaagtgcctgcaggccttgtggctcagggaggctcagttagaagctgcgtgggggcagtacactaaggttctcctcgtgcgtagttttagagaggtgagcggcctgcaggtgggccccggggggagggtaaagcagtgcccgggcagcctccgagaggaggagatcgctcagcgactgctgtcgcaccctagacagaggacggactcccgccatgaaagggtccagatactgcaagccctgcagctggcggtatttttcctctggtgccagcagaagaagcgcgctcggcaagagcgcgaaaccctgcggaaagcgacaagagccacacaacggacaggctctttcccccaggcatggcactcgacagccgctggcgtcgcttgggtggctcctctctccccccaacaccagagggcctggctctgtagatgctttggggcgtggcagcagtttgttcagcgaggctctcggtatcgcgatcacctggctgacaggcgtaccgggacgctgcgcaagtgtttagaacagtgggtccgcatgaagcaacttagggaatcagacggggccaaggtgacacagctctcgctctgtcgacagaaggcaggacgtgaggccgtctacacagcaggcccaggcgcatgtggccttggagcagtgggtcaggcgcagggccaacaggagcagggccgaggctctttacaggacgcgtgttggaccctcgcgttgtgttgggcgttgttgctatggaaaatgcgcttatttcaacggcagtgggcaaacagcttctttcaagggttacagcagagaatgctgcagagatcactgcgatggtggcatcttagggctcttgggccagatgccacctccagctgcacaaaaacaccctcagccctggaacctctatccagtagtactttgcaagactctttagagaaggtaccacgagctccaactctccctgacaccctccaagggtcactgctttgggctgctggtcaacgtcaacagggacaatgcctcctactgtggcaggccagagcgcagcagtttcaggggaccgcacgctggtaccagcacactcgtcaacgtagaatcttcctgagctggtctcgctgggccactgctcagtgggcatggcgcgagctggccagccaccgggcgtgggaccgaacatgtcgggccgttctgggcctgtggagacagcggctactgcagagccggttggttgaatggtgggcacaagagagaggatggaggttggctagggacgccttatgccactggcacagttgctggcaaggccagcagtttctgcacgagaaatgccagacctgggtccaggtacacttacaagggttacaaaaagtggtgttccgctcatggcaacaggccgccgcccaccaaagatgtactgtcacaagaccagagcaactacttctccagagctatttccaggcttggtgtgaggtcgtgagggacactggcgtgctcagggcccagcaccaggcgtttcaggacggacttcggcgccgcgctcttggcgccgtatttgctacatggcgcgaggctcaagaagtggcagccggagcccaggaacagcgcgtcgcacaagcgagtcttgcccgttggcgctcctgtggccagcaggggcaggaagacggtcagcaaaagaaggcccgcgcacctcaggcatttcctgcctggcccgtggcacccggcatgcatcacgaggctcaacagcaggcaggcgagagcgccggcgcacaagctgctcaatgttggacctggtgctgggctttgtgggtgcatgagagctgcaggggccaggtgtcacgagcgcatgccagttggaaacctagggcgtgggtgctggaggcctcagtccagtctgctgtgcgaggcggcgtgcagcgggcgatcctgacgcagttgaggcctgctgagctgcgccggttccttcggaccgtgcagctaagggtcaggcttgggttacccggcgccggaaagacgcggtcctgctggacacaggctaccgaactggtgccccctgcgcccagcctgcagtgctctctgggcggacgaagaaagcccaggggcacggcttgggcccagcgctgcagagaacattctctttgtccagcctttcaactatggccccagtggcccggccaatctagctgggtgcctggcctgcctttgtggacacgcgatcaaggaccacgagcacatagttctcccgagcccagagcatgtaaggcacaatctaaggcacacaaaaggaggctgcgggccaggtcctgtcgcattttagaaaagcaggcccaggctcacggctccgccttactgctggcattgaagggccacgacgcacttggtcatcaagaggaggtgcccgccgcacctgtgcccaggggaaccgcttcacgggccgcagggtttcccgccgggcaggtccctggcagtggaatggcagccttgggtgggtgtcccagggggcgagctgcgggggcagacccagctcagggtgttgccccagagatgggactggccgatgtagtcgccgccgacccagcgacggcctctgggtcggcagtgactgctgccgggcgttgggcctttaaaaaatggcaccagcgtcttgccgctcggtcgcccagaaggggagcagcaagttccccccggccctggtccaagcctggtcctaaaggccctgagagtgggcaggaagccgcaagagcaccacgtggatgggggcttggcgccgagcacggggcccaattgcagctctag

SEQ ID NO: 337804 - DNA, 4422 bp, Artificial Sequence
  derived and/or modified sequence
atgaccaggatgagctgcccctggggcagctaccagtgggagcccggggcctgcccagctgccccccggggcattggaggaggagacatggccggcggcatcccagatgtgcggggcctgcaggaggccgccctgggcgccggccgcagccaggaggaggcccggctggtggaggaggcccagacccctgtgatgctgccccaggacagcggccagagggtggaggaggtgcctggggacctgatggccaagaggatgagcctcatcctgcacgtgcagaagctgccctgggaccacgtgccctgcctgcggaggacccggcagaacctgtaccaggatgtgggcggccacgcccacggcagcggcctgggcggggccaagagaggagctgcccggagcgccctgcggcggcccctgcccccagccacctgcaggcctgctggcatcgtgtctggccccagcccccggctggacagcaaccccaccggggcccacctgatcaagcagacccggcccctgactgtggagtggaccaaggacacccctgtgcctgagcccatggagctgcggagtgatgccagccacaaggaaaatgtgagccccaagccagctgccctgcccaagccaggcaagaggctgaagcagaggcgcttcagaagaagcctgggcatcggcctgagcggcagacatgaccagtgggtgcccggctgccaggtggagcggggcggccctgctgccacccccagccctggagctgtgctggaccaggagccctgccgggtgcagaccaacctggccagccctggcccccggctgggcctggccctgaaggacaccaccggccagctggtgaacagcagcttctggcagcagagcaacctgcagagcctggcccggcggcggcagggcaaggcccgggagtttgccatccagcagagcaacctgagcatcaatgagaccagcagcccccacctgtgcccagagcccggcggcagcagcggcccccacaagctgccctggggccccctgctgagccaggagcccctggcccggcccagcagctgcctgcggcagagcggcctgcctgcccctggcacccccagcggggacttccggcccacagaggcctttgcccccctggatggccacacccagcccggcctgcgctcctggggcggcctgggctcctggaggagccggctggtgggggagcccctgaccctggaggacctggccgtgcccagccagaaccagacccaggcccccagcagagctgctgtgcaccagctgctggcctctgtgcactgcctggcccaggaggccgcccggctgcgctgccaggccccccaggagcccccagcctggggcgtgagccccaagcagaagggggaggagggcgccccccgggagcgggtgcaccgggaggaggagaggacagccttccacctgagtgacacagtgcctgccagcagcgccagcaagaacaaggcccagaacatcacagcccctgagagcgaggccatctgctggcagctgctgagccgctgcttccgctcctggaggcacctggtgaagaggcagcgggagcctgctgctgctgctgtggccctgggccgctggcagctgctgaggaagtgcctgcaggccctgtggctgcgggaggcccagctggaggccgcctggggccagtacaccaaggtgctgctggtgcgctccttccgggaggtgtctggcctgcaggtgggccctgggggccgggtgaagcagtgccccggcagcctgcgggaggaggagatcgcccagaggctgctgagccacccccggcagaggacagacagcagacatgagcgggtgcagatcctgcaggccctgcagctggccgtgttcttcctgtggtgccagcagaagaagagggcccggcaggagcgggagaccctgaggaaggccacccgggccacccagaggacaggcagcttcccccaggcctggcacagcacagctgctggggtggcctgggtggcccccctgagcccccagcaccagagggcctggctgtgccgctgctttggagcctggcagcagtttgtgcagaggggcagccgctacagagaccacctggccgacagaagaacaggcaccctgaggaagtgcctggagcagtgggtgaggatgaagcagctgcgggagagtgatggagccaaggtgacccagctgagcctgtgccggcagaaggccggccgggaggccgtgtacacagctggccctggggcctgtggcctgggcgctgtgggccaggcccagggccagcaggagcagggccggggcagcctgcaggatgcctgctggaccctggccctgtgctgggccctgctgctgtggaagatgaggctcttccagaggcagtgggccaacagcttcttccagggcctgcagcagaggatgctgcagaggagcctgcgctggtggcacctgcgggccctgggcccagatgccaccagcagctgcaccaagacccccagcgccctggagcccctgagcagcagcaccctgcaggacagcctggagaaggtgccccgggcccccaccctgcctgacaccctgcagggcagcctgctgtgggccgccggccagaggcagcagggccagtgcctgctgctgtggcaggcccgggcccagcagttccagggcacagcccgctggtaccagcacacccggcagaggcgcatcttcctgtcctggagccgctgggccacagcccagtgggcctggagggagctggccagccaccgggcctgggacaggacctgcagagctgtgctgggcctgtggaggcagaggctgctgcagagccggctggtggagtggtgggcccaggagcggggctggaggctggccagagatgccctgtgccactggcacagctgctggcagggccagcagttcctgcacgagaagtgccagacctgggtgcaggtgcacctgcagggcctgcagaaggtggtgttccgctcctggcagcaggccgccgcccaccagcgctgcaccgtgaccaggcctgagcagctgctgctgcagagctacttccaggcctggtgtgaggtggtgcgggacaccggggtgctgcgggcccagcaccaggccttccaggacggcctgcggcggcgggccctgggcgctgtgtttgccacctggagggaggcccaggaggtggccgccggggcccaggagcagagggtggcccaggccagcctggcccgctggaggagctgtggccagcagggccaggaggatggccagcagaagaaggcccgggccccccaggccttccctgcctggcctgtggcccctggcatgcaccacgaggcccagcagcaggccggggagagcgctggggcccaggccgcccagtgctggacctggtgctgggccctgtgggtgcatgagagctgccggggccaggtgtcccgggcccacgcctcctggaagccccgggcctgggtgctggaggcctctgtgcagagcgctgtgcggggcggcgtgcagagggccatcctgacccagctgcggcctgctgagctgcggcgcttcctgaggacagtgcagctgcgggtgcggctgggcctgcctggagctgggaagaccaggagctgctggacccaggccacagagctggtgcccccagcccccagcctgcagtgcagcctgggcggccgcaggaagccccggggcacagcctgggcccagcgctgccgggagcacagcctgtgcccagccttccagctgtggccccagtggccaggccagagctcctgggtgcccggcctgcccctgtggacccgggaccagggcccccgggcccacagcagccctgagccccgggcctgcaaggcccagagcaaggcccacaagaggcggctgcgggcccggagctgccgcatcctggagaagcaggcccaggcccacggcagcgccctgctgctggccctgaagggccatgatgccctgggccaccaggaggaggtgcctgctgcccctgtgccccggggcacagccagcagagctgctggcttccctgctggccaggtgcccggcagcggcatggccgccctgggcggctgcccccggggccgggctgctggagctgaccctgcccagggcgtggcccctgagatgggcctggctgatgtggtggccgctgaccctgccacagccagcggcagcgctgtgacagctgctggccgctgggccttcaagaagtggcaccagaggctggccgcccggagccccaggagaggagctgccagcagcccccggccctggagcaagccaggccccaagggccctgagagcggccaggaggccgcccgggccccccggggctggggcctgggcgctgagcacggggcccagctgcagctgtag

SEQ ID NO: 337805 - DNA, 4422 bp, Artificial Sequence
  derived and/or modified sequence
atgacccggatgagctgcccctggggcagctaccagtgggagcccggagcctgcccagcggcaccgcgcggcattggcggcggcgatatggctggaggaattcctgatgttcgcgggcttcaggaagcggcccttggtgctggcaggtctcaggaagaggcgaggctggtggaagaggctcagacccccgtcatgctgccacaagacagcgggcagagggtagaggaggtgccgggagatctgatggcgaagcgtatgagtctcatactgcacgttcagaagctcccctgggaccacgtcccttgcctgcgaaggacgcggcagaacctgtatcaggatgtaggaggacatgctcatggctcgggactgggcggggctaagcgtggtgccgcccggtcagcactcagacggcccctaccaccggccacctgcagacctgccggaattgtgagcggaccctcccctcgacttgactcgaaccccacaggagcacacttgatcaagcagacacggcccctgacagtggaatggactaaggatacacccgtgcccgagcctatggaactgcgctccgacgcttcacacaaggagaacgtaagccctaagcccgctgcacttcctaagccagggaaacggttgaagcagcggcgtttccgaaggagcctagggatcggtctcagcgggcggcacgaccagtgggtgccagggtgccaagtcgagcgcggggggcccgcggccacaccatctccgggagccgttctggatcaggaaccatgccgggtccagacaaacctcgcctcaccaggaccaaggctcggcctcgctttaaaggacaccacagggcaactggttaacagttctttttggcaacagtctaacctccaatcccttgcccgaaggagacagggaaaagcacgggagttcgccatccaacaatctaatctgagtattaatgaaacgtcatccccgcacctgtgtcctgagcccggcggctcgtccggccctcacaaactaccctgggggcctctcctgtcccaggagccgttggcaagaccatcgagttgccttagacagtccggcctcccggcacccggtaccccctccggtgactttcgtccaactgaggcattcgctcctcttgacggacatacgcaaccaggtctgagatcctggggaggactcggaagctggcgctctcgcctggtcggtgagccactcacccttgaggatcttgctgtgccatcacaaaatcagactcaagccccgtcccgggctgctgtgcatcagctccttgccagtgttcactgtttggcacaggaggctgctcggttacggtgtcaggctcctcaggaaccccctgcgtggggggtttctccaaaacagaaaggagaggaaggtgcacccagggagagagttcatagagaggaggagcgaacagcatttcacctgagtgacactgttcccgcgtcctcagcctcaaagaacaaagctcagaatatcaccgcccccgaatccgaggctatttgttggcagctgctgagtcgctgcttcaggtcttggaggcatctcgtgaagcggcagcgagaacctgccgccgccgccgtggccctcggtcgttggcagctactgagaaagtgtctacaagctctgtggctgcgggaggcccagctcgaagcagcttgggggcaatacaccaaggtcctgttggtccgtagcttcagggaggtgtccggcctccaagtgggacccggcggccgggtaaagcaatgcccaggaagtctccgggaggaggagatcgcccagcggcttttaagccacccacggcagagaaccgactctaggcacgaaagagtccaaatattgcaggcactgcagcttgcggtattttttctttggtgtcaacaaaaaaagcgggctcggcaggagcgagaaacactcaggaaagccactagagctacacagaggactgggagcttccctcaagcttggcattccactgcggccggggttgcgtgggttgctccactttcaccccagcatcagcgcgcatggttgtgtagatgtttcggcgcctggcagcagtttgtgcaaaggggctctaggtaccgtgatcacctggcagatcgaaggaccggtactctgcgcaaatgtctggaacagtgggtccgtatgaagcagctccgagaatcagacggtgccaaagtgacccagttatcgctatgtcgacagaaagccggccgcgaggcagtgtataccgccgggcccggagcatgcggcttgggggcggtcggtcaggctcaggggcaacaagaacagggcagaggctcacttcaggacgcttgttggaccttggcactttgctgggcactgcttttatggaaaatgcggctcttccagcgacagtgggccaactcttttttccaggggctacaacagaggatgctccaacgctctcttcgctggtggcatcttcgagccctaggaccagatgctactagtagttgtacaaagaccccaagtgccctggagcccctttcctcttccacactgcaggattcgctggaaaaagtacccagggcgccaaccctgcccgacacccttcaaggatccctgctctgggccgctggccagagacagcagggccagtgtctgctcttgtggcaggctcgggcccagcagtttcagggcacagcaaggtggtatcagcataccaggcaacgacgcatcttcctgtcctggtcccgttgggcaactgcacagtgggcgtggcgagagctagcttcccatagggcatgggacaggacatgtcgcgccgtgctagggttgtggcgccaaaggctgttgcagtcacgtcttgttgaatggtgggctcaagagagggggtggcgccttgcccgggatgccctgtgccattggcactcttgttggcagggccagcagtttctccacgaaaaatgtcagacatgggtacaagtccacctgcaaggccttcaaaaggtggtattccggagttggcagcaggccgcggcccatcagcgctgtaccgtgacacgccctgaacagttgctgctacagtcatattttcaagcttggtgtgaggtcgtgagagacaccggcgtcctgagggcccagcatcaagctttccaggatggcttacgtaggcgggccctcggagcagtgtttgctacttggagggaagctcaggaggtggccgccggagcccaggagcagagggtggctcaggctagtctcgcccgttggcgctcttgtggccagcaggggcaggaagatggccagcaaaagaaagcccgcgcgcctcaggcttttccggcttggccagttgctccaggcatgcaccacgaggctcagcagcaggctggggagtcagctggggcccaggcggctcagtgttggacctggtgttgggcgctgtgggtgcacgagagctgtaggggacaggtgagccgcgctcacgctagctggaagcctcgagcatgggtcctggaagccagcgtgcagtctgccgttcgaggtggagtgcagagagctatactaacacaacttaggccagccgaactacggcggttcttaagaaccgtgcagcttagggtccggcttggactgcccggagccggcaaaactaggtcctgttggacccaggctactgaactggtcccccctgcgccgagcctgcagtgttccctgggcggacgacggaagcccagggggacggcatgggcccagaggtgtagggagcacagtttgtgccccgctttccaactgtggccccagtggccgggacagtcatcttgggtgcccggtctgcccttgtggactcgagatcagggaccccgagcccactcctccccggaacccagggcttgcaaggcccagtctaaggcccacaaacgccgcctgcgcgcccggtcatgccgcatcctggaaaaacaggctcaggcgcacggttccgctctccttctcgccctgaaaggacatgacgctctgggccaccaggaagaggtgcccgctgcaccagttccccgagggactgcctctcgggctgctggcttccccgctggtcaagtgccaggttcaggcatggctgctctggggggatgcccaagagggcgtgccgcaggcgccgacccagcgcagggcgtcgcccccgagatgggcttagctgacgtcgtcgcagcggatcccgcaacggcctcagggtctgcagtcaccgcggcgggcagatgggcattcaaaaagtggcatcaacgactagccgctaggtcgcctaggaggggagcagcatctagccccaggccatggtccaaaccaggtccgaaaggtccagaatcagggcaagaggccgccagagccccccgggggtggggcctcggtgctgaacatggcgcgcagctccagctctag

SEQ ID NO: 337806 - DNA, 4422 bp, Artificial Sequence
  derived and/or modified sequence
atgacaaggatgagttgcccttggggaagttaccagtgggagcccggtgcctgccccgctgcgcctcggggaatcgggggtggggatatggccggtggaatcccagatgtaaggggcctacaggaggccgcactcggggcaggccgatcccaggaggaggctcggctcgtcgaggaggcccagactcctgtgatgctgccgcaggattctggtcagcgcgttgaggaggtgcctggagatctgatggcaaaaagaatgtctctcatcttgcacgtccaaaagctgccatgggatcacgtcccatgtctccgcagaacacggcagaacctgtaccaggacgttgggggacatgcccacgggtctggtcttggcggagctaagcgcggagccgctagatccgcactcagacgtcccctccctccggctacatgtcgaccagcgggaatagtttccggaccaagtccgcgactggatagtaacccaacaggcgctcatctgatcaaacagacccggccactgaccgtggaatggactaaagacacacccgtccccgagcctatggaactgcggtccgacgcctctcacaaggaaaatgtgtcccccaaaccagcagctttgcctaaaccaggcaagcggctgaagcaacgacggttccgcagaagcctgggcattggactcagcgggcgacacgaccagtgggtccctggctgtcaagtggaacgcggtggccctgctgcgacgccatcacccggagccgttttggaccaggagccctgtagggttcagacgaatctagcctcccctggacctaggctcggcctggcactcaaggatacaacgggacagcttgtgaattcatctttctggcagcagtcaaacctacagtcgctggcacgacggagacaggggaaggcacgcgagttcgccatacagcagagcaatctatctatcaatgaaactagcagtccccacttatgccctgaacctggcggaagttcgggcccacataagcttccctgggggccactgctaagccaggagccactggcgagaccttcttcttgcctgcgacagagtggtttgccagcgccaggcaccccaagcggcgatttccgcccaaccgaagcgtttgctcctctcgacggtcacacccagccgggactgagatcctgggggggacttggctcttggagatcccggctggtaggggaacctctgactttggaggacttggccgtgccttcacagaatcaaactcaggctcctagcagggccgcagttcatcagctcctggctagcgtgcattgcctggcccaagaagctgctcgcctgcgatgtcaggcaccacaggagccgcctgcctggggggtgtcaccgaaacagaagggagaggaaggtgctccaagggagagggtgcacagggaggaggagcggacggcctttcacctgtctgataccgtgcccgctagctcagcatccaaaaacaaggctcagaatataactgcacctgaatctgaggccatttgttggcagcttctctcccggtgcttcagatcctggcggcatctagtcaagagacaacgcgagcctgccgcagctgctgtggcccttggaaggtggcagctcctcaggaaatgtctgcaggcactctggttgcgggaagcgcagctcgaggcagcctggggacagtatactaaagtgcttctggtaaggtcctttcgcgaagtgagcgggctgcaggtgggacccggaggccgtgtcaaacaatgccccggtagtctacgcgaagaagagatcgctcaacgtttgttgagtcaccctcggcagcggactgattcccgtcatgagcgtgtgcaaattcttcaggctttgcagttggctgtgttttttctgtggtgtcaacaaaagaagcgggctcgccaggaacgagagacattacgtaaagccacaagagctacacagcgaactggctctttccctcaggcttggcatagcaccgcagcgggagtggcttgggtggctcccctgagtccccagcatcagagggcttggctgtgccggtgcttcggcgcatggcagcagtttgttcagagagggagccgctaccgagaccacttggccgaccggaggacagggacactccggaagtgcttggaacagtgggtaaggatgaagcagctgagagagtccgacggggctaaagtgacccaattatctctttgccgacagaaggctgggcgagaagccgtctacacagctggcccaggggcatgtgggttgggagcagtaggtcaagcccagggacagcaggaacaaggccgtggaagtttgcaagatgcgtgttggaccctggcactgtgttgggccctgctgctctggaagatgcggctctttcagagacagtgggctaattcctttttccagggcctccagcaaaggatgcttcagcgctctttacggtggtggcacctgagggcattgggaccggacgctactagctcgtgtaccaagaccccaagcgccctcgagccgctgagcagctccacgcttcaggacagccttgaaaaagtgcctcgcgctccaacccttccggatactctccaaggaagcctgctctgggccgctggccagaggcagcagggccagtgcttactgctgtggcaggcccgagcacagcagttccaagggacagccagatggtaccagcataccaggcagaggcgaattttcctgtcctggagtcgctgggctacagcacagtgggcctggcgggagctggcctctcatcgtgcttgggatcgaacgtgtcgcgctgttcttggactgtggcggcagcgtctgctgcagagcaggctggtcgaatggtgggcccaggagcgagggtggaggctcgcgagagatgcactgtgccattggcatagttgttggcagggacagcagttcctgcatgagaaatgtcagacttgggtccaggttcacttgcaggggctgcaaaaagtcgtctttcggtcctggcagcaggccgcagcccaccaaaggtgcaccgtgacacgccctgaacagctgctcctgcagtcatacttccaggcttggtgtgaggtggtgagagacacaggtgtgttgcgcgcacaacatcaggccttccaggacggattaaggcgaagggcgttaggcgctgtcttcgctacttggagagaagcacaggaagtagccgctggtgcccaggaacagcgcgtagcccaggcatccctggcaaggtggcggagctgcgggcagcagggccaagaggacggtcagcaaaagaaggccagagcaccgcaggcattccccgcatggccggtggcccctggcatgcatcatgaagcccagcagcaggcgggagaaagcgcaggggctcaggccgcacagtgctggacatggtgttgggcgttgtgggtccatgagagctgtcgtggccaggtgtctagagcccacgcctcttggaagccgagagcctgggttctggaagcctctgtccagtcggccgtgaggggcggagtacaacgtgctattttaacccaacttcgccctgcggagttgcggaggtttctccgaacagttcagctgcgcgtgcgcctgggccttccaggagccggaaagacgcggagctgctggacccaagcaaccgagctggttccacccgctccgagtcttcagtgttccctggggggacggcgtaaacccaggggcactgcctgggcccagagatgtcgcgagcacagcctgtgcccggcttttcagctgtggccacagtggcccggacaatctagctgggtgccgggactgcccctgtggaccagggatcaagggcctcgtgctcactcctctcccgagcccagggcttgcaaagcccagagcaaggcccacaagaggaggctgcgcgctcgatcttgccgaattctcgaaaaacaggctcaggcccacggatctgctcttttgttagcactgaagggacatgacgcgctggggcatcaggaggaagtgccagccgcaccagtccctcgaggaaccgcctcgagagcagccggatttccagccggtcaggtacctggttccggtatggctgctctgggaggatgtccgcgaggacgcgctgccggtgctgatcccgctcagggcgttgcacctgaaatgggtctcgcggatgtggtggctgccgatcctgcaaccgcaagcgggtctgctgtcacagcagctggacggtgggcattcaagaagtggcatcagcggctggcggcacggagccccaggcgaggagctgcaagttcccctagaccttggtctaagccagggcctaaggggccagagagcggacaggaggctgcccgagcgcctcggggttggggattgggggcagagcatggggctcaactacagctgtag

SEQ ID NO: 337807 - DNA, 4560 bp, Artificial Sequence
  derived and/or modified sequence
atgacccggatgtcctgcccctggggttcctaccagtgggagccgggggcatgtcctgcagccccaagaggcataggtggtggggacatggctgggggtatcccagatgtgcgggggctccaggaggcagctctaggtgcgggaaggagccaagaggaggcacgcctggtggaggaagcccagaccccagtgatgctgccacaggattcggggcagagggtggaggaggttcccggggacctgatggccaagagaatgtcgctcatcttgcacgtgcaaaagttgccctgggaccacgtgccttgcctgcggaggacccggcaaaacctgtaccaggacgtcggtggccacgcccacggctcagggctgggcggggccaagcgcggggcagcacgctctgctctccgacgtcccctcccgcccgcgacctgccgacctgcggggatcgttagcggtcccagcccccgtctagattcaaatccgactggggcccatctgattaaacagaccaggccactcactgtggagtggaccaaggatactcctgtccctgagcccatggagctaaggtctgatgccagccacaaggagaatgtgtccccaaagcctgcagcgctcccgaagccaggcaagaggcttaagcaacgaagattccggaggagcctgggcatcggcctgagtggtagacatgaccagtgggtgcccgggtgccaggtggagaggggagggcctgctgccacaccctccccaggggcagtgctagaccaggagccctgccgagtccagaccaacctggccagccctggtccccgcctgggcctagctctgaaggacacgactggccaactggtcaattcaagcttctggcaacagagcaacctgcagtccctggccaggaggcgccaagggaaggcccgagagtttgccatccagcagagcaacctgagcatcaacgagaccagcagcccccacctctgcccagagcctgggggaagctctgggccccacaagcttccctggggtcctctcctatcccaagagccactggctcgcccatcttcctgcctgaggcagtccgggctgccggccccaggcacccctagcggggacttcaggcccactgaagcctttgcccctctcgatgggcatacacagccaggcctcagatcctggggtggtctggggagctggaggtccaggctggtgggggaacctctcaccctggaggacctggctgtccccagtcagaaccagactcaggccccatcccgtgctgccgtccaccagctgctggcttctgtacattgcctggcgcaggaggcagcccgactcaggtgccaggctccccaggaaccccccgcctggggagtctcacccaagcagaaaggagaggagggggccccgagggagcgggtccacagggaggaggagaggacagctttccatctgtcagacacagtcccagcgagcagtgcgtcgaagaacaaggcacaaaacatcacagccccagagtctgaggcaatctgctggcagctgttgtccagatgttttcgatcctggaggcacttggtgaagaggcagcgggagccagcggcggcggcagtggcactgggccgctggcagctgttgcgaaagtgccttcaggccttgtggctccgggaggctcagctggaggcagcatgggggcagtacacaaaggttctgctggtccggagcttccgagaggtcagcggtctccaggttgggccagggggccgtgtgaagcagtgtccaggaagtctgagggaggaggagattgctcagcggcttctgtcacatcctaggcagagaacagacagcagacacgagagagtccagatcctgcaggccctgcaactggctgtgttcttcctgtggtgccaacagaagaaacgggccagacaggagagggagactctgcggaaggccaccagggccacacagaggacagggagcttcccccaggcctggcactctactgctgcaggtgtagcctgggtggccccactgagcccccagcaccagagagcttggctgtgcaggtgcttcggggcgtggcagcagttcgtgcaaagagggtcccggtaccgagaccacctggctgaccgccggacggggaccctgaggaaatgcctggaacagtgggtgcggatgaagcagctccgggaatcagatggggcaaaggtgacccagctgtccctctgccggcagaaagcaggacgtgaggctgtctacaccgcaggccctggagcctgtggcctgggtgcagtgggccaggcccaggggcagcaggagcaaggccggggctccctgcaggatgcctgctggacactggccctctgctgggcgctgctgctgtggaagatgcggcttttccagcgccagtgggccaactccttcttccagggcctgcagcagcggatgctgcagcgcagcctgagatggtggcacttgagggcactgggcccagatgccacatcaagctgcaccaagaccccctcggctctggagccactgagcagcagcacactccaagactctctggagaaggttcccagggcccccaccctcccggacactctccaggggagccttctgtgggcagctgggcagcggcagcaggggcagtgccttctgctctggcaggcacgggcccagcagttccagggcacagccaggtggtaccagcatacccgccagaggcgcatcttcctcagctggagccgctgggcaacagcccaatgggcctggagagagctggcttcccaccgggcctgggatcggacctgcagggctgtgctgggcctgtggcgtcagcggctgctgcagtcacggctggtggagtggtgggcccaggagcggggctggcggctggcacgagatgccctatgccactggcactcctgttggcaggggcagcagttcctgcatgaaaagtgccagacatgggtgcaggtccacctccagggcctgcagaaggtggtgttccggagctggcagcaggcagcagctcatcagagatgcacagtgacccggccagagcagctgctactgcagagctacttccaggcctggtgtgaggttgtaagagacacgggggtgctccgggcccagcatcaagcctttcaggatggcctgaggagaagagcactgggggccgtgtttgccacatggcgggaagcccaggaagtggcagccggggcacaggagcagcgtgtggcccaggcctcccttgcccgctggagaagctgcgggcagcaaggccaggaagatgggcagcagaagaaggcccgggccccacaggccttcccagcatggccagtggccccgggcatgcaccatgaggcccagcagcaggcaggagagagcgctggggcccaggcagcccagtgctggacttggtgctgggctctgtgggtgcatgagtcctgtcggggccaggtcagccgagcccatgcttcctggaagccgcgagcctgggtcctagaggcctcggtgcagtcggcggtgcgcggcggtgtccagcgagccatcctcacccagctccggccggctgagctcaggcgcttcctgcggacagtgcagctcagggtgcggctgggactgccaggggccggcaagacccgcagctgctggacacaggccacagagctggtgcctcccgcgccatcactgcagtgcagcctgggtggacggaggaagccaaggggaacggcctgggctcagaggtgcagggaacattccctctgccctgccttccagctctggccacagtggcctggacagagtagctgggtcccaggcctgcccctgtggacgagggaccagggaccaagagcgcactccagccctgagcccagagcctgcaaagcccaaagcaaggcccataaacggaggctacgtgctcgttcctgcaggatcctggaaaagcaggcccaggcccatggctctgccctccttctggccctgaagggtcacgatgctcttggccatcaggaggaagtacctgcagcgccggtgcctcgaggcactgcttcacgggctgcggggttcccagcaggccaggtgcctggcagtggcatggcagcactgggtggatgcccaaggggcagagcagctggtgcggaccctgctcagggagtggcacctgagatgggcctggcagacgtggtggcagcggatcctgcgactgcgagtggctcagcagttacagcagcaggaagatgggcctttaagaagtggcaccaacgcctggcagccaggagcccaaggagaggagctgccagtagcccaagaccctggagcaagccaggccccaagggccccgagagtggacaggaagccgccagagcaccgcggggttgggggcttggggcagagcatggggcccagctgcagctgtgacttgttctcatagaataaaaaacagaactgaacttagccttcccagggaaggaaccatgccccacacatccagggagtgatgacagaggggacagcttgaagagctctgaaggacaataaaacccactcctcagtcct

SEQ ID NO: 337808 - protein, 243 aa, Artificial Sequence
  derived and/or modified sequence
RSDASHKENVSPKPAALPKPEQRRFRRSLGIGLSGRHDQWVPGCQVERGGPAATPSPGAVLDQEPCRVQTNLASPGPRLGLALKDTTGQLVNSSFWQQSNLQSLARRRQGKAREFAIQQSNLSINETSSPHLCPEPGGSSGPHKLPWGPLLSQEPLARPSSCLRQSGLPAPGTPSGDFRPTEAFAPLDGHTQPGLRSWGGLGSWRSRLVGEPLTLEDLAVPSQNQTQAPSRAAVHQLLASTLG

SEQ ID NO: 337809 - DNA, 753 bp, Artificial Sequence
  derived and/or modified sequence
atggcccacgtgggcaccagcagagtgggcagcgtgctgagcatgagcctgagcatccacctgctggtgcccaccatgaccaagggcgagaccggcaagcccggccaccacgaggcccccagaaccctgcaggccttcccctggacctgggccagagccagccccggcgtgagcgtggacatgagcgccggcctgccccagagcctgctgtgctggcccggcgcccccctgctgcccaccccccccctgcccagcgccacctacgtgggccacagcctgggcctgcccagagccggcagcagcgtgggcccctggttcagcggcagatgggtgggcggcgccctggtgcagtggcccctgggcggcggcggccccggcagcgtggccgccggcctgggcggccccctggtgagatggctgctgggcggcggcgccctggtgagatggcccctgggcggcggcggccccggcagcgtggccgccggctggggcggcccctggttcggcggcagatgggtgggcggcccccccggcagcgtggccgccggctggggcggccccgtgagatggcccctgggcggcggcggccccggcagcgtggccaccggctggggcggcccctggttcggcggcagatgggtgggcggcccccccggcagcgtggccgccggctgcggcggcgccctggtgcagtggcccctgggcggcggcagcctgcacagcatccccagcttccccagagcctggagatag

SEQ ID NO: 337810 - DNA, 732 bp, Artificial Sequence
  derived and/or modified sequence
agaagcgacgccagccacaaggagaacgtgagccccaagcccgccgccctgcccaagcccgagcagagaagattcagaagaagcctgggcatcggcctgagcggcagacacgaccagtgggtgcccggctgccaggtggagagaggcggccccgccgccacccccagccccggcgccgtgctggaccaggagccctgcagagtgcagaccaacctggccagccccggccccagactgggcctggccctgaaggacaccaccggccagctggtgaacagcagcttctggcagcagagcaacctgcagagcctggccagaagaagacagggcaaggccagagagttcgccatccagcagagcaacctgagcatcaacgagaccagcagcccccacctgtgccccgagcccggcggcagcagcggcccccacaagctgccctggggccccctgctgagccaggagcccctggccagacccagcagctgcctgagacagagcggcctgcccgcccccggcacccccagcggcgacttcagacccaccgaggccttcgcccccctggacggccacacccagcccggcctgagaagctggggcggcctgggcagctggagaagcagactggtgggcgagcccctgaccctggaggacctggccgtgcccagccagaaccagacccaggcccccagcagagccgccgtgcaccagctgctggccagcaccctgggctag

SEQ ID NO: 337811 - DNA, 732 bp, Artificial Sequence
  derived and/or modified sequence
aggtccgatgcatcacacaaagagaatgtctcacccaagccagctgcactgcctaagcccgagcaaaggcgctttaggaggtctctcggcattggactgtctggccggcacgaccagtgggtgccaggctgtcaggtggagcggggcgggccagccgcaaccccttcccctggcgctgtgctggaccaggagccttgcagagttcagacaaaccttgcatctcccggcccccgcctcggactggcccttaaggacaccaccggtcagcttgtaaattcaagtttttggcagcaaagcaacctgcagagccttgctcgtcgccgtcagggtaaggcccgtgagtttgctatccaacagtccaacctgtccataaacgaaacatcctccccccatctctgtcctgagcccggaggatcgtcagggccacacaaactcccctggggacctttactgtcccaggagcctttggccagaccttctagctgtctgcggcagagcggcttacctgcaccaggcactccttctggagacttcaggccgacagaggccttcgccccacttgacggtcacacgcaacctggtctgcgctcctggggggggctgggctcctggcgttcccggttagttggtgagcccctgaccctggaggaccttgcggtgccatcccagaaccagacccaggctccctcccgggcagccgtgcatcaactactcgcgagcacccttgggtag

SEQ ID NO: 337812 - DNA, 732 bp, Artificial Sequence
  derived and/or modified sequence
cgcagtgatgccagccacaaggaaaatgtgagccccaagccagctgccctgcccaagccagagcagaggcgcttccgccgcagcctgggcatcggcctgagcggcagacatgaccagtgggtgcccggctgccaggtggagcggggcggccctgctgccacccccagccctggagctgtgctggaccaggagccctgccgggtgcagaccaacctggccagccctggcccccggctgggcctggccctgaaggacaccaccggccagctggtgaacagcagcttctggcagcagagcaacctgcagagcctggcccggcggcggcagggcaaggcccgggagtttgccatccagcagagcaacctgagcatcaatgagaccagcagcccccacctgtgcccagagcccggcggcagcagcggcccccacaagctgccctggggccccctgctgagccaggagcccctggcccggcccagcagctgcctgcggcagagcggcctgcctgcccctggcaccccatctggggacttccggcccacagaggcctttgcccccctggatggccacacccagcccggcctgcgctcctggggcggcctgggctcctggaggagccggctggtgggggagcccctgaccctggaggacctggccgtgcccagccagaaccagacccaggcccccagcagagctgctgtgcaccagctgctggccagcaccctgggctag

SEQ ID NO: 337813 - DNA, 732 bp, Artificial Sequence
  derived and/or modified sequence
cggagcgacgccagccacaaggagaacgtgagccccaagcccgccgctctgccgaagcctgagcaaaggaggtttaggcggtccttagggattggtctatcaggaagacatgaccagtgggtgcctggttgccaggtggaaagagggggcccagcggctactccgtctccaggcgctgtgctggaccaggagccttgtcgcgtgcagaccaatctcgcatctcctggcccacgactgggactcgccctgaaggacacaaccggccagctggtgaactcctccttctggcagcagagcaacttgcagagtcttgcccgtagacggcaaggtaaagccagggagttcgcgatccagcagtctaatctttctatcaacgaaacaagctctccccatctgtgcccagagcccggtggcagttccggaccccataagttgccatggggcccactattgtcacaagaacctcttgccagaccctcgtcgtgcctcagacagtctggactgcccgcccctgggactcccagtggcgacttccggccgacagaagcttttgctccgcttgatggccacacccagccaggcctccggagctggggcggccttggaagctggcgatcacggctcgtgggcgagcctttaaccctagaagacctggctgtcccgtcccagaaccaaacacaggccccaagtcgagcagctgttcatcagctcttggcctcgaccttagggtag

SEQ ID NO: 337814 - DNA, 732 bp, Artificial Sequence
  derived and/or modified sequence
agaagtgatgcttctcacaaggaaaatgtgtcaccaaagccggcagcgcttccaaagcctgaacagaggcggttcagacggagcctgggcatcggcctttccgggagacatgatcaatgggtccccggttgccaggtggagcgcggaggccctgctgcaactccttcacccggagctgtgctcgatcaggaaccgtgcagggtccagacaaatctagcttctcccggacccagattgggactggctctcaaagacactacgggccagttagtcaactcgtctttctggcagcaatctaatctgcagtccctagctcgcagaagacaagggaaggctcgagaatttgcaatccagcagagtaatctttcaatcaatgagacctcctctcctcacctatgtccagaacccggtggcagctctggaccacataaactgccatggggcccactgttgtcacaggaaccactggcacgcccaagttcgtgtcttcggcagtccgggctgcctgccccagggaccccatccggagatttccggccaaccgaagcctttgcacctctagatggccacacccaacctgggcttaggtcctggggagggctggggagttggcgatcaaggctggtgggagagccactgactctggaggatctcgccgtccctagccagaaccagactcaggccccaagcagggcagcagtacatcaactgctcgctagcacacttgggtag

SEQ ID NO: 337815 - DNA, 734 bp, Artificial Sequence
  derived and/or modified sequence
agctaaggtctgatgccagccacaaggagaatgtgtccccaaagcctgcagcgctcccgaagccagagcaacgaagattccggaggagcctgggcatcggcctgagtggtagacatgaccagtgggtgcccgggtgccaggtggagaggggagggcctgctgccacaccctccccaggggcagtgctagaccaggagccctgccgagtccagaccaacctggccagccctggtccccgcctgggcctagctctgaaggacacgactggccaactggtcaattcaagcttctggcaacagagcaacctgcagtccctggccaggaggcgccaagggaaggcccgagagtttgccatccagcagagcaacctgagcatcaacgagaccagcagcccccacctctgcccagagcctgggggaagctctgggccccacaagcttccctggggtcctctcctatcccaagagccactggctcgcccatcttcctgcctgaggcagtccgggctgccggccccaggcacccctagcggggacttcaggcccactgaagcctttgcccctctcgatgggcatacacagccaggcctcagatcctggggtggtctggggagctggaggtccaggctggtgggggaacctctcaccctggaggacctggctgtccccagtcagaaccagactcaggccccatcccgtgctgccgtccaccagctgctggcttctactcttggg

SEQ ID NO: 337816 - protein, 272 aa, Artificial Sequence
  derived and/or modified sequence
MSSTESAGRTADKSPRQQVDRLLVGLRWRRLEEPLGFIKVLQWLFAIFAFGSCGSYSGETGAMVRCNNEAKDVSSIIVAFGYPFRLHRIQYEMPLCDEESSSKTMHLMGDFSAPAEFFVTLGIFSFFYTMAALVIYLRFHNLYTENKRFPLVDFCVTVSFTFFWLVAAAAWGKGLTDVKGATRPSSLTAAMSVCHGEEAVCSAGATPSMGLANISVLFGFINFFLWAGNCWFVFKETPWHGQGQGQDQDQDQDQGQGPSQESAAEQGAVEKQ

SEQ ID NO: 337817 - protein, 208 aa, Artificial Sequence
  derived and/or modified sequence
MSSTESAGRTADKSPRQQVDRLLVGLRWRRLEEPLGFIKVLQWLFAIFAFGSCGSYSGETGAMVRCNNEAKDVSSIIVAFGYPFRLHRIQYEMPLCDEESSSKTMHLMGDFSAPAEFFVTLGIFSFFYTMAALVIYLRFHNLYTENKRFPLVLFGFINFFLWAGNCWFVFKETPWHGQGQGQDQDQDQDQGQGPSQESAAEQGAVEKQ

SEQ ID NO: 337818 - DNA, 627 bp, Artificial Sequence
  derived and/or modified sequence
atgagcagcaccgagagcgccggcagaaccgccgacaagagccccagacagcaggtggacagactgctggtgggcctgagatggagaagactggaggagcccctgggcttcatcaaggtgctgcagtggctgttcgccatcttcgccttcggcagctgcggcagctacagcggcgagaccggcgccatggtgagatgcaacaacgaggccaaggacgtgagcagcatcatcgtggccttcggctaccccttcagactgcacagaatccagtacgagatgcccctgtgcgacgaggagagcagcagcaagaccatgcacctgatgggcgacttcagcgcccccgccgagttcttcgtgaccctgggcatcttcagcttcttctacaccatggccgccctggtgatctacctgagattccacaacctgtacaccgagaacaagagattccccctggtgctgttcggcttcatcaacttcttcctgtgggccggcaactgctggttcgtgttcaaggagaccccctggcacggccagggccagggccaggaccaggaccaggaccaggaccagggccagggccccagccaggagagcgccgccgagcagggcgccgtggagaagcagtag

SEQ ID NO: 337819 - DNA, 627 bp, Artificial Sequence
  derived and/or modified sequence
atgtcatctactgaaagtgctgggagaaccgccgataagagcccacgtcaacaagtagaccgcctcctcgtggggctgcggtggaggcggttggaggagcctttggggtttataaaggtgcttcaatggctcttcgccatcttcgcattcggttcatgtggctcttatagcggggaaacaggggccatggtcagatgtaataacgaagcgaaagatgtgtctagtataatcgttgcctttggctacccttttcgtttgcaccgcattcaatatgagatgcctctctgtgacgaggaatccagttcaaagactatgcatctcatgggcgactttagcgcacccgccgaattttttgttaccttaggtatcttttctttcttttacaccatggcggcacttgtaatatatttgaggttccataacttatacacggagaataaacgattccccttggtcctttttggcttcattaactttttcctgtgggctggcaattgttggttcgttttcaaagagaccccctggcacgggcagggacagggacaagatcaggaccaagatcaagaccaaggccaggggcctagtcaggagagcgcggccgaacaaggggccgtagagaaacagtag

SEQ ID NO: 337820 - DNA, 627 bp, Artificial Sequence
  derived and/or modified sequence
atgagcagcacagagagcgctggccgcacagctgacaagagcccccggcagcaggtggaccggctgctggtgggcctgcgctggaggcggctggaggagcccctgggcttcatcaaggtgctgcagtggctgtttgccatctttgccttcggcagctgtggcagctacagcggggagaccggggccatggtgcgctgcaacaatgaggccaaggatgtgagcagcatcatcgtggccttcggctaccccttccggctgcaccgcatccagtatgagatgcccctgtgtgatgaggagagcagcagcaagaccatgcacctgatgggagacttcagcgccccagctgagttctttgtgaccctgggcatcttctccttcttctacaccatggccgccctggtgatctacctgcgcttccacaacctgtacacagagaacaagcgcttccccctggtgctgtttggcttcatcaacttcttcctgtgggccggcaactgctggtttgtgttcaaggagaccccctggcacggccagggccagggccaggaccaggaccaggaccaggaccagggccagggccccagccaggagagcgctgctgagcagggcgctgtggagaagcagtag

SEQ ID NO: 337821 - DNA, 627 bp, Artificial Sequence
  derived and/or modified sequence
atgagcagcaccgagagcgccggccggaccgccgacaagagcccccgccaacaggtagatagactgttggtggggctccgctggagaagacttgaagagcccctcggattcatcaaggttctgcagtggctgtttgccatcttcgctttcggtagctgtggctcctatagtggagaaacaggagccatggtgcgttgcaataatgaagctaaggatgtttcatctataatcgtggcctttggttatccttttcgcttgcacaggattcaatacgaaatgcctctatgtgacgaggagtcgtcatcaaaaacaatgcatctcatgggtgatttttccgcacctgccgagtttttcgtcactcttggaattttttcgtttttctataccatggccgcgctggtgatatacctgcggtttcacaacttgtatactgaaaataagagattcccacttgtactgttcgggttcatcaatttcttcctgtgggccggaaattgctggttcgtctttaaggagaccccttggcacggccaggggcaaggccaggaccaggatcaggaccaggatcagggccagggtccatcccaggaaagtgcagccgaacagggggcagtggaaaagcagtag

SEQ ID NO: 337822 - DNA, 627 bp, Artificial Sequence
  derived and/or modified sequence
atgtcgagtacagaatctgcaggacgcactgccgacaagagcccccgtcagcaggtggatcgactgctggtcgggctgcgctggcgtcgcttggaggagcccctgggtttcattaaagtgttgcagtggctgttcgctatattcgcgttcggcagttgcggaagctactccggcgagacaggcgctatggtgcgctgtaacaacgaagccaaggatgtgagctctatcatagtcgcctttgggtaccccttccgcctacatcggatacagtacgagatgcccttgtgtgacgaggagtctagctctaagactatgcatttgatgggagacttcagcgcccctgcagaattcttcgtgacactgggtatattttcttttttctatactatggccgcacttgttatctatctcagatttcataacctatatacggaaaacaagcgtttccccctggtgttgttcggattcataaactttttcctgtgggcagggaactgctggttcgtcttcaaggaaacgccatggcacgggcagggtcagggccaggaccaggatcaggaccaggatcagggccaaggcccatcacaagagagtgcagcagaacaaggagccgtcgagaagcagtag

SEQ ID NO: 337823 - DNA, 1153 bp, Artificial Sequence
  derived and/or modified sequence
aagttcgctgcgagtttgacagaagtttgaatccgagtcgggggctttctgctgccggcggggcaccgcggcggccgcagcctctgagagcacgaacagcagcgcccccgcgtcccagccagccagccagccagactggactccggcccaccgacggccgctcgcgctccggccccgctcgcctgctctgccccggacctgcagctccccgctcccccgccgtgtccgccgcctcccggccagagagccaagccaccacgccgcgcccagcgctcgccgcgccagcatgtcctcgaccgagagcgccggccgcacggcggacaagtcgccgcgccagcaggtggaccgcctactcgtggggctgcgctggcggcggctggaggagccgctgggcttcatcaaagttctccagtggctctttgctattttcgccttcgggtcctgtggctcctacagcggggagacaggagcaatggttcgctgcaacaacgaagccaaggacgtgagctccatcatcgttgcatttggctatcccttcaggttgcaccggatccaatatgagatgcccctctgcgatgaagagtccagctccaagaccatgcacctcatgggggacttctctgcacccgccgagttcttcgtgacccttggcatcttttccttcttctataccatggctgccctagttatctacctgcgcttccacaacctctacacagagaacaaacgcttcccgctggtgctctttggctttatcaacttcttcctgtgggccgggaactgttggtttgtgttcaaggagaccccgtggcatggacagggccagggccaggaccaggaccaggaccaggaccagggccagggtcccagccaggagagtgcagctgagcagggagcagtggagaagcagtaagcagccccccacctggctattcccgaactggacagcacctcttcaaccacctccggcttccaggacctttctcttcctcctcctccaattcccctcccccatcattctggtctttgagctttgagacgatgggcaggcatcagctgttggaaacctgggcagccctctcagtggcttcctatcctccttcttgctggagccatgaatggcaggagctcagtgcttcttgtgcagtgcctg

SEQ ID NO: 337824 - DNA, 558 bp, Artificial Sequence
  derived and/or modified sequence
aaccgtaataaatagtaacctaacggtccagtcatcgttctgtggtcctttcttttatgattcacaaggaatgaccctcttcatcgcctctcctaattcagtcctcacaacagtccttttacaaatgggacaacaggttagaggaagtcaggcagatttccagcatcatagagagtaaaggaccagggaaggatcaggattcaaggactgcacccaggctctgcttccagcttgctgtgtgactttggaccctgctgtgttgagatgagcaccagagccaagaagctgaggaggatctggagaattctggaggaagaggagagtgttgctggagctgtacagaccctgcttctcagaggaggaaagagaatcccagagaggccagaactcactgagagccccacggcgaggtcccaggaaggtggcgtcagcatctgcagccgcgtcgacgttgtcggagcctccgcggaggacccaggagagccggactaggaccagggccctgggcctccccacactccccatggagaagctggcggcctctacagagccccaagg

SEQ ID NO: 337825 - DNA, 228 bp, Artificial Sequence
  derived and/or modified sequence
atggaagaaaatctgatttctatgagggaggaccactcttttcacgtcagataccgtatggaggcctcttgcctcgagctggctttggaaggcgagaggctgtgcaagtctggagactgtcgggctggcgtgagcttcttcgaggccgctgtccaggttggcacagaagatttaaagacactctctgcgatttatagccaactggggaatgcttatttctatctatag

SEQ ID NO: 337826 - DNA, 642 bp, Artificial Sequence
  derived and/or modified sequence
atggaagagaacctcataagcatgcgtgaagaccactcgtttcacgtaaggtacagaatggaagcctcatgcctagagctggcactggagggggaacggctctgcaaatcgggtgattgtagagcaggagtgagttttttcgaggcagcggtacaggtcggcaccgaggatcttaaaaccttgagcgctatatactctcaacttggaaatgcctacttctacctgcacgactacgccaaagcgttagagtatcatcatcacgacctcaccctcgcacgcactatcggcgaccaactgggggaagcaaaagcatccggcaatctcgggaatacactaaaggtccttggaaacttcgacgaagcaatagtgtgttgccagcggcaccttgacatatcacgagagctaaatgataaagtcggtgaagcaagagccctgtataatctgggcaatgtgtaccacgccaagggaaagtcgttcggatgtcctggcccccaggatgtgggggagttccctgaggaagtgcgcgacgctttgcaggctgccgtcgacttttacgaggagaacttatcattggtgacggcccttggcgacagggctgctcagggacgggcctttgggaatctaggaaatacacattattag

SEQ ID NO: 337827 - DNA, 159 bp, Artificial Sequence
  derived and/or modified sequence
atggaagagaatcttatttccatgagggaggatcactcttttcatgttcggtatcgcatggaggcctcctgtttagagcttgctttggaaggggagcggctctgcaaatcaggggattgccgcgctggagtgtcgttctttgaggcagccgtgcagtag

SEQ ID NO: 337828 - DNA, 992 bp, Artificial Sequence
  derived and/or modified sequence
aggcgtttgaggggctctcggagggaggtgacagggaggggtgcgtgtgcgtgcgtgtggggcttctgtgtccagaggtctgggggtgacgtcctttgttttgggcaggaggcgggctgggggcttgcgggacctgtgggcgctgcggggacgcggcgtcgatgctcaagaaaccagaaactcggcttgaggagttgctgcttttttgtcggaaggtcttcaaatgagagtaaagcgttaagagcctcactcctgagtctttttttttttttaagataaaaactatactagagtccagcgacttcttaccactctgaatgtgagtaacaaattgtgaatcaaagcccgaatccccgtggaattcattccgaggctgattgcaatcacttggagtcgggcgcgtcctacctaaaccaggcagtttatggcaaatacctgccttgaccgtgcttaaattagtgaacttttgggcaccaactggtcgatttaccatagaaattggtagttgctgcaaaaagaaaatgttgctgaagtgctgctgaaagggccagagatgcaaggatttgggatacattttgaacctttaagctgtctgacattgacctcctttcattattaataaagaagaatcaggagcttaggatgtattaacaccaactcattaatatactaaccggacaatgttctacaaacaattctacattgtaaaggactggattggcacaaaataaaataattttattttattcagcttataatatgactcgatggaggaaaatttgataagcatgagagaagaccattcttttcatgttcgttacagaatggaagcttcttgcctagagctggccttggaaggggaacgtctatgtaaatcaggagactgccgcgctggcgtgtcattctttgaagctgcagttcaagttggaactgaagacctaaaaacacttagcgctatttacagccagttgggcaatgcttatttctatttg

SEQ ID NO: 337829 - DNA, 904 bp, Artificial Sequence
  derived and/or modified sequence
aggcgcagaggagggcggtgttgagaccggcggagcggcgggacccctaggtggcggagggacgctccgggaaagcgaggggcgctacgagctctggcccacgtgacctgccgggggcgggagcagggggcgcgccggcctcctgcggtgcccctgccttggggaggggccgtgaccacccgtctgtcgcccgaggcggccgccgctgcaccttcaccgcgtacccgggacccgcccgcccgcgggagcttataatatgactcgatggaggaaaatttgataagcatgagagaagaccattcttttcatgttcgttacagaatggaagcttcttgcctagagctggccttggaaggggaacgtctatgtaaatcaggagactgccgcgctggcgtgtcattctttgaagctgcagttcaagttggaactgaagacctaaaaacacttagcgctatttacagccagttgggcaatgcttatttctatttgcatgattatgccaaagcattagaatatcaccatcatgatttaacccttgcaaggactattggagaccagctgggggaagcgaaagctagtggtaatctgggaaacaccttaaaagttcttgggaattttgacgaagccatagtttgttgtcagcgacacctagatatttccagagagcttaatgacaaggtgggagaagcaagagcactttacaatcttgggaatgtgtatcatgccaaagggaaaagttttggttgccctggtccccaggatgtaggagaatttccagaagaagtgagagatgctctgcaggcagccgtggatttttatgaggaaaacctatcattagtgactgctttgggtgaccgagcggcacaaggacgtgcctttggaaatcttggaaacacacattacc

SEQ ID NO: 337830 - DNA, 571 bp, Artificial Sequence
  derived and/or modified sequence
gcggcgtcgatgctcaagaaaccagaaactcggcttgaggagttgctgcttttttgtcggaaggtcttcaaatgagagtaaagcgttaagagcctcactcctgagtctttttttttttttaagataaaaactatactagagtccagcgacttcttaccactctgaataaatgttgctgaagtgctgctgaaagggccagagatgcaaggatttgggatacattttgaacctttaagctgtctgacattgacctcctttcattattaataaagaagaatcaggagcttaggatgtattaacaccaactcattaatatactaaccggacaatgttctacaaacaattctacattgtaaaggactggattggcacaaaataaaataattttattttattcagcttataatatgactcgatggaggaaaatttgataagcatgagagaagaccattcttttcatgttcgttacagaatggaagcttcttgcctagagctggccttggaaggggaacgtctatgtaaatcaggagactgccgcgctggcgtgtcattctttgaagctgcagttcaa

SEQ ID NO: 337831 - DNA, 228 bp, Artificial Sequence
  derived and/or modified sequence
atggaggagaacctgatctccatgagggaggaccacagcttccacgtgcgctacaggatggaggccagctgcctggagctggccctggagggggagcggctgtgcaagagcggggactgccgggccggcgtgtccttctttgaagctgctgtgcaggtgggcacagaggacctgaagaccctgagcgccatctacagccagctgggcaatgcctacttctacctgtag

SEQ ID NO: 337832 - DNA, 642 bp, Artificial Sequence
  derived and/or modified sequence
atggaggagaacctgatctccatgagggaggaccacagcttccacgtgcgctacaggatggaggccagctgcctggagctggccctggagggggagcggctgtgcaagagcggggactgccgggccggcgtgtccttctttgaagctgctgtgcaggtgggcacagaggacctgaagaccctgagcgccatctacagccagctgggcaatgcctacttctacctgcatgactatgccaaggccctggagtaccaccaccacgacctgaccctggcccggaccatcggggaccagctgggggaggccaaggccagcggcaacctgggcaacaccctgaaggtgctgggcaactttgatgaggccatcgtgtgctgccagaggcacctggacatcagccgggagctgaatgacaaggtgggggaggcccgggccctgtacaacctgggcaatgtgtaccacgccaagggcaagagctttggctgccccggcccccaggatgtgggggagttccctgaggaggtgagagatgccctgcaggccgctgtggacttctatgaggagaacctgagcctggtgacagccctgggggacagagctgcccagggccgggcctttggaaacctgggcaacacccactactag

SEQ ID NO: 337833 - DNA, 159 bp, Artificial Sequence
  derived and/or modified sequence
atggaggagaacctgatctccatgagggaggaccacagcttccacgtgcgctacaggatggaggccagctgcctggagctggccctggagggggagcggctgtgcaagagcggggactgccgggccggcgtgtccttctttgaagctgctgtgcagtag

SEQ ID NO: 337834 - DNA, 228 bp, Artificial Sequence
  derived and/or modified sequence
atggaggagaacctgatcagcatgcgggaggaccacagcttccacgtcaggtatcgcatggaagcctcatgccttgagctggcactcgaaggggaacgcctctgcaagagcggcgattgcagagccggcgtatcattctttgaggccgcggtgcaggtgggaaccgaggatctgaagaccctgtcagctatctactcacaactgggaaatgcgtacttctacctctag

SEQ ID NO: 337835 - DNA, 642 bp, Artificial Sequence
  derived and/or modified sequence
atggaggagaacctgatcagcatgcgggaggaccacagcttccacgtaagatatcggatggaggcttcctgtttggagctggcgttggagggggagaggttgtgtaaaagtggcgactgccgggcaggcgtgtcttttttcgaggccgccgtgcaagttggcaccgaggaccttaaaaccctttcagccatatactctcagctgggtaatgcttacttttatctgcatgactacgctaaagccctggagtaccatcatcacgatttgacccttgccagaacaattggagaccagttaggggaagcgaaggcaagtggcaacctcgggaataccctcaaagtgttggggaattttgatgaagccattgtctgttgtcagaggcacctggatatctcgagagaacttaacgataaggttggggaagcgcgagctctatacaaccttggcaacgtgtatcacgccaaagggaaatcctttggctgccccgggccgcaagacgtcggggaatttcccgaggaagtgagagatgcgctacaggctgcagtggacttttatgaggagaacttgtcattagtcacagcgcttggagatagagctgcccaggggagagctttcgggaacctgggaaacacacactattag

SEQ ID NO: 337836 - DNA, 159 bp, Artificial Sequence
  derived and/or modified sequence
atggaggagaacctgatcagcatgcgggaggaccacagcttccacgtccggtacaggatggaagcctcatgtctggagttagctcttgagggcgagcgattgtgcaaatccggagactgccgggccggcgtctccttttttgaggcggccgtccaatag

SEQ ID NO: 337837 - DNA, 228 bp, Artificial Sequence
  derived and/or modified sequence
atggaggagaatttgatctctatgagggaggaccattctttccacgtaagataccggatggaggcgtcatgcttggaactcgcactggagggagaacgtctgtgtaagtccggcgactgtagagcaggcgtgtcgtttttcgaggccgcagttcaggtgggaaccgaagacctgaaaactctgagcgccatctatagccaactcgggaacgcttatttttacctgtag

SEQ ID NO: 337838 - DNA, 642 bp, Artificial Sequence
  derived and/or modified sequence
atggaagagaacttaatcagcatgcgagaggaccactctttccacgtgcggtatcgcatggaagcctcatgcctggaactcgctctggaaggggaaaggctgtgcaagtctggggattgtagagccggtgtgtccttttttgaggctgctgtacaggtgggcacagaggacttgaagactttaagcgctatctactcccagcttgggaacgcctacttttatctgcatgactacgcaaaggccctggagtatcatcaccatgaccttacactagcccgtacaattggggaccaacttggagaagcaaaggcttcgggaaacctgggcaatacactgaaagtactcggaaatttcgacgaggcgatagtatgctgtcagagacatctggatatctcccgcgaacttaatgataaagttggggaagccagggccctttataacctaggaaacgtctaccacgccaagggaaagtcattcggctgtccaggccctcaggacgtcggggaatttcccgaggaggttcgcgatgctctgcaggccgcagtcgacttttacgaggaaaacctgagccttgttaccgccctcggtgatagagcagctcagggtcgagcatttggcaatctgggcaacacgcattattag

SEQ ID NO: 337839 - DNA, 159 bp, Artificial Sequence
  derived and/or modified sequence
atggaagagaacctgatttctatgcgggaggaccactcttttcacgttagatacagaatggaggcatcctgcttagaacttgcactggagggagaaaggctgtgtaagtctggtgactgcagagccggtgtctccttctttgaggcggctgtccaatag

SEQ ID NO: 337840 - DNA, 228 bp, Artificial Sequence
  derived and/or modified sequence
atggaggagaacctgatcagcatgagagaggaccacagcttccacgtgagatacagaatggaggccagctgcctggagctggccctggagggcgagagactgtgcaagagcggcgactgcagagccggcgtgagcttcttcgaggccgccgtgcaggtgggcaccgaggacctgaagaccctgagcgccatctacagccagctgggcaacgcctacttctacctgtag

SEQ ID NO: 337841 - DNA, 642 bp, Artificial Sequence
  derived and/or modified sequence
atggaggagaacctgatcagcatgagagaggaccacagcttccacgtgagatacagaatggaggccagctgcctggagctggccctggagggcgagagactgtgcaagagcggcgactgcagagccggcgtgagcttcttcgaggccgccgtgcaggtgggcaccgaggacctgaagaccctgagcgccatctacagccagctgggcaacgcctacttctacctgcacgactacgccaaggccctggagtaccaccaccacgacctgaccctggccagaaccatcggcgaccagctgggcgaggccaaggccagcggcaacctgggcaacaccctgaaggtgctgggcaacttcgacgaggccatcgtgtgctgccagagacacctggacatcagcagagagctgaacgacaaggtgggcgaggccagagccctgtacaacctgggcaacgtgtaccacgccaagggcaagagcttcggctgccccggcccccaggacgtgggcgagttccccgaggaggtgagagacgccctgcaggccgccgtggacttctacgaggagaacctgagcctggtgaccgccctgggcgacagagccgcccagggcagagccttcggcaacctgggcaacacccactactag

SEQ ID NO: 337842 - DNA, 159 bp, Artificial Sequence
  derived and/or modified sequence
atggaggagaacctgatcagcatgagagaggaccacagcttccacgtgagatacagaatggaggccagctgcctggagctggccctggagggcgagagactgtgcaagagcggcgactgcagagccggcgtgagcttcttcgaggccgccgtgcagtag

SEQ ID NO: 337843 - DNA, 540 bp, Artificial Sequence
  derived and/or modified sequence
atggccgccagccaggtgctgggcgagaagatcaacatcctgagcggcgagaccgtgaaggccggcgacagagaccccctgggcaacgactgccccgagcaggacagactgccccagagaagctggagacagaagtgcgccagctacgtgctggccctgagaccctggagcttcagcgccagcctgacccccgtggccctgggcagcgccctggcctacagaagccacggcgtgctggaccccagactgctggtgggctgcgccgtggccgtgctggccgtgcacggcgccggcaacctggtgaacacctactacgacttcagcaagggcatcgaccacaagaagagcgacgacagaaccctggtggacagaatcctggagccccaggacgtggtgagattcggcgtgttcctgtacaccctgggctgcgtgtgcgccgcctgcctgtactacctgagccccctgaagctggagcacctggccctgatctacttcggcggcctgagcggcagcttcctgtacaccggcgtgctgatctag

SEQ ID NO: 337844 - DNA, 540 bp, Artificial Sequence
  derived and/or modified sequence
atggccgcgagccaggtacttggagaaaaaatcaatatactctcaggcgaaacagtcaaagccggtgacagagacccattgggcaatgattgccctgagcaggatcgcttaccccagagatcttggagacaaaagtgcgctagctatgtgctggcattaaggccttggagtttttcagcaagtctgactcctgtggctttgggatctgcgctggcatatcgcagtcacggagtgctcgatcccagactcctggttggctgcgcagtggccgtactggccgtgcacggagcaggtaatctggtaaatacttactacgatttttctaaagggattgaccacaagaaaagcgacgacaggaccttggtggaccgaattttggaacctcaggacgtggtgagattcggtgtgtttctatacacactggggtgtgtgtgcgctgcctgcctatactatctttcgccattgaagctcgaacacttggctctgatctacttcggaggtttgtctggatccttcctatatactggagtcctgatttag

SEQ ID NO: 337845 - DNA, 540 bp, Artificial Sequence
  derived and/or modified sequence
atggccgccagccaggtgctgggggagaagatcaacatcctgtctggagagaccgtgaaggccggggaccgggaccccctgggcaatgactgcccagagcaggaccggctgccccagaggtcctggaggcagaagtgtgccagctatgtgctggccctgcggccctggagcttcagcgccagcctgacccctgtggccctgggcagcgccctggcctaccgcagccacggcgtgctggacccccggctgctggtgggctgtgctgtggccgtgctggccgtgcatggagctggcaacctggtgaacacctactatgacttcagcaaaggaattgaccacaagaagagtgatgacaggaccctggtggaccgcatcctggagccccaggatgtggtgcgctttggagtcttcctgtacaccctgggctgtgtgtgtgccgcctgcctgtactacctgagccccctgaagctggagcacctggccctgatctactttggaggcctgagcggcagcttcctgtacacaggagtgctgatctag

SEQ ID NO: 337846 - DNA, 540 bp, Artificial Sequence
  derived and/or modified sequence
atggccgccagccaggtgctgggcgagaagatcaacatcctgagcggcgagaccgttaaagccggggacagggatccactcggaaacgactgtcccgagcaggaccgcctcccgcagagatcttggagacagaaatgtgccagctacgtgttggcactcaggccttggtcttttagcgcctcccttacccccgtcgccctcgggtcggccctcgcttatcgctcccacggtgtacttgaccccaggctgctggtgggctgcgctgtcgctgtgttggccgtgcatggcgccggaaatctcgtcaacacttattacgacttctccaaaggcatcgatcataaaaagtcagacgaccgaaccctcgtcgacagaattctagaacctcaggatgtagtgcgcttcggcgtcttcctatacacattggggtgcgtatgtgcggcttgtctatactacctgtctcccctgaagctcgagcacttggctcttatctattttgggggactaagcggctctttcctgtacacgggcgtactgatctag

SEQ ID NO: 337847 - DNA, 540 bp, Artificial Sequence
  derived and/or modified sequence
atggcagcctcacaagttctgggcgaaaagattaacatcctgtcaggcgagactgtgaaagcgggtgacagggacccactcgggaatgattgccctgagcaggataggctgccccagcggtcctggcgacagaaatgcgcgtcctacgttcttgctctgagaccttggagtttctccgcctcccttacacccgtcgccctcggtagcgccctggcttacagaagccacggcgtcctggatccacggttattggtgggatgcgcggtcgcggtattggccgttcacggcgcaggcaacttggtgaatacctattatgatttcagtaagggtatcgaccacaagaaaagcgatgaccgcactctggtggacaggatcctggaaccgcaggatgttgtccggttcggggtgttcttatatacactcggctgtgtgtgcgccgcttgcctttactatttgtccccgcttaagctagaacatttggcccttatttacttcgggggactatcaggttcctttctgtatacaggagtcctgatctag

SEQ ID NO: 337848 - DNA, 716 bp, Artificial Sequence
  derived and/or modified sequence
ttccatggcggcctctcaggtcctgggggagaagattaacatcctgtcgggagagactgtcaaagctggggacagggacccgctggggaacgactgtcccgagcaagataggctcccccagcgctcctggaggcagaagtgtgcctcctacgtgttggccctgaggccctggagcttcagtgcctcactcacaccggtggccctgggcagtgcccttgcctacagatcccacggtgtcctggatcccaggctcttggtgggttgtgccgtggctgtcctggctgtgcacggggccggtaatttggtcaacacttactatgacttttccaagggcattgaccacaaaaagagtgatgacaggacacttgtggaccgaatcttggagccgcaggatgtcgtccggttcggagtcttcctctacacgttgggctgcgtctgtgccgcttgcctctactacctgtcccctctgaaactggagcacttggctcttatctactttggaggcctgtctggctcctttctctacacaggagtcctcatctagccactgaagcagagtgcccacatcaggagcagccagtgctcaagctcccagaaactgcctagtgacctgccttctagacctgcctcctgagaatggggctggccaccttcgaggagagggaagtgagccccttcctgcctcggggtgggcagcatctggagctgacaattgt

SEQ ID NO: 337849 - DNA, 870 bp, Artificial Sequence
  derived and/or modified sequence
atgaccgtgagcttccacaagtacggcgagtacttccccggcaccggcgacctgagagacatcggcgccggcaagggcaagtactacgccgtgaactaccccctgagagacggcatcgacgacgagagctacgaggccatcttcaagcccgtgatgagcaaggtgatggagatgttccagcccagcgccgtggtgctgcagtgcggcagcgacagcctgagcggcgacagactgggctgcttcaacctgaccatcaagggccacgccaagtgcgtggagttcgtgaagagcttcaacctgcccatgctgatgctgggcggcggcggctacaccatcagaaacgtggccagatgctggacctacgagaccgccgtggccctggacaccgagatccccaacgagctgccctacaacgactacttcgagtacttcggccccgacttcaagctgcacatcagccccagcaacatgaccaaccagaacaccaacgagtacctggagaagatcaagcagagactgttcgagaacctgagaatgctgccccacgcccccggcgtgcagatgcaggccatccccgaggacgccatccccgaggagagcggcgacgaggacgaggacgaccccgacaagagaatcagcatctgcagcagcgacaagagaatcgcctgcgaggaggagttcagcgacagcgaggaggagggcgagggcggcagaaagaacagcagcaacttcaagaaggccaagagagtgaagaccgaggacgagaaggagaaggaccccgaggagaagaaggaggtgaccgaggaggagaagaccaaggaggagaagcccgaggccaagggcgtgaaggaggaggtgaagctggcctag

SEQ ID NO: 337850 - DNA, 870 bp, Artificial Sequence
  derived and/or modified sequence
atgaccgttagcttccacaaatatggtgaatacttcccagggaccggtgatctgcgcgacatcggtgctggtaaaggcaaatattacgcagtgaactatccactccgagacggaattgacgacgagtcctacgaagctatttttaagcccgttatgtcaaaggtaatggaaatgttccaaccctctgccgtggtgttacagtgtggctcagatagcttaagtggtgaccgcctgggctgtttcaaccttaccattaagggacatgcaaaatgtgtggaattcgtgaagtcttttaatctcccgatgctcatgctgggggggggtgggtatactataaggaatgtagcgcgctgttggacatacgaaaccgccgtggccttggataccgagattcccaatgagttgccatacaacgactacttcgaatattttggacctgattttaagctgcacatttccccctccaacatgaccaaccaaaacaccaatgaatacctcgagaagattaaacagcgtttgttcgaaaacctccgtatgctgccccatgcccccggggtgcagatgcaggccattcccgaagacgccatcccagaggagagcggggacgaggacgaggacgatccagataaacgaatcagtatttgcagtagcgacaagagaatcgcttgcgaagaagaattcagcgattctgaggaagagggggaagggggccggaagaacagcagcaacttcaaaaaggccaaacgtgtgaaaacggaggacgagaaagagaaggaccccgaggagaaaaaggaggtaaccgaagaagagaagactaaggaagagaagccagaggctaagggcgttaaggaggaggttaagctcgcttag

SEQ ID NO: 337851 - DNA, 870 bp, Artificial Sequence
  derived and/or modified sequence
atgacagtgtccttccacaagtacggggagtacttccctggcactggagacctgcgggacattggagctgggaagggcaagtactatgctgtgaactaccccctgagagatggcattgatgatgagagctatgaggccatcttcaagcctgtgatgagcaaggtgatggagatgttccagcccagcgctgtggtgctgcagtgtggcagtgacagcctgagcggggaccggctgggctgcttcaacctgaccatcaagggccacgccaagtgtgtggagtttgtgaagagcttcaacctgcccatgctgatgctgggcggcggcggctacaccatcagaaatgtggcccgctgctggacctatgaaacagctgtggccctggacacagagatccccaatgagctgccctacaatgactactttgagtacttcggccctgacttcaagctgcacatcagccccagcaacatgaccaaccagaacaccaatgagtacctggagaagatcaagcagaggctgtttgagaacctgaggatgctgccccacgcccctggggtgcagatgcaggccatcccagaagatgccatccctgaggagagcggagatgaagatgaagatgatcctgacaagaggatcagcatctgcagcagtgacaagagaattgcctgtgaggaggagttcagtgacagcgaggaggagggggagggcggcaggaagaacagcagcaacttcaagaaggccaagagggtgaagacagaagatgagaaggagaaggaccctgaggagaagaaggaggtgacagaggaggagaagaccaaggaggagaagccagaggccaagggcgtgaaggaggaggtgaagctggcctag

SEQ ID NO: 337852 - DNA, 870 bp, Artificial Sequence
  derived and/or modified sequence
atgaccgtgagcttccacaagtacggcgagtacttccccggcaccggagatcttcgggacataggtgcgggcaaagggaaatactacgccgttaattatcccctgcgcgacggaatcgacgacgagtcttacgaggccatctttaagccagtaatgtcaaaagttatggagatgtttcagccctccgccgtagttcttcagtgcgggtctgatagtctatccggggatcgtctcggatgtttcaatctgacaattaagggacacgctaagtgtgtcgaattcgtaaagtccttcaatctgccaatgctaatgctgggtggcggtggttataccatcagaaacgtcgcaagatgctggacatacgagacagccgtggcgctagacacagagattccgaatgaattaccatacaacgactactttgagtactttggtccggattttaaactacatatatctccctcaaacatgacaaatcagaatactaatgagtacctcgagaaaattaagcagaggcttttcgaaaacctgcgtatgctgccacatgctcccggcgtgcagatgcaagcaattccggaggatgccatccctgaggaatccggcgacgaggacgaggacgatcccgataaaagaatctcaatctgctccagtgacaaacgcatcgcctgcgaggaagagttttctgatagtgaagaagaaggagagggcggcaggaagaattccagcaatttcaaaaaggccaaacgggtcaaaaccgaagacgagaaagaaaaagacccagaggagaaaaaagaagtgaccgaagaagaaaagactaaggaagagaaaccagaggcaaaaggggtaaaagaggaagtgaagttggcctag

SEQ ID NO: 337853 - DNA, 870 bp, Artificial Sequence
  derived and/or modified sequence
atgaccgtgagcttccataagtatggggagtacttcccgggaacaggcgacctgcgagatattggtgccggaaagggcaagtattatgccgtcaactatccattgcgtgatggaattgacgatgaatcttacgaagccatcttcaagcctgtgatgtcgaaggtgatggagatgtttcagcctagcgccgtggtcttacagtgcggaagtgactccttgagcggcgaccgcctaggatgcttcaaccttacaatcaagggccatgcaaaatgtgtcgaatttgtaaaatcatttaacctgcctatgctcatgttgggcggtgggggatacacaatacgcaacgtagccagatgttggacttacgagacggcggtggccctggacaccgagatccctaacgaactaccctacaacgattactttgaatactttggaccggactttaaactgcacatcagcccatcgaatatgaccaaccagaacaccaacgaatacctggaaaagatcaagcagcggctgttcgagaatttgcgtatgttgccccatgctccaggagtgcaaatgcaagccatacccgaagacgcaatcccagaggaaagtggcgacgaagatgaggacgatcctgacaaaaggatcagcatctgctcatccgacaagcggattgcctgtgaagaagaattttctgattcagaagaggaaggagaaggcggacggaaaaatagcagtaacttcaagaaggcaaaaagagtcaagaccgaggatgagaaggagaaggatcccgaagagaaaaaggaggtgacggaggaagaaaagaccaaagaagagaaaccggaggcaaaaggagtgaaagaagaggtcaaattggcctag

SEQ ID NO: 337854 - protein, 131 aa, Artificial Sequence
  derived and/or modified sequence
MELRVHMVSHTGEMPYKVRLGLSPGPGLGGPRILPAEPFTWGAVRHLPHSSCQGACLPCLPCLSSAPLSRQGLSAASPPRSLLGPCFFPWRTGLASSGQLSPEALLCTILHTRSGVLPESSHRGLPLVPAL

SEQ ID NO: 337855 - DNA, 396 bp, Artificial Sequence
  derived and/or modified sequence
atggagctgagagtgcacatggtgagccacaccggcgagatgccctacaaggtgagactgggcctgagccccggccccggcctgggcggccccagaatcctgcccgccgagcccttcacctggggcgccgtgagacacctgccccacagcagctgccagggcgcctgcctgccctgcctgccctgcctgagcagcgcccccctgagcagacagggcctgagcgccgccagcccccccagaagcctgctgggcccctgcttcttcccctggagaaccggcctggccagcagcggccagctgagccccgaggccctgctgtgcaccatcctgcacaccagaagcggcgtgctgcccgagagcagccacagaggcctgcccctggtgcccgccctgtag

SEQ ID NO: 337856 - DNA, 396 bp, Artificial Sequence
  derived and/or modified sequence
atggaactgcgggtccatatggtgagccacaccggggagatgccctacaaagtgaggctgggcctctcaccagggccaggactggggggcccgagaattctaccagctgaaccttttacatggggcgcggttcggcatctacctcactccagctgtcagggagcttgcctcccttgcttgccttgcttgagcagtgctcccttgtctaggcagggtctctccgccgcctctcccccccggagcttgttagggccttgctttttcccttggagaaccgggctggctagttccgggcagcttagcccagaggctctgctgtgcactatcctgcacacacgttccggagtgctccctgagagctcccacagaggtctgccactggtgccagccttgtag

SEQ ID NO: 337857 - DNA, 396 bp, Artificial Sequence
  derived and/or modified sequence
atggagctgcgggtgcacatggtgagccacactggagagatgccctacaaggtgcggctgggcctgagccctggccctggcctgggcggcccccgcatcctgcctgctgagcccttcacctggggcgctgtgcgccacctgccccacagcagctgccagggcgcctgcctgccctgcctgccctgcctgagcagcgcccccctgagccggcagggcctgtctgctgccagcccccccaggagcctgctgggcccctgcttcttcccctggaggacaggcctggccagcagcggccagctgagccctgaggccctgctgtgcaccatcctgcacaccaggtctggagtgctgcctgagagcagccaccggggcctgcccctggtgcctgccctgtag

SEQ ID NO: 337858 - DNA, 396 bp, Artificial Sequence
  derived and/or modified sequence
atggagctgcgggtgcacatggtgagccacaccggcgagatgccctacaaggtacggctgggcttgagccctggcccagggctgggaggacccaggatcttacctgcagaaccgtttacttggggagctgtgcgacacctccctcacagctcttgtcagggggcctgcctgccctgtctgccttgcttaagttctgccccgctgtccagacaggggctgagcgctgcttccccgccaaggtctttgctcgggccatgcttctttccttggcggactggcctcgcttccagtgggcagctgagccccgaagccttgttatgtaccatcttgcataccagaagtggggtactgccggagtcctcacaccgtggacttcccttggtgcccgccctctag

SEQ ID NO: 337859 - DNA, 396 bp, Artificial Sequence
  derived and/or modified sequence
atggagctccgcgttcatatggtctctcacactggggagatgccatataaggtcaggctggggctatctccaggccctgggcttggagggcctcgtatcctccctgccgaacctttcacatggggtgccgtaaggcatctcccccatagtagctgccagggcgcttgtcttccgtgtctcccctgcctcagcagcgcccctctgtccaggcaggggctctccgcggcttctccccctagatccttgcttgggccttgtttctttccgtggcgtacaggccttgcctccagcggacagttgagtcccgaggccctgctttgcaccatattgcatacacgcagcggggtgctgccagaatccagtcatcgcggattacccctggtcccagccctgtag

SEQ ID NO: 337860 - DNA, 2449 bp, Artificial Sequence
  derived and/or modified sequence
tgagggcggaagggacaggcataggagggactctgtgggaggcatttggggttggctttcctaggcccctggcccacctccaccttggctttggagaaggggagccgctacaggggatggcagctgggaaaggccccctggccacccccagcaaccccactgctggcttctgtgtcagggcccgccgaaacccaggcccactcttcctagaggcctgtcagcagccactagggccagggactgtgggtgaggccactcggaccctgcccccagtctgtctgggcctgagaagggcctggtgtgcggtgggcttgcagcactcagtgatggtcaggccaggcaggttatgtgttgccctctcccaccctagcgtccccaccctccccaggcagactcttcccagcagcaagcggaagcccgggcagaggctgctgtcataggcagaggcccccgctgatgccggccctgcttgcccctcacactgccaggtcttcacgtgctctgtgtgccaggagacattccgccgaaggatggagctgcgggtgcacatggtgtctcacacaggggagatgccctacaaggtcaggcttggcctgtctccagggccagggttgggtggccccaggatccttcctgctgagccctttacgtggggtgctgtcaggcacctccctcacagtagctgtcagggagcctgccttccctgccttccctgcctttccagtgcccccttatctaggcagggcctgtctgcagcctcacctccaaggtccttattaggcccttgtttctttccatggaggacaggcttggcatcctctgggcagctgagccctgaggccctcctttgcaccatccttcacaccagatcaggggtcctcccagaatcatctcaccggggcctccctctagttcctgccctatagcccaagggtgggtggcagggtttcatgggtgcaggccgccctggaggtgactgtgggcctctttttcagtgttcctcctgctcccagcagttcatgcagaagaaggacttgcagagccacatgatcaaacttcatggagcccccaagccccatgcatgccccacctgtgccaagtgcttcctgtctcggacagagctgcagctgcatgaagctttcaagcaccgtggtgagaagctgtttgtgtgtgaggagtgtgggcaccgggcctcgagccggaatggcctgcagatgcacatcaaggccaagcacaggaatgagaggccacacgtatgtgagttctgcagccacgccttcacccaaaaggccaatctcaacatgcacctgcgcacacacacgggtgagaagcccttccagtgccacctctgtggcaagaccttccgaacccaaggtgaggtacgccctgcccctcccctcgcctccccatcctgaggccaaggccacaggctgagctcttgccttgtgcctgcagccagcctggacaagcacaaccgcacccacaccggggaaaggcccttcagttgcgagttctgtgaacagcgcttcactgagaaggggcccctcctgaggcacgtggccagccgccatcaggagggccggccccacttctgccagatatgcggcaagaccttcaaaggtacctgggcggccctgggagagccatttcctgctcatccgagttggagggtctctgaggaggaaacgctcctttcttgcctgtgaacctcttttgtgccccacatggttagagttgagagtggacctgctttgaaggcaggggtgtcctgtgcagtagtgaccctgggtggcactggagagcctggcagggcctgtgcagcacttgtaaaccactggtcccctcccttgctgcctgtcccaacctcctgctgggtttcctcgagggtcccggggctcctgcatgatcccccacggtgttctccctcttgcagccgtggagcaactgcgtgtgcacgtcagacggcacaagggggtgaggaagtttgagtgcaccgagtgtggctacaagtttacccgacaggtaggccagggcctgggccccttcccctaccctaggatcccccaaagttctgagctcaccctccccgccaggcccacctgcggaggcacatggagatccacgaccgggtagagaactacaacccgcggcagcgcaagctccgcaacctgatcatcgaggacgagaagatggtggtggtggcgctgcagccgcctgcagagctggaggtgggctcggcggaggtcattgtggagtccctggcccagggcggcctggcctcccagctccccggccagagactgtgtgcagaggagagcttcaccggcccaggtgtcctggagccctccctcatcatcacagctgctgtccccgaggactgtgacacatagcccattctggccaccagagcccacttggccccacccctcaataaaccgtgtggctttgg

SEQ ID NO: 337861 - protein, 375 aa, Artificial Sequence
  derived and/or modified sequence
MAMTGWSCLVTGAGGFLGQRIIRLLVKEKELKEIRVLDKAFGPELREEFSKLQNKTKLTVLEGDILDEPFLKRACQDVSVIIHTACIIDVFGVTHRESIMNVNVKGTQLLLEACVQASVPVFIYTSSIEVAGPNSYKEIIQNGHEEEPLENTWPAPYPHSKKLAEKAVLAANGWNLKNGGTLYTCALRPMYIYGEGSRFLSASINEALNNNGILSSVGKFSTVNPVYVGNVAWAHILALRALQDPKKAPSIRGQFYYISDDTPHQSYDNLNYTLSKEFGLRLDSRWSFPLSLMYWIGFLLEIVSFLLRPIYTYRPPFNRHIVTLSNSVFTFSYKKAQRDLAYKPLYSWEEAKQKTVEWVGSLVDRHKETLKSKTQ

SEQ ID NO: 337862 - protein, 373 aa, Artificial Sequence
  derived and/or modified sequence
MTGWSCLVTGAGGFLGQRIIRLLVKEKELKEIRVLDKAFGPELREEFSKLQNKTKLTVLEGDILDEPFLKRACQDVSVIIHTACIIDVFGVTHRESIMNVNVKGTQLLLEACVQASVPVFIYTSSIEVAGPNSYKEIIQNGHEEEPLENTWPAPYPHSKKLAEKAVLAANGWNLKNGGTLYTCALRPMYIYGEGSRFLSASINEALNNNGILSSVGKFSTVNPVYVGNVAWAHILALRALQDPKKAPSIRGQFYYISDDTPHQSYDNLNYTLSKEFGLRLDSRWSFPLSLMYWIGFLLEIVSFLLRPIYTYRPPFNRHIVTLSNSVFTFSYKKAQRDLAYKPLYSWEEAKQKTVEWVGSLVDRHKETLKSKTQ

SEQ ID NO: 337863 - protein, 82 aa, Artificial Sequence
  derived and/or modified sequence
MTGWSCLVTGAGGFLGQRIIRLLVKEKELKEIRVLDKAFGPELREEFSKLQNKTKLTVLEGDILDEPFLKRACQDVSVIIHT

SEQ ID NO: 337864 - DNA, 1128 bp, Artificial Sequence
  derived and/or modified sequence
atggccatgacgggatggagctgtctcgttacaggtgcagggggctttctcggacagaggattattagactccttgtgaaggaaaaagagcttaaggagatacgtgtgttagacaaggcttttggccccgagctgagggaagagtttagtaaattgcagaacaagaccaaattaaccgtgttagagggcgacatcctggatgaaccctttttgaaacgggcctgtcaagatgtatccgtgattattcatacagcgtgcataatagatgtctttggggtgacccatcgggagtccattatgaacgtgaatgtgaagggaacccagctgctgctcgaggcatgtgtgcaggccagtgtgcctgtattcatttacacttctagtatagaagttgccggacctaattcctataaggagatcatccaaaatgggcacgaggaagagcctctagagaatacatggcccgcgccatatccacactcaaagaagcttgccgagaaggctgtcctggccgccaatgggtggaacctgaagaatggcggaacattgtacacttgcgccctgaggcccatgtacatatacggggagggtagtagatttctgagcgcatcaattaacgaagccttaaacaataatggaatactcagctccgtggggaaattcagcactgtcaatcctgtgtatgtggggaatgtggcatgggcacacatccttgctctgcgggccctacaggaccctaaaaaggctccctctatcagaggacagttttattacatttcagacgatacccctcaccaatcctacgataacctcaattataccctgtccaaagagtttggacttcggctggacagtcgctggtcctttcccctcagcttgatgtactggattggattcctgctggagatcgtctcgtttctgctgagaccaatttatacttatcggcctccctttaatcgtcatatcgttaccctgagtaacagcgtgtttacgttcagctacaagaaagctcagcgggatttggcctacaagcctctctacagttgggaagaagctaagcaaaagaccgtggaatgggtcggttcactggtggaccgccacaaagagacactgaaaagcaagacacagtag

SEQ ID NO: 337865 - DNA, 1680 bp, Artificial Sequence
  derived and/or modified sequence
aggaaatgaggtgagaagtacgtccactcttctgtccagcttttaacaatctaactaatgccctctccagggtcaccctagaatcagatctgctccccagcatcttctgtttcctggtgagtgattcctgctactttggatggccatgacgggctggagctgccttgtgacaggagcaggagggtttctgggacagaggatcatccgcctcttggtgaaggagaaggagctgaaggagatcagggtcttggacaaggccttcggaccagaattgagagaggaattttctaaactccagaacaagaccaagctgacagtgctggaaggagacattctggatgagccattcctgaagagagcctgccaggacgtctcggtcatcatccacaccgcctgtatcattgatgtcttcggtgtcactcacagagagtctatcatgaatgtcaatgtgaaaggtacccagctcctgttagaggcctgtgtccaagctagtgtgccagtcttcatctacaccagtagcatagaggtagccgggcccaactcctacaaggaaatcatccagaatggccatgaagaagagcctctggaaaacacatggcccgctccatacccacacagcaaaaagcttgctgagaaggctgtactggcggctaacgggtggaatctgaaaaacggcggcaccctgtacacttgtgccttacgacccatgtatatctatggggaaggaagccgattcctttctgctagtataaacgaggccctgaacaacaatgggatcctgtcaagtgttggaaagttctccactgttaacccagtctatgttggcaatgtggcctgggcccacattctggccttgagggccctgcaggaccccaagaaggccccaagcatccgaggacagttctactatatctcagatgacacgcctcaccaaagctatgataaccttaattacaccctgagcaaagagttcggcctccgccttgattccagatggagctttcctttatccctgatgtattggattggcttcctgctggaaatagtgagcttcctactcaggccaatttacacctatcgaccgcccttcaaccgccacatagtcacattgtcaaatagcgtattcaccttctcttataagaaggctcagcgagatctggcgtataagccactctacagctgggaggaagccaagcagaaaacggtggagtgggttggttcccttgtggaccggcacaaggagaccctgaagtccaagactcagtgatttaaggatgacagagatgtgcatgtgggtattgttaggagatgtcatcaagctccaccctcctggcctcatacagaaagtgacaagggcacaagctcaggtcctgctgcctccctttcatacaatggccaacttattgtattcctcatgtcatcaaaacctgcgcagtcattggcccaacaagaaggtttctgtcctaatcatataccagaggaaagaccatgtggtttgctgttaccaaatctcagtagctgattctgaacaatttagggactcttttaacttgagggtcgttttgactactagagctccatttctactcttaaatgagaaaggatttcctttctttttaatcttccattccttcacatagtttgataaaaagatcaataaatgtttgaatgtttaatgtg

SEQ ID NO: 337866 - DNA, 1676 bp, Artificial Sequence
  derived and/or modified sequence
aggaaatgaggtgagaagtacgtccactcttctgtccagcttttaacaatctaactaatgccctctccagggtcaccctagaatcagatctgctccccagcatcttctgtttcctggtgagtgattcctgctactttggatggccatgacgggctggagctgccttgtgacaggagcaggagggtttctgggacagaggatcatccgcctcttggtgaaggagaaggagctgaaggagatcagggtcttggacaaggccttcggaccagaattgagagaggaattttctaaactccagaacaagaccaagctgacagtgctggaaggagacattctggatgagccattcctgaagagagcctgccaggacgtctcggtcatcatccacaccgcctgtatcattgatgtcttcggtgtcactcacagagagtctatcatgaatgtcaatgtgaaaggtacccagctcctgttagaggcctgtgtccaagctagtgtgccagtcttcatctacaccagtagcatagaggtagccgggcccaactcctacaaggaaatcatccagaatggccatgaagaagagcctctggaaaacacatggcccgctccatacccacacagcaaaaagcttgctgagaaggctgtactggcggctaacgggtggaatctgaaaaacggcggcaccctgtacacttgtgccttacgacccatgtatatctatggggaaggaagccgattcctttctgctagtataaacgaggccctgaacaacaatgggatcctgtcaagtgttggaaagttctccactgttaacccagtctatgttggcaatgtggcctgggcccacattctggccttgagggccctgcaggaccccaagaaggccccaagcatccgaggacagttctactatatctcagatgacacgcctcaccaaagctatgataaccttaattacaccctgagcaaagagttcggcctccgccttgattccagatggagctttcctttatccctgatgtattggattggcttcctgctggaaatagtgagcttcctactcaggccaatttacacctatcgaccgcccttcaaccgccacatagtcacattgtcaaatagcgtattcaccttctcttataagaaggctcagcgagatctggcgtataagccactctacagctgggaggaagccaagcagaaaacggtggagtgggttggttcccttgtggaccggcacaaggagaccctgaagtccaagactcagtgatttaaggatgacagagatgtgcatgtgggtattgttaggagatgtcatcaagctccaccctcctggcctcatacagaaagtgacaagggcacaagctcaggtcctgctgcctccctttcatacaatggccaacttattgtattcctcatgtcatcaaaacctgcgcagtcattggcccaacaagaaggtttctgtcctaatcatataccagaggaaagaccatgtggtttgctgttaccaaatctcagtagctgattctgaacaatttagggactcttttaacttgagggtcgttttgactactagagctccatttctactcttaaatgagaaaggatttcctttctttttaatcttccattccttcacatagtttgataaaaagatcaataaatgtttgaatgtttaa

SEQ ID NO: 337867 - DNA, 1436 bp, Artificial Sequence
  derived and/or modified sequence
gtttgcaaaaaaaatggggtggaggaaaatgaggcatctgtgtgagtatataaccatttgacatctctttttagccctctccagggtcaccctagaatcagatctgctccccagcatcttctgtttcctggtgagtgattcctgctactttggatggccatgacgggctggagctgccttgtgacaggagcaggagggtttctgggacagaggatcatccgcctcttggtgaaggagaaggagctgaaggagatcagggtcttggacaaggccttcggaccagaattgagagaggaattttctaaactccagaacaagaccaagctgacagtgctggaaggagacattctggatgagccattcctgaagagagcctgccaggacgtctcggtcatcatccacaccgcctgtatcattgatgtcttcggtgtcactcacagagagtctatcatgaatgtcaatgtgaaaggtacccagctcctgttagaggcctgtgtccaagctagtgtgccagtcttcatctacaccagtagcatagaggtagccgggcccaactcctacaaggaaatcatccagaatggccatgaagaagagcctctggaaaacacatggcccgctccatacccacacagcaaaaagcttgctgagaaggctgtactggcggctaacgggtggaatctgaaaaacggcggcaccctgtacacttgtgccttacgacccatgtatatctatggggaaggaagccgattcctttctgctagtataaacgaggccctgaacaacaatgggatcctgtcaagtgttggaaagttctccactgttaacccagtctatgttggcaatgtggcctgggcccacattctggccttgagggccctgcaggaccccaagaaggccccaagcatccgaggacagttctactatatctcagatgacacgcctcaccaaagctatgataaccttaattacaccctgagcaaagagttcggcctccgccttgattccagatggagctttcctttatccctgatgtattggattggcttcctgctggaaatagtgagcttcctactcaggccaatttacacctatcgaccgcccttcaaccgccacatagtcacattgtcaaatagcgtattcaccttctcttataagaaggctcagcgagatctggcgtataagccactctacagctgggaggaagccaagcagaaaacggtggagtgggttggttcccttgtggaccggcacaaggagaccctgaagtccaagactcagtgatttaaggatgacagagatgtgcatgtgggtattgttaggagatgtcatcaagctccaccctcctggcctcatacagaaagtgacaagggcacaagctcaggtcctgctgcctccctttcatacaatggccaacttattgtattcctcatgtcatc

SEQ ID NO: 337868 - DNA, 352 bp, Artificial Sequence
  derived and/or modified sequence
gccacaggaaatgaggtgagaaccctctccagggtcaccctagaatcagatctgctccccagcatcttctgtttcctggtgagtgattcctgctactttggatggccatgacgggctggagctgccttgtgacaggagcaggagggtttctgggacagaggatcatccgcctcttggtgaaggagaaggagctgaaggagatcagggtcttggacaaggccttcggaccagaattgagagaggaattttctaaactccagaacaagaccaagctgacagtgctggaaggagacattctggatgagccattcctgaagagagcctgccaggacgtctcggtcatcatccacac

SEQ ID NO: 337869 - DNA, 1128 bp, Artificial Sequence
  derived and/or modified sequence
atggccatgacaggctggagctgcctggtgactggagctgggggcttcctgggccagaggatcatccggctgctggtgaaggagaaggagctgaaggagatccgggtgctggacaaggcctttggacctgagctgcgggaggagttcagcaagctgcagaacaagaccaagctgactgtgctggagggggacatcctggatgagcccttcctgaagagggcctgccaggatgtgtctgtcatcatccacacagcctgcatcattgatgtgtttggagtgacccaccgggagagcatcatgaatgtgaatgtgaagggcacccagctgctgctggaggcctgtgtgcaggcctctgtgcctgtgttcatctacaccagcagcattgaggtggccggccccaacagctacaaggagatcatccagaatggccacgaggaggagcccctggagaacacctggccagccccctacccccacagcaagaagctggccgagaaggctgtgctggccgccaacggctggaacctgaagaatggaggcaccctgtacacctgtgccctgcggcccatgtacatctatggagagggcagccgcttcctgagcgccagcatcaatgaggccctgaacaacaacggcatcctgagctctgtgggcaagttcagcacagtgaaccctgtgtatgtgggcaatgtggcctgggcccacatcctggccctgcgggccctgcaggaccccaagaaggcccccagcatccggggccagttctactacatcagtgatgacaccccccaccagagctatgacaacctgaactacaccctgagcaaggagtttggcctgcggctggacagccgctggagcttccccctgagcctgatgtactggattggcttcctgctggagatcgtgtccttcctgctgcggcccatctacacctacagaccacccttcaacagacacatcgtgaccctgagcaacagcgtcttcaccttctcctacaagaaggcccagagggacctggcctacaagcccctgtacagctgggaggaggccaagcagaagacagtggagtgggtgggcagcctggtggacagacacaaggagaccctgaagagcaagacccagtag

SEQ ID NO: 337870 - DNA, 1128 bp, Artificial Sequence
  derived and/or modified sequence
atggccatgaccggctggagctgcctggtgaccggcgccggcggctttttaggccaaagaataataaggttgttggtgaaagagaaggagctcaaggaaatacgggtgctggacaaggcgttcggccccgaacttagagaggaattctctaaacttcagaataaaacaaaactgactgtgcttgagggtgacatattagacgagccattcctgaaaagggcctgtcaggatgtctcggtgatcatccatactgcgtgtatcatcgatgtgttcggcgtgactcacagagagtctatcatgaacgtgaacgttaaaggcacacagctgctgctagaggcctgtgtgcaggccagtgtccctgtttttatatatacttcatctatagaggtcgcaggccccaatagttataaagaaatcatccagaatggccacgaggaggaaccactggaaaatacatggcccgctccatacccccactccaaaaagctggctgagaaagccgtcctggcagcaaacgggtggaacctgaagaacgggggaacactttacacctgtgccctgcgacctatgtatatttacggtgaaggcagtagattcctgtctgcctccatcaatgaggcgctgaacaacaacgggattctgagttctgtgggcaaattctctaccgttaacccggtctacgtggggaacgtggcttgggcacacattttagctttgcgggccctgcaagatcccaagaaagcacctagcatcagggggcaattctactatatctcagatgataccccacatcagagctatgataatctgaattacacgttatctaaggagttcggactcaggctcgattcaaggtggagctttcctcttagccttatgtattggatcgggtttctccttgagattgtaagcttcctcctccgccccatctatacttatcgccccccttttaataggcacatcgtcactctgagtaactccgtgttcaccttctcctataagaaggcgcagcgagatctggcgtataaacctctgtacagctgggaagaagccaaacagaagaccgtcgaatgggtcgggagcctggtcgataggcacaaggagaccctgaaatccaagacccaatag

SEQ ID NO: 337871 - DNA, 1128 bp, Artificial Sequence
  derived and/or modified sequence
atggcaatgacgggttggtcttgtctggtgaccggcgctggcggatttctggggcagagaataattaggctgctggtgaaggagaaggagcttaaggagatcagggtcctagataaagcctttggccctgagctgcgagaggagttctccaaactccagaataagacgaaactcaccgtgctggagggggacatcctcgacgaacctttcctcaagcgggcatgtcaggacgtgtcagtcattatacatactgcttgtatcatcgatgtgtttggcgtcactcatcgtgagtctatcatgaacgtcaacgtaaagggaacccagctcctgctggaagcttgtgtgcaagcaagcgtgcctgtcttcatttacacgagttctatcgaggtagctggccctaatagttataaggagatcattcaaaatggacatgaggaggagcccctggagaatacatggcccgcaccatatcctcactccaagaaactggcagagaaggccgtattggcagcaaatggatggaatctgaaaaatggcggaacactctacacttgcgccttgaggccaatgtatatctacggggagggcagtagattcttgtcggcctccattaatgaagctcttaacaacaacgggattttgagcagcgtcggcaaattttctacggtcaaccccgtgtatgttgggaatgtggcgtgggcacacattcttgccctcagggctttacaagaccccaaaaaagcaccgtcaataagagggcagttttactatatatctgatgacacgccacatcagtcatacgataatctgaattacactctgagtaaagaatttggattgaggttagactctcgctggagctttcctctgtccctgatgtactggatcgggtttctgctcgaaatcgtgtcatttctcctcagacctatctacacctacagaccgcctttcaataggcatatcgtgactttatccaatagtgtgttcacattttcgtataagaaagcacagcgggacctcgcgtacaagccgctgtactcctgggaagaggccaagcagaaaactgtggagtgggttggtagcttagtggaccgccataaagaaaccctgaaatcaaagactcagtag

SEQ ID NO: 337872 - DNA, 1128 bp, Artificial Sequence
  derived and/or modified sequence
atggccatgaccggctggagctgcctggtgaccggcgccggcggcttcctgggccagagaatcatcagactgctggtgaaggagaaggagctgaaggagatcagagtgctggacaaggccttcggccccgagctgagagaggagttcagcaagctgcagaacaagaccaagctgaccgtgctggagggcgacatcctggacgagcccttcctgaagagagcctgccaggacgtgagcgtgatcatccacaccgcctgcatcatcgacgtgttcggcgtgacccacagagagagcatcatgaacgtgaacgtgaagggcacccagctgctgctggaggcctgcgtgcaggccagcgtgcccgtgttcatctacaccagcagcatcgaggtggccggccccaacagctacaaggagatcatccagaacggccacgaggaggagcccctggagaacacctggcccgccccctacccccacagcaagaagctggccgagaaggccgtgctggccgccaacggctggaacctgaagaacggcggcaccctgtacacctgcgccctgagacccatgtacatctacggcgagggcagcagattcctgagcgccagcatcaacgaggccctgaacaacaacggcatcctgagcagcgtgggcaagttcagcaccgtgaaccccgtgtacgtgggcaacgtggcctgggcccacatcctggccctgagagccctgcaggaccccaagaaggcccccagcatcagaggccagttctactacatcagcgacgacaccccccaccagagctacgacaacctgaactacaccctgagcaaggagttcggcctgagactggacagcagatggagcttccccctgagcctgatgtactggatcggcttcctgctggagatcgtgagcttcctgctgagacccatctacacctacagaccccccttcaacagacacatcgtgaccctgagcaacagcgtgttcaccttcagctacaagaaggcccagagagacctggcctacaagcccctgtacagctgggaggaggccaagcagaagaccgtggagtgggtgggcagcctggtggacagacacaaggagaccctgaagagcaagacccagtag

SEQ ID NO: 337873 - DNA, 543 bp, Artificial Sequence
  derived and/or modified sequence
taagcacagactccaccgccccccccggcagccgtggcagtggccgtcacccccgtaccccaatttccccgagcatgcacagaagctgagtttgcctgtcatagttacaatgaatgcgttgcactagagtatcgctgtgaccgccgacctgactgtcgagacatgagtgacgagttgaattgcgaagagccggtgctaggaatcagtcccacattcagtctgctggtggagaccacatcactcccgccccgaccagagactaccatcatgagacagccccctgtaacccacgctccccagccactcctccccggtagcgtgagacccctaccatgtgggccccaggaagcggcttgcagaaacgggcactgcatccctagggactacctctgcgacggtcaggaggactgcgaagatggctctgatgagctagactgcggccctccgcctccttgtgagccaaacgagttcccatgcggaaatgggcactgtgctttgaagctttggagatgtgatggtgatttcgattgtgaggatcgatag

SEQ ID NO: 337874 - DNA, 567 bp, Artificial Sequence
  derived and/or modified sequence
atgaacgccggtgcatctgtgctgacgttcccctgggccgtttatgggcttcctagggcacgcccagcagtcaccgatctgacaggaccgcttccaccctcttctccagcattgccttccgtccttatcaacattcggacctccgtacagacagtggtggttggccacgccgtcgaattcgaatgccttgcactgggtgatccaaagcctcaggttacctggtcgaaagttggcggacacttgcgacctggcattgtccagtcgggtggagtcgtgcggattgctcatgttgagcttgcagatgcaggtcagtataggtgtaccgcaacaaacgcggcaggaacaacccagtctcatgtgttactgctggtgcaggctctgccccagatctccatgcctcaggaggttagagtgcccgcgggcagcgccgctgttttcccttgtatcgcctctggctacccaactccagacataagttggtccaagctcgacggtagtctgccccccgattcccggttggaaaataacatgctaatgctgccttccgtacgccctcaggacgcctag

SEQ ID NO: 337875 - DNA, 594 bp, Artificial Sequence
  derived and/or modified sequence
tgaaccccaagcggcctctacctggggacctgtgagcgctgttcttgccacgggcatagtgaggcctgtgagcccgagaccggcgcctgtcaagggtgccaacaccacaccgaaggacctcggtgcgagcagtgccagcctggttattacggagacgcacagaggggaacacctcaagactgccaactttgcccgtgctatggagaccctgctgccggacaagcagcccacacttgctttttggatactgacggacaccctacctgtgacgcttgctctcctggacactcaggtaggcactgcgaaagatgcgctcccggttactacggcaacccctcacaaggacaaccctgtcaacgcgactcacaggtcccgggacccatcggttgcaattgcgacccacaaggctccgtgagctctcagtgtgacgctgcagggcagtgtcaatgtaaggtgtctccaaatccatgtccatgcggggcatgttcagcacccctgccccgcccatgcggagaaattcgacagcacctggttgaagcggagacctgggcatggggagccgggcacggaggccagggtagagggtgtccgtag

SEQ ID NO: 337876 - DNA, 492 bp, Artificial Sequence
  derived and/or modified sequence
ccacctgtgaagattgagagctcatcccctagcgtgactgagggacagactctggacctgaattgtgtggtggccggcagtgcgcacgctcaggttacttggtacaggagaggtgggtcactgcccccacatactcaggtgcatgggtcgagacttaggcttcctcaagtgagccccgcagactcaggggagtatgtgtgccgagtagaaaatggctccggtcccaaggaagcgtcaatcaccgtcagctactgcccaccagcatggagttggtgcgtgcccggctccacacgacccatccggattgagccctcttcatctcatgtagccgagggccagactttggatttgaattgtgttgtcccaggacaggcgcacgcccaggtaacatggcacaagagggggggcagcttgcctgccaggcatcagacccatggatctctgctcaggctacatcaggtgacccctgcagactctggcgagtatgtctag

SEQ ID NO: 337877 - DNA, 573 bp, Artificial Sequence
  derived and/or modified sequence
ccagaggacattgagacagtgaccgctagccagatgaggtggactcatagctacctgtctgacgatgaagacatgttggccgactcaatctccggagacgacttgggatccggggatcttggatctggggatttccaaatggtatatttccgtgcactggtcaacttcactagatccattgaatactctcctcagttggaagatgctggatccagggaattccgggaggtaagtgaagccgtcgtggatacgctggagtctgaatatttgaaaatacccggcgaccaggtggtatcagtggtgtttatcaaggaattggatgggtgggtattcgtggagctcgatgtgggatcagagggcaacgctgacggggctcagatccaagagatgctccttcgggtgatcagctccggttcagttgcgagctacgtaacttcccctcaggggtttcaattcagacgcctgggaactggcgagccaattttggtttcagggattgcgagctcgcggctcgtcgggtcgcctttctccgtgtcggcaattggctctcaactagggctggctcaccactag

SEQ ID NO: 337878 - DNA, 624 bp, Artificial Sequence
  derived and/or modified sequence
ggggagtccagagagggaagaggctacagacaagtggcccagagggtggctgagcgttctcccgtccccagtttactatcacacagcggatgcgtggtacacacaagattatctcctgtccctagcgttagccccccgataaggatcgaatcatcatcccctactgtggtagaggggcagacactggatttgaactgcgtggtagctcggcagcctcaagccattattacttggtataaaaggggtggaagcctaccctctcgtcaccagacccatggtagtcacctgcggctccatcagatgtccgtcgcagactccggggaatacgtctgccgagcgaataataacatcgacgccctcgaagcgagcattgtgatatccgtgtccccctcggcaggtagtccttcagctcccggatcttcgatgcccatcaggattgagtcttcctctagtcacgtagccgaaggtgagacgctggacctgaattgcgtagtgcccggacaagctcacgcccaggttacttggcacaagaggggaggaagtctgccatcccatcaccaaacccgcggatccaggctcagattgcaccatgtctccccagctgattcgggcgagtatgtttag

SEQ ID NO: 337879 - DNA, 538 bp, Artificial Sequence
  derived and/or modified sequence
cagcacagacccccccacccccgccggccgctgtggcggtcgcagtgacaccagtgccccagttcccaagagcctgcacggaggccgagtttgcctgccacagctacaatgagtgtgtggccctggagtatcgctgtgaccggcggcccgactgcagggacatgtctgatgagctcaattgtgaggagccagtcctgggtatcagccccacattctctctccttgtggagacgacatctttaccgccccggccagagacaaccatcatgcgacagccaccagtcacccacgctcctcagcccctgcttcccggttccgtcaggcccctgccctgtgggccccaggaggccgcatgccgcaatgggcactgcatccccagagactacctctgcgacggacaggaggactgcgaggacggcagcgatgagctagactgtggccccccgccaccctgtgagcccaacgagttcccctgcgggaatggacattgtgccctcaagctgtggcgctgcgatggtgactttgactgtgaggaccg

SEQ ID NO: 337880 - DNA, 856 bp, Artificial Sequence
  derived and/or modified sequence
aaggatatggatggagtgtgtgagtgctcagatgaaccgatgaagattgaatcagtgtgaaccgggcatggtggaacgcacctgtagtcccacctactcaggaggctaagctgggagcattgcttgagcgcatgaattctaggctgtggtgagccgtgatcacacctgtgaatacaaccaagaccctttgtctaaaaaaaaaaaagaagtggacacgtgagtgagtaaatgcataagacctgacaagtgagtgtgtttgtgagtgaatgcatgaaaaagtgaatgaggagtgaatgaatgctggagcttcagtgctcacctttccttgggcagtctatggcctccctcgggccaggcctgcagtgactgatctcactggacctctgcctccctcctccccagccctgccctcggtgctcatcaacatccggacctctgtgcagaccgtggtggttggccacgccgtggagttcgaatgcctggcactgggtgaccccaagcctcaggtgacatggagcaaagttggagggcacctgcggccaggcattgtgcagagcggaggtgtcgtcaggatcgcccacgtagagctggctgatgcgggacagtatcgctgcactgccaccaacgcagctggcaccacacaatcccacgtcctgctgcttgtgcaagccttgccccagatctcaatgccccaagaagtccgtgtgcctgctggttctgcagctgtcttcccctgcatagcctcaggctaccccactcctgacatcagctggagcaagctggatggcagcctgccacctgacagccgcctggagaacaacatgctgatgctgccctcagtccgaccccaggacgc

SEQ ID NO: 337881 - DNA, 589 bp, Artificial Sequence
  derived and/or modified sequence
cacgcccagtggcctctacctgggtacctgtgaacgctgcagctgccatggccactcagaggcctgcgagccagaaacaggtgcctgccagggctgccagcatcacacggagggccctcggtgtgagcagtgccagccaggatactacggggacgcccagcgggggacaccacaggactgccagctgtgcccctgctacggagaccctgctgccggccaggctgcccacacttgttttctggacacagacggccaccccacctgtgatgcgtgctccccaggccacagtgggcgtcactgtgagaggtgcgcccctggctactatggcaaccccagccagggccagccatgccagagagacagccaggtgccagggcccataggctgcaactgtgacccccaaggcagcgtcagcagccagtgtgatgctgctggtcagtgccagtgcaaggtcagtccgaatccctgtccctgcggggcctgctctgccccgctgcccagaccctgcggggaaatcaggcagcatctggtggaagccgagacctgggcatggggggcagggcatgggggacagggcaggggctgcccg

SEQ ID NO: 337882 - DNA, 637 bp, Artificial Sequence
  derived and/or modified sequence
cctgaggacatagagaccgtcacagcaagccaaatgcgctggacacattcgtacctttctgatgatgaggacatgctggctgacagcatctcaggagacgacctgggcagtggggacctgggcagcggggacttccagatggtttatttccgagccctggtgaatttcactcgctccatcgagtacagccctcagctggaggatgcaggctccagagagttccgagaggtgtccgaggctgtggtagacacgctggagtcggagtacttgaaaattcccggagaccaggttgtcagtgtggtgttcatcaaggagctggatggctgggtttttgtggagctggatgtgggctcggaagggaatgcggatggggctcagattcaggagatgctgctcagggtcatctccagcggctctgtggcctcctacgtcacctctccccagggattccagttccgacgcctgggcacaggtgagcctatcctggtgtctgggatcgcctcctccagactcgtggggtcccctttcagtgtctctgccataggctcccaacttgggcttgcacaccactagaaacagggagctcactactcctgagtctgccccatcgatctttacacaatcttggcttggtaga

SEQ ID NO: 337883 - DNA, 621 bp, Artificial Sequence
  derived and/or modified sequence
ggtgagagcagagagggcagggggtacagacaagtggcgcagagggtggcagagaggtccccggtgccatcactgttatctcactctggctgcgtggtccacacccgtctgtccccagtgcccagcgtctccccaccgatcaggatcgagtcgtcttcccccacggtggtggaagggcagaccttggatctgaactgcgtggtcgccaggcagccccaggctatcatcacatggtacaagcgtgggggcagccttccctcccgacaccagacccatggctcccacctgcggttgcaccaaatgtctgtggctgactcgggcgagtatgtgtgccgggccaacaacaacatcgatgccctggaggcctccatcgtcatctccgtctcccctagcgccggcagcccctccgcccctggcagctccatgcccatcagaattgagtcatcctcctcacacgtggccgaaggggagaccctggatctgaactgcgtggtccccgggcaggcccatgcccaggtcacttggcacaagcgtgggggcagcctccccagtcaccatcagacccgcggctcacggctgcggctgcaccatgtgtccccggccgactcgggtgaatacgtg

SEQ ID NO: 337884 - DNA, 543 bp, Artificial Sequence
  derived and/or modified sequence
tgagcccagaccccacctcctcctcctgctgctgtggccgtggccgtgacccctgtgccccagttcccccgggcctgcacagaagctgagtttgcctgccacagctacaatgaatgtgtggccctggagtaccgctgtgaccggcggccagactgccgggacatgtctgatgagctgaactgtgaggagcctgtgctgggcatcagccccaccttcagcctgctggtggagaccaccagcctgccccccaggcctgagaccaccatcatgaggcagccccctgtgacccacgccccccagcccctgctgcccggctctgtgcggcccctgccctgtggcccccaggaggccgcctgcagaaatggccactgcatcccccgggactacctgtgtgatggccaggaggactgtgaagatggcagtgatgagctggactgtggccccccaccaccctgtgagcccaatgagttcccctgtggaaatggccactgtgccctgaagctgtggaggtgtgatggagactttgactgtgaggacagatag

SEQ ID NO: 337885 - DNA, 567 bp, Artificial Sequence
  derived and/or modified sequence
atgaatgctggggcctctgtgctgaccttcccctgggccgtgtatggcctgccccgggcccggcctgctgtgacagacctgaccggccccctgccccccagcagccctgccctgcccagcgtgctgatcaacatccgcacctctgtgcagacagtggtggtgggccatgctgtggagtttgaatgtctggccctgggggaccccaagccccaggtgacctggagcaaggtgggcggccacctgcggcccggcatcgtgcagagcggcggcgtggtgcgcatcgcccacgtggagctggctgatgctggccagtaccgctgcacagccaccaatgctgctggcaccacccagagccacgtgctgctgctggtgcaggccctgccccagatctccatgccccaggaggtgcgggtgcctgctggcagcgctgctgtgttcccctgcatcgccagcggctaccccaccccagacatctcctggagcaagctggatggcagcctgcccccagacagccggctggagaacaacatgctgatgctgcccagcgtgcggccccaggatgcctag

SEQ ID NO: 337886 - DNA, 594 bp, Artificial Sequence
  derived and/or modified sequence
tgaacacccagcggcctgtacctgggcacctgtgagcgctgcagctgccacggccacagcgaggcctgtgagcctgagactggagcctgccagggctgccagcaccacacagagggcccccgctgtgagcagtgccagcccggctactatggagatgcccagaggggcaccccccaggactgccagctgtgcccctgctatggagaccctgctgctggccaggccgcccacacctgcttcctggacacagatggccaccccacctgtgatgcctgcagccctggccacagcggccgccactgtgagcgctgtgcccctggctactacggcaaccccagccagggccagccctgccagagggacagccaggtgcccggccccatcggctgcaactgtgacccccagggctctgtgagcagccagtgtgatgctgctggccagtgccagtgcaaggtgagccccaacccctgcccctgtggggcctgcagcgcccccctgccccggccctgtggggagatccggcagcacctggtggaggccgagacctgggcctggggcgccggccatggaggccagggccggggctgcccctag

SEQ ID NO: 337887 - DNA, 492 bp, Artificial Sequence
  derived and/or modified sequence
cctcctgtgaagattgagagcagcagccccagcgtgacagagggccagaccctggacctgaactgtgtggtggccggcagcgcccacgcccaggtgacctggtaccgccggggcggcagcctgcccccccacacccaggtgcacggcagccggctgcggctgccccaggtgtccccagctgacagcggggagtatgtgtgccgggtggagaatggaagtggccccaaggaggccagcatcaccgtgtcctactgccccccagcctggagctggtgtgtgcccggcagcacccggcccatccgcatcgagcccagcagcagccacgtggccgagggccagaccctggacctgaactgtgtggtgcccggccaggcccacgcccaggtgacctggcacaagagaggaggcagcctgcctgcccggcaccagacccacggcagcctgctgcggctgcaccaggtgaccccagctgacagcggggagtatgtgtag

SEQ ID NO: 337888 - DNA, 573 bp, Artificial Sequence
  derived and/or modified sequence
cctgaggacatcgagaccgtgacagccagccagatgcgctggacccacagctacctgagtgatgatgaggacatgctggccgacagcatctctggagatgacctgggcagcggggacctgggcagcggggacttccagatggtgtacttccgggccctggtgaacttcaccaggagcattgagtacagcccccagctggaggatgctggcagccgggagttccgggaggtgtctgaggccgtggtggacaccctggagagcgagtacctgaagatccctggggaccaggtggtgtctgtggtgttcatcaaggagctggatggctgggtgtttgtggagctggatgtgggcagcgagggcaatgctgatggagcccagatccaggagatgctgctgcgggtcatcagcagcggctctgtggccagctatgtgaccagcccccagggcttccagttccggcggctgggcactggagagcccatcctggtgtctggcatcgccagcagccggctggtgggcagccccttctctgtgtctgccatcggcagccagctgggcctggcccaccactag

SEQ ID NO: 337889 - DNA, 624 bp, Artificial Sequence
  derived and/or modified sequence
ggggagagccgggagggccggggctaccggcaggtggcccagagggtggccgagaggagccctgtgcccagcctgctgagccacagcggctgtgtggtgcacacccggctgagccctgtgcccagcgtgtccccacccatcagaattgagagcagcagccccaccgtggtggagggccagaccctggacctgaactgtgtggtggcccggcagccccaggccatcatcacctggtacaagaggggcggcagcctgcccagccgccaccagacccacggcagccacctgcggctgcaccagatgtctgtggccgacagcggggagtatgtgtgccgggccaacaacaacattgatgccctggaggccagcatcgtcatctctgtgagccccagcgctggcagccccagcgcccctggcagctccatgcccatccgcatcgagagcagcagcagccacgtggccgagggggagaccctggacctgaactgtgtggtgcccggccaggcccacgcccaggtgacctggcacaagagaggaggcagcctgcccagccaccaccagacccggggcagccggctgcggctgcaccacgtgtccccagctgacagcggggagtatgtgtag

SEQ ID NO: 337890 - DNA, 543 bp, Artificial Sequence
  derived and/or modified sequence
tgagcccagacccccccccccccccccgccgccgtggccgtggccgtgaccccagtgccccagttcccccgggcttgtactgaggcagagttcgcatgccattcatataatgagtgcgtcgctctggaatatagatgtgaccgcaggcccgactgtagggatatgagcgacgaactgaactgcgaggagccagtgctaggaatatcgcctacttttagcctcctcgtggagaccactagcctgcccccccgtcctgaaacaaccatcatgagacagccccccgtcacacacgctccacagcccctgcttccaggatcggtgcgacctctaccctgcggtccacaggaagcagcatgccggaatggccactgcataccacgcgactatttatgtgatgggcaggaggactgcgaggacggcagcgatgagctcgactgcggaccaccccctccatgcgagcccaatgagttcccctgtggaaacgggcattgcgcactgaaactttggcgctgtgatggtgactttgactgtgaagatcgctag

SEQ ID NO: 337891 - DNA, 567 bp, Artificial Sequence
  derived and/or modified sequence
atgaacgccggcgccagcgtgctgaccttcccctgggccgtgtacggcctgcctagagctaggcctgccgtgactgacctgaccggacccctaccaccatcaagccctgccctgccatccgtacttatcaacataaggacttctgtccaaaccgtcgtagtcggccatgccgttgaattcgagtgcctagcactgggcgaccctaaaccacaagtcacatggtcgaaagtgggcggccatctgcgaccaggtatagtgcagtcaggaggagtagtgaggatcgcccacgtggagctggctgatgctggccagtatcgctgcacagctacaaacgccgcaggaactactcagagccacgtacttctgctggtccaggccctgccccagatttcaatgccgcaggaagtccgcgtgcccgccggctcggcagcagtcttcccgtgtattgcatctgggtatcccactcctgacattagctggtccaagctggatggctccttgcctccagatagtcgtttagagaataacatgctcatgttgccttccgttagacctcaggacgcatag

SEQ ID NO: 337892 - DNA, 594 bp, Artificial Sequence
  derived and/or modified sequence
tgaacccccagcggcctgtacctgggcacctgcgagcggtgcagctgtcatgggcactctgaagcttgcgagcccgagacaggcgcttgtcaaggctgccagcaccacacggaagggcccaggtgcgagcagtgccagcccggttattatggcgacgcccaaagaggtactcctcaggattgtcaactttgtccgtgctatggcgatcctgcagctggacaggcggctcatacttgctttcttgatactgatggtcaccccacctgtgatgcatgctcaccaggccattccggccggcattgtgaacgctgtgctccgggctactatgggaacccttctcagggccagccctgccagcgagacagccaggtgcccggacccataggctgcaattgcgacccccagggttcagtctcttcccaatgcgacgctgccggccagtgccaatgtaaagtgtcccccaatccctgcccgtgtggcgcctgttccgctcctctgccgcgcccatgcggagagatcaggcagcacctggtcgaagccgagacctgggcatggggcgccggacacgggggtcaggggagaggatgcccgtag

SEQ ID NO: 337893 - DNA, 492 bp, Artificial Sequence
  derived and/or modified sequence
ccccccgtgaagatcgagagcagcagccccagcgtgaccgagggccagaccctggatctgaactgcgtggtggctgggagcgctcacgcccaggtcacctggtacagacgcgggggatccctgcctccgcacacccaggtgcatgggagtagattacggctcccacaggtgagccctgctgattccggagaatatgtgtgtagagtcgagaatggatctggccccaaagaggcatccatcacggtgagctattgtccccccgcctggtcctggtgcgtgccagggagcacccgccctataaggatcgaaccctcctcgagtcacgtcgcggagggacagaccttggatctcaactgcgtagtaccaggccaggcacatgcacaggtgacctggcacaagcgcggtggttcactgcccgcgaggcatcaaacacacgggagcttgctccgattgcaccaggttaccccagccgacagtggagaatatgtctag

SEQ ID NO: 337894 - DNA, 573 bp, Artificial Sequence
  derived and/or modified sequence
cccgaggacatcgagaccgtgaccgccagccagatgcggtggacccactcttacctgtccgacgatgaagatatgctggcagatagcatctcaggcgatgacctgggaagtggagatctgggatcaggcgatttccaaatggtctacttccgcgcgctggtgaactttactcgctccattgagtactcgccacagttagaggatgctgggtctcgagagttcagggaggtaagcgaggctgttgtggacacgctggagagcgaatacttaaagatcccaggcgaccaggtggtgtctgtggtttttattaaggagctggacggttgggtgttcgtcgagctggacgtcggatcagaaggcaacgcagatggtgcccagattcaagagatgctgttacgggtcataagtagcggaagcgttgctagctacgtaacaagccctcaaggattccaattcaggcgcctcggcaccggtgaacccattctggtctctgggatcgcaagcagcagactcgtgggctcaccctttagcgtgagcgcaatcggttctcagttaggactagctcaccactag

SEQ ID NO: 337895 - DNA, 624 bp, Artificial Sequence
  derived and/or modified sequence
ggcgagagccgggagggccggggctaccggcaggtggcccagcgggtggcagagcgctctcccgttccatccttactgagccattctggctgcgtggtgcatacaagactgagccccgtgccttctgttagccctccaattcgaattgaaagctcctctcccacagtggtcgaggggcagacactcgatctcaattgcgttgtcgcaaggcagccacaagctataataacctggtataagcggggcggatccctcccgtccagacaccagacacacggcagccaccttcggttacaccaaatgtccgtggctgacagcggcgagtacgtgtgccgcgcgaataacaatatcgacgccctcgaagcaagcatcgtcatctccgttagtccatcagctggttcaccctcagcccccggatcctctatgcctatcaggatcgagagttccagcagccatgttgccgaaggcgagaccctcgacctgaactgtgtggtcccaggccaagcccacgcacaggttacatggcataaaagaggtggtagtctacctagtcatcaccagacacgtggttcacgcctgaggctccaccatgtttccccggccgactctggagagtacgtttag

SEQ ID NO: 337896 - DNA, 543 bp, Artificial Sequence
  derived and/or modified sequence
tgagcacagaccccacctcctcccccagccgcagtggctgtcgcagtcacccccgtgcctcagttccccagagcatgtaccgaagctgagttcgcttgtcactcctacaacgagtgtgtggcacttgaatacaggtgcgaccgcagacccgactgcagagacatgtctgacgagttaaattgcgaggagcctgttctgggcatatcgccaaccttctcactgttggtagagaccacgtccctgcccccaagacccgaaacaactatcatgaggcaaccccctgtcacccatgcaccccaacctttactgccaggatccgtcaggcctcttccttgcggaccccaggaggcagcttgccgtaacggccactgcataccacgtgactacctgtgcgatggccaagaagattgtgaggacggctccgacgagctggattgtgggccaccccctccatgtgagccaaacgagtttccttgcggcaacggtcattgtgccctgaaactctggcggtgtgacggtgactttgattgcgaggatcgctag

SEQ ID NO: 337897 - DNA, 567 bp, Artificial Sequence
  derived and/or modified sequence
atgaacgcaggcgcatctgtactcactttcccgtgggcagtttacgggctacctagagcacggccagcagtgacagatctgacggggcctctaccaccaagcagccctgctctgccatctgtccttattaatatccggacgtccgtgcagactgtcgtggttgggcacgccgttgagttcgagtgcctcgccttgggggatccaaagccccaggttacctggtcaaaggtgggaggccacctcagaccaggcatcgttcaaagcggcggtgtcgtaagaattgcgcacgtcgagttagcagatgctggacagtacaggtgcaccgctaccaacgccgctgggacgacccagtctcatgtgctactgctggtgcaagccctgccccaaatctccatgccccaggaggtacgcgtgccagcgggtagtgccgctgtgtttccatgcattgccagcggttaccctactcccgacatcagctggtcaaagctggatgggtctttgcctcctgactcccggttggaaaataatatgctgatgttgcctagtgtcaggccgcaggatgcttag

SEQ ID NO: 337898 - DNA, 594 bp, Artificial Sequence
  derived and/or modified sequence
tgaactcccagtggtctgtacctgggaacatgtgaacgatgcagctgtcacggacactccgaggcttgtgagcccgagactggggcttgccaggggtgccagcaccacactgaggggcctcggtgcgagcagtgtcaaccaggatattacggggatgcacagcggggtactccacaagattgtcagttgtgtccctgctacggggacccggctgctggtcaggcggcacacacatgctttttagataccgacggccatccgacgtgcgacgcatgctccccagggcacagtggccgacactgtgaaaggtgtgcaccgggatactacggtaacccgtcgcagggacagccctgtcaacgggattcacaggtgcctgggccaatcggatgcaactgcgacccacaggggtccgtgagttcccaatgcgatgcagcaggacaatgccagtgtaaggtctcccccaacccatgcccatgcggcgcttgctctgccccactgcctcgcccttgtggagagatcagacagcatctcgtcgaggccgaaacctgggcttggggtgccggacacggtggtcaagggcgaggttgtccttag

SEQ ID NO: 337899 - DNA, 492 bp, Artificial Sequence
  derived and/or modified sequence
cctcctgtgaagattgagtcttcatccccctcagtgacagagggacagacccttgatttgaattgtgtggtggcgggttctgcccacgcccaggtcacatggtaccggcgtggcggatcattgcctccccacacccaagtacacggaagccggttgcgcctgccccaggtcagtccagcagattctggcgagtatgtatgtcgggtcgagaacgggagcggaccaaaggaggcgtccattactgtatcttattgcccacccgcatggtcctggtgtgtgccaggttcaacacggccaatccgtatcgagccttcgtccagccacgtggctgaagggcaaactcttgacctaaactgcgttgtcccaggccaggcacacgcacaggtcacatggcacaagagggggggtagtctgcccgcacggcaccagacccatgggagccttctcaggttgcatcaggtaacacctgccgacagtggagagtatgtgtag

SEQ ID NO: 337900 - DNA, 573 bp, Artificial Sequence
  derived and/or modified sequence
cctgaggacattgagactgtgaccgcatctcaaatgaggtggacccactcttatctgtcggatgacgaagacatgctggctgattccatctcgggggacgatcttggtagtggcgacctgggcagcggagatttccagatggtttacttccgcgctttggtcaatttcactcggagtatcgagtatagcccccagctagaggatgccggatcacgagagttccgcgaggtgagcgaggccgtcgtagacacactggagtctgaatacctcaagatccctggagatcaggtggtttccgttgtgtttattaaggagcttgatggatgggtcttcgtcgagctagacgtcggtagtgagggaaatgctgatggggcacagatccaagagatgttactgcgcgtgatctcatccgggagcgtggcgagttacgtcactagcccccagggctttcagtttagacgactcggaacaggggagcccatcctcgtcagtggcatagcttctagtcgcctggtcggctcgcccttttctgtttccgccatcggcagccagctgggtcttgcacaccactag

SEQ ID NO: 337901 - DNA, 624 bp, Artificial Sequence
  derived and/or modified sequence
ggagagtcccgtgaagggaggggatatcggcaggtagctcagagagtggcggagcgatctcccgtgccgtcattgctgagtcactctggatgcgttgtccacactagactgtcacccgtcccatctgtcagcccccctattcggattgagagctcctcccctacagtcgtggaaggtcagacgcttgatttaaattgtgttgttgccagacagcctcaggcaataattacctggtacaagagaggcggaagcctgccaagtaggcaccagacccatggttcacatcttcgcctacatcaaatgtcagttgctgattctggtgagtatgtctgccgcgctaacaataatattgacgctcttgaggcctctatcgtcatttctgtcagcccttctgctggaagtccaagtgcccctggctccagcatgccgattcggatcgaatcaagctcatcgcacgtcgcagagggagaaaccttagatttaaactgcgttgtgccgggacaagcacatgcgcaggttacttggcacaaacggggaggctcactgcccagccaccaccaaacgcgcggatcccgcctgaggcttcatcacgtgagcccggcagactctggagagtacgtatag

SEQ ID NO: 337902 - DNA, 543 bp, Artificial Sequence
  derived and/or modified sequence
tgagcccagacccccccccccccccccgccgccgtggccgtggccgtgacccccgtgccccagttccccagagcctgcaccgaggccgagttcgcctgccacagctacaacgagtgcgtggccctggagtacagatgcgacagaagacccgactgcagagacatgagcgacgagctgaactgcgaggagcccgtgctgggcatcagccccaccttcagcctgctggtggagaccaccagcctgccccccagacccgagaccaccatcatgagacagccccccgtgacccacgccccccagcccctgctgcccggcagcgtgagacccctgccctgcggcccccaggaggccgcctgcagaaacggccactgcatccccagagactacctgtgcgacggccaggaggactgcgaggacggcagcgacgagctggactgcggccccccccccccctgcgagcccaacgagttcccctgcggcaacggccactgcgccctgaagctgtggagatgcgacggcgacttcgactgcgaggacagatag

SEQ ID NO: 337903 - DNA, 567 bp, Artificial Sequence
  derived and/or modified sequence
atgaacgccggcgccagcgtgctgaccttcccctgggccgtgtacggcctgcccagagccagacccgccgtgaccgacctgaccggccccctgccccccagcagccccgccctgcccagcgtgctgatcaacatcagaaccagcgtgcagaccgtggtggtgggccacgccgtggagttcgagtgcctggccctgggcgaccccaagccccaggtgacctggagcaaggtgggcggccacctgagacccggcatcgtgcagagcggcggcgtggtgagaatcgcccacgtggagctggccgacgccggccagtacagatgcaccgccaccaacgccgccggcaccacccagagccacgtgctgctgctggtgcaggccctgccccagatcagcatgccccaggaggtgagagtgcccgccggcagcgccgccgtgttcccctgcatcgccagcggctaccccacccccgacatcagctggagcaagctggacggcagcctgccccccgacagcagactggagaacaacatgctgatgctgcccagcgtgagaccccaggacgcctag

SEQ ID NO: 337904 - DNA, 594 bp, Artificial Sequence
  derived and/or modified sequence
tgaacccccagcggcctgtacctgggcacctgcgagagatgcagctgccacggccacagcgaggcctgcgagcccgagaccggcgcctgccagggctgccagcaccacaccgagggccccagatgcgagcagtgccagcccggctactacggcgacgcccagagaggcaccccccaggactgccagctgtgcccctgctacggcgaccccgccgccggccaggccgcccacacctgcttcctggacaccgacggccaccccacctgcgacgcctgcagccccggccacagcggcagacactgcgagagatgcgcccccggctactacggcaaccccagccagggccagccctgccagagagacagccaggtgcccggccccatcggctgcaactgcgacccccagggcagcgtgagcagccagtgcgacgccgccggccagtgccagtgcaaggtgagccccaacccctgcccctgcggcgcctgcagcgcccccctgcccagaccctgcggcgagatcagacagcacctggtggaggccgagacctgggcctggggcgccggccacggcggccagggcagaggctgcccctag

SEQ ID NO: 337905 - DNA, 492 bp, Artificial Sequence
  derived and/or modified sequence
ccccccgtgaagatcgagagcagcagccccagcgtgaccgagggccagaccctggacctgaactgcgtggtggccggcagcgcccacgcccaggtgacctggtacagaagaggcggcagcctgcccccccacacccaggtgcacggcagcagactgagactgccccaggtgagccccgccgacagcggcgagtacgtgtgcagagtggagaacggcagcggccccaaggaggccagcatcaccgtgagctactgcccccccgcctggagctggtgcgtgcccggcagcaccagacccatcagaatcgagcccagcagcagccacgtggccgagggccagaccctggacctgaactgcgtggtgcccggccaggcccacgcccaggtgacctggcacaagagaggcggcagcctgcccgccagacaccagacccacggcagcctgctgagactgcaccaggtgacccccgccgacagcggcgagtacgtgtag

SEQ ID NO: 337906 - DNA, 573 bp, Artificial Sequence
  derived and/or modified sequence
cccgaggacatcgagaccgtgaccgccagccagatgagatggacccacagctacctgagcgacgacgaggacatgctggccgacagcatcagcggcgacgacctgggcagcggcgacctgggcagcggcgacttccagatggtgtacttcagagccctggtgaacttcaccagaagcatcgagtacagcccccagctggaggacgccggcagcagagagttcagagaggtgagcgaggccgtggtggacaccctggagagcgagtacctgaagatccccggcgaccaggtggtgagcgtggtgttcatcaaggagctggacggctgggtgttcgtggagctggacgtgggcagcgagggcaacgccgacggcgcccagatccaggagatgctgctgagagtgatcagcagcggcagcgtggccagctacgtgaccagcccccagggcttccagttcagaagactgggcaccggcgagcccatcctggtgagcggcatcgccagcagcagactggtgggcagccccttcagcgtgagcgccatcggcagccagctgggcctggcccaccactag

SEQ ID NO: 337907 - DNA, 624 bp, Artificial Sequence
  derived and/or modified sequence
ggcgagagcagagagggcagaggctacagacaggtggcccagagagtggccgagagaagccccgtgcccagcctgctgagccacagcggctgcgtggtgcacaccagactgagccccgtgcccagcgtgagcccccccatcagaatcgagagcagcagccccaccgtggtggagggccagaccctggacctgaactgcgtggtggccagacagccccaggccatcatcacctggtacaagagaggcggcagcctgcccagcagacaccagacccacggcagccacctgagactgcaccagatgagcgtggccgacagcggcgagtacgtgtgcagagccaacaacaacatcgacgccctggaggccagcatcgtgatcagcgtgagccccagcgccggcagccccagcgcccccggcagcagcatgcccatcagaatcgagagcagcagcagccacgtggccgagggcgagaccctggacctgaactgcgtggtgcccggccaggcccacgcccaggtgacctggcacaagagaggcggcagcctgcccagccaccaccagaccagaggcagcagactgagactgcaccacgtgagccccgccgacagcggcgagtacgtgtag

SEQ ID NO: 337908 - protein, 197 aa, Artificial Sequence
  derived and/or modified sequence
  misc_feature (1)..(1): Xaa can be any naturally occurring amino acid
XTPSGLYLGTCERCSCHGHSEACEPETGACQGCQHHTEGPRCEQCQPGYYGDAQRGTPQDCQLCPCYGDPAAGQAAHTCFLDTDGHPTCDACSPGHSGRHCERCAPGYYGNPSQGQPCQRDSQVPGPIGCNCDPQGSVSSQCDAAGQCQCKVSPNPCPCGACSAPLPRPCGEIRQHLVEAETWAWGAGHGGQGRGCP

SEQ ID NO: 337909 - protein, 163 aa, Artificial Sequence
  derived and/or modified sequence
PPVKIESSSPSVTEGQTLDLNCVVAGSAHAQVTWYRRGGSLPPHTQVHGSRLRLPQVSPADSGEYVCRVENGSGPKEASITVSYCPPAWSWCVPGSTRPIRIEPSSSHVAEGQTLDLNCVVPGQAHAQVTWHKRGGSLPARHQTHGSLLRLHQVTPADSGEYV

SEQ ID NO: 337910 - DNA, 387 bp, Artificial Sequence
  derived and/or modified sequence
atgaagcacaagtacaacaccctgagctggtacaagaaggagcggagcacccaactaaggaggtttatcgtgcaccaacctgaggtgggactcttcttcttcctgcgggatgtcgtgtataattacatcacggaaaaaaccacgtgccgatgtcctctgactcaggaacggccttgtgatactggtggtaagtttggccgaatctggatttgccaacctgaggaactgggtaaaatgcagatctggatctgccagccagaagaactcgggaagatgcagatagacaagaatcggacgatggtgcagcaaatgtggtacatctggtatggtggcctcgatacatccaccaacagcttgctcccgattcttgtgcgagggatggcctag

SEQ ID NO: 337911 - DNA, 720 bp, Artificial Sequence
  derived and/or modified sequence
gtcacccacggcctgcgggcctatgatggcctgagcctgcctgaagatattgaaacagtgacagccagccagatgcgctggacccacagctacctgagtgatgatgaggacatgctggccgacagcatctctggagatgacctgggcagcggggacctgggcagcggggacttccagatgggctcctggatggccggcttcctgtggagctggatgtgggccaggaagggcatgaggatgggcctgcgcttccgccgctgctgcagcggcagcagccctgctgccctgtggccacccaccagccccctgccccgggacagcagcagtgatgcctgggcccagtgccccagcagccaggagcccgcccggcggcccagcctgcctgccacagccaccatgtctgtgtggccctggagcattgctgtgactggaggccccacagctggcacctgcctgatgagcagcatcgtgcgcagccagagctgggtgtctgccccccacagcctgagcctgtggaggaggcacctgtacagacctggccagaggcagcccagctgtgacagccaccagagccccaccctgctgagcccctgcttccctgtgcccagcggcccctgccctgtgggcccccggcggccccatgctgccatgggcacagccagccctgagaccaccagcgccacagacagaagaacagccaggacagctgccatgtcctag

SEQ ID NO: 337912 - DNA, 720 bp, Artificial Sequence
  derived and/or modified sequence
gtgacccacggcctgagagcctacgacggcctgagcctgcccgaggacatcgagaccgtgaccgccagccagatgagatggacccacagctacctgagcgacgacgaggacatgctggccgacagcatcagcggcgacgacctgggcagcggcgacctgggcagcggcgacttccagatgggcagctggatggccggcttcctgtggagctggatgtgggccagaaagggcatgagaatgggcctgagattcagaagatgctgcagcggcagcagccccgccgccctgtggccccccaccagccccctgcccagagacagcagcagcgacgcctgggcccagtgccccagcagccaggagcccgccagaagacccagcctgcccgccaccgccaccatgagcgtgtggccctggagcatcgccgtgaccggcggccccaccgccggcacctgcctgatgagcagcatcgtgagaagccagagctgggtgagcgccccccacagcctgagcctgtggagaagacacctgtacagacccggccagagacagcccagctgcgacagccaccagagccccaccctgctgagcccctgcttccccgtgcccagcggcccctgccccgtgggccccagaagaccccacgccgccatgggcaccgccagccccgagaccaccagcgccaccgacagaagaaccgccagaaccgccgccatgagctag

SEQ ID NO: 337913 - protein, 440 aa, Artificial Sequence
  derived and/or modified sequence
MTSIKEQAAISRLLSFLQEWDNAGKVARSHILDKFIETNQGKTAPELEQEFSQGASLFLVRLTTSLRITYMTDSCLEKLLRSIGIFLSAVSSNRYLIEFLEVGGVLTLLEILGLEKIKEEAKKESVKLLQVIANSGRTYKELICESYGVRSIAEFLAKSKSEETQEEVQVLLDSLVHGNPKYQNQVYKGLIALLPCESPKAQQLSLQTLRTAQPIIGTTHPSIVDCVLKVLGTMHLEVQYEAIELIKDLVGYDVRQALLKGLVALLIPSVKEISKLQAKILSDPSVLQLTPSLPMFLQQAAAAKAIGVLARNDMSIAEELLYLRVVRGLMAAMGNTDHSNSQRLASLTLECFVQMFPLVAEHVRKCMGEELYQLFLSNAEDLYMKIDSIQADILAANTVNVTKALCLHGSSYSMNTLYGSRDSAQMAYLTHFEEDVESKE

SEQ ID NO: 337914 - DNA, 1818 bp, Artificial Sequence
  derived and/or modified sequence
tgtaggtgagaggcggctgaagagttgctgtattctgggaatgggcagggtcactcgtccgaacagagtcctatcctacgcggcggaagagtgtgccctttgacttgcatcgtctacctacctctgccatcctctaccagccgcaactgcgagggctggaggttggtccgcagtcattcacctggttcttaaggccagctagatttcgtggttatctccatcctggaggctgcgtggacgcccttctggaagcacgcatcccatgtcctctggggagtagtagagccaacttcaggactgattgatcatgacttctataaaggagcaggcagcaattagcaggctcttaagttttttacaggagtgggacaacgctggcaaagtcgcaaggagtcacatcctcgacaagttcattgaaaccaaccaaggcaagactgcccctgaactggagcaggagttttcccagggagccagtttgttcctggtacgcttgaccacctcgcttagaatcacctatatgactgactcatgtttagaaaagcttctcaggtccattggcatcttcttatcagctgtaagcagtaatcggtaccttatagaatttcttgaggttggaggtgtcctaaccctcttggaaatacttgggctagagaagatcaaggaggaggccaagaaggaatctgtcaaactacttcaggttattgcgaactctggcaggacatacaaggaactcatttgtgaaagctatggtgtacgatccatagcagaatttttggcaaagtctaagtcagaagagacccaggaggaagtgcaggttctgttggattctttggtccacggcaatcccaagtaccaaaatcaagtgtataaaggtctaatagctttgctgccctgcgagtccccaaaagcccagcagctgtccctgcagactctcaggactgcccagccaatcattgggaccacacaccccagcatcgtggactgcgtgctgaaggtgctgggcacgatgcacctggaagtccagtatgaagccatcgagttgatcaaagacctggtcggttacgatgtgcgccaggcgctgctcaagggcctcgtggcgctgctgataccgtcggtcaaggagatctccaaactgcaggccaagatcctcagtgacccctcggttctccagctcacccccagcctgccgatgtttttgcagcaggccgcggccgccaaggccatcggggtcctggcgcgcaacgacatgagcatcgccgaggagctgctgtacctgcgcgtggtgcgtggcctaatggccgccatgggcaacacggaccacagcaacagccagcggctggccagcctcacgctggagtgcttcgtgcagatgttccccttggtggcggagcacgtgcgcaagtgcatgggggaggaactctaccagctcttcctgagcaacgctgaggacttgtacatgaaaatagacagcattcaggcggacatcttggcggccaacacagtcaatgttaccaaagccctgtgcctccatggcagctcctacagcatgaacactctctatggctcgcgcgattcggctcagatggcctacctcacacacttcgaggaggatgtagaatcaaaggagtaacagcccctgtggcaaaccaggaaggccaaggctgcggggcagggaagcctggcaagaggaaggcgcctggggtcaagctcagagccactccacttggctccaggggggagacggggattaggcatcccagaggggcagaggaagagccgctggctgcgaagagtcaataaacagccttgatacctgtc

SEQ ID NO: 337915 - DNA, 1685 bp, Artificial Sequence
  derived and/or modified sequence
gaggcggctgaagagttgctgtattctgggaatgggcagggtcactcgtccgaacagagtcctatcctacgcggcggaagagtgtgccctttgacttgcatcgtctacctacctctgccatcctctaccagccgcaactgcgagggctggagccaacttcaggactgattgatcatgacttctataaaggagcaggcagcaattagcaggctcttaagttttttacaggagtgggacaacgctggcaaagtcgcaaggagtcacatcctcgacaagttcattgaaaccaaccaaggcaagactgcccctgaactggagcaggagttttcccagggagccagtttgttcctggtacgcttgaccacctcgcttagaatcacctatatgactgactcatgtttagaaaagcttctcaggtccattggcatcttcttatcagctgtaagcagtaatcggtaccttatagaatttcttgaggttggaggtgtcctaaccctcttggaaatacttgggctagagaagatcaaggaggaggccaagaaggaatctgtcaaactacttcaggttattgcgaactctggcaggacatacaaggaactcatttgtgaaagctatggtgtacgatccatagcagaatttttggcaaagtctaagtcagaagagacccaggaggaagtgcaggttctgttggattctttggtccacggcaatcccaagtaccaaaatcaagtgtataaaggtctaatagctttgctgccctgcgagtccccaaaagcccagcagctgtccctgcagactctcaggactgcccagccaatcattgggaccacacaccccagcatcgtggactgcgtgctgaaggtgctgggcacgatgcacctggaagtccagtatgaagccatcgagttgatcaaagacctggtcggttacgatgtgcgccaggcgctgctcaagggcctcgtggcgctgctgataccgtcggtcaaggagatctccaaactgcaggccaagatcctcagtgacccctcggttctccagctcacccccagcctgccgatgtttttgcagcaggccgcggccgccaaggccatcggggtcctggcgcgcaacgacatgagcatcgccgaggagctgctgtacctgcgcgtggtgcgtggcctaatggccgccatgggcaacacggaccacagcaacagccagcggctggccagcctcacgctggagtgcttcgtgcagatgttccccttggtggcggagcacgtgcgcaagtgcatgggggaggaactctaccagctcttcctgagcaacgctgaggacttgtacatgaaaatagacagcattcaggcggacatcttggcggccaacacagtcaatgttaccaaagccctgtgcctccatggcagctcctacagcatgaacactctctatggctcgcgcgattcggctcagatggcctacctcacacacttcgaggaggatgtagaatcaaaggagtaacagcccctgtggcaaaccaggaaggccaaggctgcggggcagggaagcctggcaagaggaaggcgcctggggtcaagctcagagccactccacttggctccaggggggagacggggattaggcatcccagaggggcagaggaagagccgctggctgcgaagagtcaataaacagccttgatacctgtc

SEQ ID NO: 337916 - DNA, 1323 bp, Artificial Sequence
  derived and/or modified sequence
atgaccagcatcaaggagcaggccgccatcagcagactgctgagcttcctgcaggagtgggacaacgccggcaaggtggccagaagccacatcctggacaagttcatcgagaccaaccagggcaagaccgcccccgagctggagcaggagttcagccagggcgccagcctgttcctggtgagactgaccaccagcctgagaatcacctacatgaccgacagctgcctggagaagctgctgagaagcatcggcatcttcctgagcgccgtgagcagcaacagatacctgatcgagttcctggaggtgggcggcgtgctgaccctgctggagatcctgggcctggagaagatcaaggaggaggccaagaaggagagcgtgaagctgctgcaggtgatcgccaacagcggcagaacctacaaggagctgatctgcgagagctacggcgtgagaagcatcgccgagttcctggccaagagcaagagcgaggagacccaggaggaggtgcaggtgctgctggacagcctggtgcacggcaaccccaagtaccagaaccaggtgtacaagggcctgatcgccctgctgccctgcgagagccccaaggcccagcagctgagcctgcagaccctgagaaccgcccagcccatcatcggcaccacccaccccagcatcgtggactgcgtgctgaaggtgctgggcaccatgcacctggaggtgcagtacgaggccatcgagctgatcaaggacctggtgggctacgacgtgagacaggccctgctgaagggcctggtggccctgctgatccccagcgtgaaggagatcagcaagctgcaggccaagatcctgagcgaccccagcgtgctgcagctgacccccagcctgcccatgttcctgcagcaggccgccgccgccaaggccatcggcgtgctggccagaaacgacatgagcatcgccgaggagctgctgtacctgagagtggtgagaggcctgatggccgccatgggcaacaccgaccacagcaacagccagagactggccagcctgaccctggagtgcttcgtgcagatgttccccctggtggccgagcacgtgagaaagtgcatgggcgaggagctgtaccagctgttcctgagcaacgccgaggacctgtacatgaagatcgacagcatccaggccgacatcctggccgccaacaccgtgaacgtgaccaaggccctgtgcctgcacggcagcagctacagcatgaacaccctgtacggcagcagagacagcgcccagatggcctacctgacccacttcgaggaggacgtggagagcaaggagtag

SEQ ID NO: 337917 - DNA, 1323 bp, Artificial Sequence
  derived and/or modified sequence
atgactagcatcaaagagcaggccgccatttctcgcttgctgagcttcctgcaggaatgggataacgcaggcaaagtggctcgttcccatatcctcgacaagtttattgaaactaaccagggaaagaccgcccccgaactggagcaggaattttcacagggagcctctctgtttcttgtgaggctgacaacatccctacggattacgtacatgaccgacagttgtctggaaaagctcctccgaagtatcggcatctttctgtctgccgtaagttccaacaggtatttaatagagttcctagaggtaggcggtgttttgaccctgttagaaatcctgggcctcgaaaaaataaaggaggaggccaaaaaagaatcagtcaaattgctgcaggtgattgccaattcaggccgcacatataaggaattgatctgcgaaagctatggagttcgaagtattgctgagttcctggcaaaatccaaatccgaggaaacacaagaggaagtacaagtcctactggactccttggtgcatggcaacccaaagtaccagaaccaggtctacaaaggactgatcgctttgctcccatgtgaatcccctaaggcccagcagctttccctccagaccctgcgcacggcgcaacctatcatcggcacgacgcatccgtctattgttgactgcgtgctcaaggtcctgggaaccatgcacttggaagtccagtatgaagctatcgaactgattaaggatctggtgggatacgatgtccgtcaggcattgcttaagggccttgtggccctcctgatcccctctgtgaaggagatcagcaagttgcaggcgaaaatcctctctgacccctctgtacttcagttgaccccaagcctgccgatgtttcttcagcaggccgcggccgcaaaggcaatcggagtgctggctaggaacgatatgagtattgcagaggagctgctatatctgagagttgtcagaggccttatggctgcgatgggaaatacagaccattcaaattctcagcgcctcgcctcacttaccctggaatgtttcgtgcagatgttcccacttgtagctgagcacgtgagaaagtgcatgggcgaggaactgtaccaactgttcctgagcaacgccgaggacctctacatgaaaatagactctatccaggccgacatcttagcagcaaatacggtcaacgtgactaaggccttatgcctgcacggctcctcctatagcatgaacacactgtacgggtcaagagattccgctcagatggcctatctgacccacttcgaggaagatgtggaaagtaaggaatag

SEQ ID NO: 337918 - DNA, 1323 bp, Artificial Sequence
  derived and/or modified sequence
atgaccagcatcaaggaacaggcggccatctcacgcttactcagcttcctccaggaatgggacaatgccggcaaggtagcccgctctcacattctcgataagtttattgaaaccaatcaggggaaaactgcgccggaattagaacaagaattttcccaaggagcctccctcttcctagttcggctgacaactagtctcagaatcacttatatgaccgactcctgcctggagaaactgttgcggagtattgggatttttctctctgctgtgagttcaaaccgatacctcattgagtttctcgaagtaggcggggtcctgacactcctggagatcttggggctagagaaaataaaggaggaggccaaaaaagagtcagtgaaactcctacaggtgatcgctaattccggtagaacttacaaagaactcatttgcgagtcctatggagttcggtctattgccgagtttcttgcgaagagtaaaagcgaagaaactcaggaggaggtacaggtcctactcgatagcctcgtgcacggaaatccgaaatatcaaaaccaggtttacaagggtctaattgcgttgttgccttgcgaatctcccaaggcgcaacaactcagcctgcagacgttgaggaccgcccagcccataatcgggaccacccacccaagtatagtggattgcgtgctcaaagtactaggaaccatgcacctggaggtgcaatatgaggccattgaactcattaaggacctggtcggttacgacgttcgacaggctctcctaaaggggttagtggcactcctcatcccttctgtgaaggagatttcaaaacttcaggctaagatcctgtctgatccctcagtgttacagctgacaccctcactccctatgtttttacaacaggccgcggccgcaaaggcgatcggagtcctggcaaggaacgacatgtcaatcgcagaagagttgctctacctccgcgttgtgcggggcctcatggcagcgatgggtaacactgaccattccaacagccagaggctggctagtctgaccctggaatgctttgtgcagatgtttccactagttgcagagcatgttcggaagtgcatgggcgaagaactataccagctgttcctctctaatgctgaagacctctatatgaagatcgactcgattcaggctgacatcttggccgccaataccgtgaatgttaccaaagccctctgcctgcacggatcttcttacagcatgaacaccctctacggttcacgcgacagtgcacaaatggcttacctcactcatttcgaggaagacgtggagtcgaaggagtag

SEQ ID NO: 337919 - DNA, 1323 bp, Artificial Sequence
  derived and/or modified sequence
atgaccagcatcaaggagcaggccgccatcagccggctgctgtccttcctgcaggagtgggacaatgccggcaaggtggcccggagccacatcctggacaagttcatcgagaccaaccagggcaagacagcccctgagctggagcaggagttcagccagggcgccagcctcttcctggtgcggctgaccaccagcctgcgcatcacctacatgacagacagctgcctggagaagctgctgcggagcatcggcatcttcctgtctgctgtgagcagcaaccgctacctgattgagttcctggaggtgggcggcgtgctgaccctgctggagatcctgggcctggagaagatcaaggaggaggccaagaaggagagcgtgaagctgctgcaggtgattgccaacagcggccgcacctacaaggagctgatctgtgagagctatggagtgcgcagcattgctgagttcctggccaagagcaagtctgaggagacccaggaggaggtgcaggtgctgctggacagcctggtgcacggcaaccccaagtaccagaaccaggtgtacaagggcctgattgccctgctgccctgtgagagccccaaggcccagcagctgagcctgcagaccctgaggacagcccagcccatcatcggcaccacccaccccagcatcgtggactgtgtgctgaaggtgctgggcaccatgcacctggaggtgcagtatgaggccatcgagctgatcaaggacctggtgggctatgatgtgcggcaggccctgctgaagggcctggtggccctgctgatccccagcgtgaaggagatcagcaagctgcaggccaagatcctgagtgaccccagcgtgctgcagctgacccccagcctgcccatgttcctgcagcaggccgccgccgccaaggccatcggcgtgctggccagaaatgacatgagcattgctgaggagctgctgtacctgcgggtggtgcggggcctgatggccgccatgggcaacacagaccacagcaacagccagaggctggccagcctgaccctggagtgctttgtgcagatgttccccctggtggccgagcacgtgaggaagtgcatgggagaggagctgtaccagctgttcctgagcaatgctgaggacctgtacatgaagattgacagcatccaggccgacatcctggccgccaacacagtgaatgtgaccaaggccctgtgcctgcacggcagcagctacagcatgaacaccctgtatggcagccgggacagcgcccagatggcctacctgacccactttgaggaggatgtggagagcaaggagtag

SEQ ID NO: 337920 - DNA, 1323 bp, Artificial Sequence
  derived and/or modified sequence
atgaccagcatcaaggagcaggccgccatcagccggctgctgagcttcctgcaggaatgggacaacgcaggcaaagtggctaggtctcacatactggataaattcattgagaccaaccaggggaagaccgctcccgaacttgaacaggagtttagtcagggcgcgtcactgtttctggtgagactcacaacttctttgcgcattacatacatgaccgattcttgcctggagaagctgttgcggtctattgggatcttcctctctgctgtgagctcaaaccggtacctcattgagttcttggaagtgggcggcgtgcttacactgctggaaattctcgggctcgagaaaattaaggaagaagccaagaaggaaagtgtgaagctgttgcaggtcattgctaatagcggacgaacttataaagagttgatttgcgagagctacggagtacgcagcatcgccgagtttctcgcaaaaagcaagtcggaggaaacccaagaagaagtccaggtgctgctggacagccttgtacatggaaaccctaagtaccagaatcaggtgtataagggcctgatcgccctgctgccatgcgagagccctaaggctcagcagctatcacttcagaccctgcggaccgcccagccaattattgggactacgcacccttcaatcgtggattgcgtgctaaaggtccttggtactatgcatttagaagtgcagtacgaggctatcgaactcattaaggacctggttggatatgacgtgcgacaagcactcctgaaagggctggtggccttgctgatcccaagtgtcaaagagatcagcaagctgcaagctaaaatcctctcagatccaagtgtactccaactcacaccaagcctacccatgttcctgcagcaggccgccgctgctaaagcaatcggggtgctggcaaggaatgatatgtctatagccgaagaattgctctacctgcgggtcgtgaggggcctgatggctgccatgggtaatactgatcattccaattcccagcggttggcctctctgacgcttgaatgttttgtgcaaatgtttcctttggtggctgagcatgttcgtaaatgcatgggggaggaactctaccagctgttcctaagcaacgctgaggacctgtatatgaaaattgactcaattcaggccgacatactggccgcgaacaccgtgaatgttacaaaagccctgtgcctgcatggtagtagctacagcatgaacacgctctatggtagtcgggatagcgcgcagatggcgtatttgacccacttcgaggaggatgtggagtccaaagaatag

SEQ ID NO: 337921 - DNA, 1323 bp, Artificial Sequence
  derived and/or modified sequence
atgaccagcatcaaggagcaggccgccatcagccggctgctgagcttccttcaggagtgggacaacgccggcaaggtcgctcgaagtcatatactggacaaattcattgaaaccaaccagggcaagactgcccccgagctggagcaggagtttagtcaaggcgcctctctgttcttggtcaggctgacgacctcactgcgcattacctatatgacggattcctgcctagaaaaattactgcggtctatcgggatcttcctatccgctgtctcttcaaatcggtacctgatcgagtttctggaagtgggcggagtactgacgctgttggaaatacttggcctagagaaaatcaaggaggaagctaagaaggaatccgtgaaacttctgcaggttatcgccaacagtgggaggacatacaaagagctcatctgcgagtcctacggcgtccgctccatagccgagttcctcgcgaagtcaaagtccgaggagactcaggaagaggtgcaggtgttgctggacagtttagttcatggaaatccaaaatatcagaaccaggtgtataaaggtttgatcgcactgttaccctgcgagagtcctaaagctcagcaactgagtctgcagactttgcggaccgctcaacctattattggcaccacccacccctctatcgtggattgtgtgctaaaggtactggggacaatgcatctggaagtccagtatgaagccatcgaattgatcaaagatcttgtgggttatgacgttaggcaagcactgctgaagggactcgttgccctgctgattccatcagtaaaggaaatttctaaactccaggccaagatactgtcagatcctagcgttctgcagttaacgcccagcctccctatgtttctacagcaggcggcagctgcaaaggcgatcggcgttctggcccgtaatgatatgtcgatagcagaggagctcctctatctgagggtcgtgcgtgggctcatggccgccatgggtaatacagatcatagtaattcccagcgtctcgcttccctgaccctcgagtgtttcgtgcaaatgtttcctcttgtggcagagcacgtgaggaagtgtatgggtgaagagctgtaccaactgttcttgagtaatgctgaagatctgtacatgaagatcgacagtattcaggccgacatcctggccgccaatactgtgaatgttactaaagcactgtgcctacatggttcctcttacagcatgaacacgctgtatggctcccgcgactccgcccagatggcttatctgacacatttcgaagaggacgtggaaagcaaagagtag

SEQ ID NO: 337922 - DNA, 1323 bp, Artificial Sequence
  derived and/or modified sequence
atgacatccataaaggagcaggccgcaatctcaaggttgcttagctttctgcaggaatgggacaatgcgggaaaagtagctaggagccatatcctcgacaaatttattgagacaaaccagggcaaaacagcccctgaactcgaacaagaattttctcagggagcctcactgttccttgtgagattaaccacttccttgcggattacgtacatgacggactcctgtcttgagaaactgctgaggtctatcggcatctttctgagcgcagtgtcgtccaaccgatatctaatcgagttcttggaggttggaggcgtgctgaccctgctcgagattttgggattggaaaagatcaaggaagaagccaaaaaggaatccgtgaaactgctgcaggtgattgccaactccgggcgaacctacaaagagctcatctgcgaaagctacggtgtaagaagcatcgctgagttcctggccaagagcaaaagcgaggaaacacaagaggaagtgcaagttttacttgactcgcttgttcacggtaacccgaaatatcagaatcaggtctataagggcttaattgccttgttaccctgtgaaagtcccaaagcacaacaactctctctgcagacacttcggaccgctcagccaatcattggaaccacacatccaagcatcgtcgattgcgtgctgaaggtgcttggcactatgcacctcgaggttcagtacgaggcaatagagctgattaaggatctggtcggatatgacgttagacaggccctcctgaaggggctggtggcgttgctcatccctagcgtcaaggaaatttcaaaactgcaagctaagatcctgagcgacccatctgtgttacagctgaccccctcactccccatgttcctacagcaggctgctgcggcaaaggctatcggcgtgctcgccaggaatgatatgtctattgctgaagaactgctgtacctccgcgttgtccgaggactgatggctgcaatggggaatactgaccacagtaatagccagagactggcatcattaactcttgagtgtttcgtccagatgtttccgctcgtggccgagcatgtgcggaagtgtatgggtgaggagctctaccagctttttctgtcgaacgccgaggacctatatatgaaaatcgattctatacaggcagacatcttggccgctaatactgtgaatgtgactaaggcactctgtcttcacggatcaagctactccatgaacactttatatggctcaagagacagcgcccagatggcctatctgactcactttgaagaggatgtcgagtcaaaagagtag

SEQ ID NO: 337923 - DNA, 1323 bp, Artificial Sequence
  derived and/or modified sequence
atgacaagtataaaggaacaggctgcaatctcccgtttactgagcttcttgcaggagtgggataacgcaggaaaggttgctcgttctcacattctcgataagtttatcgagacgaatcagggtaaaacagcaccagagctggagcaagaattctctcagggggctagcctcttcctcgttcgacttaccacatccttgagaatcacgtatatgacagactcttgtctagagaaactgctccgctctatcggaatcttcctgagcgcagtgagttctaatcgttacctcatcgagttccttgaggtgggaggagtgctgacattattagagatactagggcttgagaaaattaaggaagaagccaagaaggagtccgtcaagctgctgcaggtaatcgccaattctggcagaacgtacaaggagctgatttgcgaatcttatggcgtgcgaagtatcgccgagtttcttgccaagtccaaatcagaggaaacacaagaggaggtgcaggtgctgttagactcattggtccacggcaaccctaaatatcagaatcaggtatacaaggggctgatcgcactgctgccttgcgagagcccaaaggcccagcagctctcgttgcagactctgaggactgcgcagccaattattgggaccacacatcctagtatagtggattgcgtcttgaaggtgcttggaaccatgcacctggaggtgcagtatgaagctattgaactcatcaaagacttagtggggtacgacgtccggcaggccctgcttaagggcctggtcgcacttctcatcccaagtgtgaaggagatctcaaagcttcaggctaaaatcctcagcgacccctccgtcctccagttaacgccatcactgcccatgtttctccagcaggcggcagcggctaaggctatcggagttctggcccgaaacgacatgtcaattgctgaagagctgctgtacctaagggtggtgaggggattgatggcagccatgggcaatacagatcacagtaactctcaacgcctggccagcctcacactggagtgtttcgtccaaatgtttccattagtggctgaacatgtgcggaaatgcatgggcgaggagctctatcaacttttcctgtctaacgcggaggatctctatatgaagatagactcaattcaagccgacatcctagctgcaaataccgtcaacgtgacaaaggccctgtgcttacatggaagcagttattctatgaatacgctgtatggttccagggattccgcccagatggcctacctgactcatttcgaggaagatgttgaaagcaaagagtag

SEQ ID NO: 337924 - DNA, 1873 bp, Artificial Sequence
  derived and/or modified sequence
gtccctagagacagcctggaaagattgggtgccagctgcagagaggagagcaaggcgaccaaacgcaggctgtggctgcctgcagcccatcctgcccccagcacctagagtcatctttagaaatgcaagcctgatcgtggaatccaccttcctaacacccttcagtgccctcctcttcgttacacccttactatacaaacgatagtccatggaccagcagcatcaacataaccagggagcttgttagaaatgtagaatctggtccatcccaaacctgacgaagcagaagctgcattttgccaagatcccagggaatttgtgtgcccgttatggtttgcgaagtgcttcccaagagaacatacggcaagccagagggatctttgcagatcttgctcctttcattctctggcctcatcttgtcgctctcctccatccgtgcccacatccccactgtactggaccgcttgcagctccttgaatgcagcatagtcttgttttcttttttgcagtgattctacatctttcccatcttctccacctggatgcctccatccatcctttcagacttcccttctctagcaaacctttcttgctaattcccatgtctaacacaacacttccccatactgcatggccattatcctttctgcatcagactgtgagcaccttgaaggcagtggcagtgactcattcattgtggcatctgcagattccagtggactgccaggcatgcaatagaaaatcaaaaaagatttactgctaaataatcctcaactccagtggcagctccatgtgccatttctcttccgctctggcctcggctcttcctgtgcctacctggggcttggctttcacctaggtgtctgcatggaagggagagcgacctggaggaccatcgccaatccatcaatagcctcccggttgagatgacttcagctctgatttggaagagctatgatattgtttataggagtgaattaatatgtgtaaaggttacaaagtaaacagttaaattaaattaattgtgctggagcaggtcaaacaggcttctgagagatgaacatacacatctctattaactccacattcagtgagtgtgggtaacttgaaattggctgggtcaccatttacatcatagaaattggcaaatagtacaaattagggctccctcacccctactcgggcatagagctggtacactagcacacctctggttatacatgcatgcgtgtgccaccagaacaaaacacctaacagcaggcacgttgcctctgttgcccaccattacagctcccgcacggagcagacagactcatggcaggaattgaatgcatgtttgtcgagtggaagcatgaacaaatccacaaaatgcccaagatgaggcaaagaaggacattggctcaaatgttaaacataagttaggagctgagataatgcccagaggaaaaatgttctgtaattctaagtaaaacccatctctaaggcaggatgctgcttatgagggctccacagacagatgggggaggcctgggtcctgcccttggaaagagtctgacagctcgacttctggaaacagccatctgcacaggtcaacatcttcttagctgacagggagcagatttgcagaccacatcacatttgaaattccagaagaaacttcttggagtctgctcttgtgcaaatgagcctagaaagcccgttaactttgggtggaggcttccactgtttggctatcccaagtgggcccaaagctaaggaaaacccaccagccctttgcttcctgcttcctctatttgtttgccccaggaaatcagaggtgatgacatgatttggcttgggcacgacaggaataaacgatatttaagagacgtca

SEQ ID NO: 337925 - DNA, 2096 bp, Artificial Sequence
  derived and/or modified sequence
gtccctagagacagcctggaaagattgggtgccagctgcagagaggagagcaaggcgaccaaacgcagggtaaggtctggaggtgctcatagttcactacgggacatgtacatggaagtgaataattatgtcacaaggtgccaagggggctagttacctcacataggatcttagaaaaggtctcctggagaccatgtctgagctggtcctgaggtgtgagtagggattctccgcagggcggggaaggacttgaaagagtctggcaatatggagcacatcaggattatggaagctgtggctgcctgcagcccatcctgcccccagcacctagagtcatctttagaaatgcaagcctgatcgtggaatccaccttcctaacacccttcagtgccctcctcttcgttacacccttactatacaaacgatagtccatggaccagcagcatcaacataaccagggagcttgttagaaatgtagaatctggtccatcccaaacctgacgaagcagaagctgcattttgccaagatcccagggaatttgtgtgcccgttatggtttgcgaagtgcttcccaagagaacatacggcaagccagagggatctttgcagatcttgctcctttcattctctggcctcatcttgtcgctctcctccatccgtgcccacatccccactgtactggaccgcttgcagctccttgaatgcagcatagtcttgttttcttttttgcagtgattctacatctttcccatcttctccacctggatgcctccatccatcctttcagacttcccttctctagcaaacctttcttgctaattcccatgtctaacacaacacttccccatactgcatggccattatcctttctgcatcagactgtgagcaccttgaaggcagtggcagtgactcattcattgtggcatctgcagattccagtggactgccaggcatgcaatagaaaatcaaaaaagatttactgctaaataatcctcaactccagtggcagctccatgtgccatttctcttccgctctggcctcggctcttcctgtgcctacctggggcttggctttcacctaggtgtctgcatggaagggagagcgacctggaggaccatcgccaatccatcaatagcctcccggttgagatgacttcagctctgatttggaagagctatgatattgtttataggagtgaattaatatgtgtaaaggttacaaagtaaacagttaaattaaattaattgtgctggagcaggtcaaacaggcttctgagagatgaacatacacatctctattaactccacattcagtgagtgtgggtaacttgaaattggctgggtcaccatttacatcatagaaattggcaaatagtacaaattagggctccctcacccctactcgggcatagagctggtacactagcacacctctggttatacatgcatgcgtgtgccaccagaacaaaacacctaacagcaggcacgttgcctctgttgcccaccattacagctcccgcacggagcagacagactcatggcaggaattgaatgcatgtttgtcgagtggaagcatgaacaaatccacaaaatgcccaagatgaggcaaagaaggacattggctcaaatgttaaacataagttaggagctgagataatgcccagaggaaaaatgttctgtaattctaagtaaaacccatctctaaggcaggatgctgcttatgagggctccacagacagatgggggaggcctgggtcctgcccttggaaagagtctgacagctcgacttctggaaacagccatctgcacaggtcaacatcttcttagctgacagggagcagatttgcagaccacatcacatttgaaattccagaagaaacttcttggagtctgctcttgtgcaaatgagcctagaaagcccgttaactttgggtggaggcttccactgtttggctatcccaagtgggcccaaagctaaggaaaacccaccagccctttgcttcctgcttcctctatttgtttgccccaggaaatcagaggtgatgacatgatttggcttgggcacgacaggaataaacgatatttaagagacgtca

SEQ ID NO: 337926 - DNA, 2333 bp, Artificial Sequence
  derived and/or modified sequence
gtccctagagacagcctggaaagattgggtgccagctgcagagaggagagcaaggcgaccaaacgcagggtaaggtctggaggtgctcatagttcactacgggacatgtacatggaagtgaataattatgtcacaaggtgccaagggggctagttacctcacataggatcttagaaaaggtctcctggagaccatgtctgagctggtcctgaggtgtgagtagggattctccgcagggcggggaaggacttgaaagagtctggcaatatggagcacatcaggattatggaaggtgagcttggagaacaaggcagagtctagcctgtgaaaggcctcttgcaatttgttgaggatccatgaccttctcccatgcatggtgaaatgcccttaaaggattttgaatagatttaaaagacactcaaaaacaaaaaacggtagattcaaaatagacggtagggatcgctttcttccgttttctttgaaggatcagaagtgtttaccaccacctggattgtttttgggctttcagctgtggctgcctgcagcccatcctgcccccagcacctagagtcatctttagaaatgcaagcctgatcgtggaatccaccttcctaacacccttcagtgccctcctcttcgttacacccttactatacaaacgatagtccatggaccagcagcatcaacataaccagggagcttgttagaaatgtagaatctggtccatcccaaacctgacgaagcagaagctgcattttgccaagatcccagggaatttgtgtgcccgttatggtttgcgaagtgcttcccaagagaacatacggcaagccagagggatctttgcagatcttgctcctttcattctctggcctcatcttgtcgctctcctccatccgtgcccacatccccactgtactggaccgcttgcagctccttgaatgcagcatagtcttgttttcttttttgcagtgattctacatctttcccatcttctccacctggatgcctccatccatcctttcagacttcccttctctagcaaacctttcttgctaattcccatgtctaacacaacacttccccatactgcatggccattatcctttctgcatcagactgtgagcaccttgaaggcagtggcagtgactcattcattgtggcatctgcagattccagtggactgccaggcatgcaatagaaaatcaaaaaagatttactgctaaataatcctcaactccagtggcagctccatgtgccatttctcttccgctctggcctcggctcttcctgtgcctacctggggcttggctttcacctaggtgtctgcatggaagggagagcgacctggaggaccatcgccaatccatcaatagcctcccggttgagatgacttcagctctgatttggaagagctatgatattgtttataggagtgaattaatatgtgtaaaggttacaaagtaaacagttaaattaaattaattgtgctggagcaggtcaaacaggcttctgagagatgaacatacacatctctattaactccacattcagtgagtgtgggtaacttgaaattggctgggtcaccatttacatcatagaaattggcaaatagtacaaattagggctccctcacccctactcgggcatagagctggtacactagcacacctctggttatacatgcatgcgtgtgccaccagaacaaaacacctaacagcaggcacgttgcctctgttgcccaccattacagctcccgcacggagcagacagactcatggcaggaattgaatgcatgtttgtcgagtggaagcatgaacaaatccacaaaatgcccaagatgaggcaaagaaggacattggctcaaatgttaaacataagttaggagctgagataatgcccagaggaaaaatgttctgtaattctaagtaaaacccatctctaaggcaggatgctgcttatgagggctccacagacagatgggggaggcctgggtcctgcccttggaaagagtctgacagctcgacttctggaaacagccatctgcacaggtcaacatcttcttagctgacagggagcagatttgcagaccacatcacatttgaaattccagaagaaacttcttggagtctgctcttgtgcaaatgagcctagaaagcccgttaactttgggtggaggcttccactgtttggctatcccaagtgggcccaaagctaaggaaaacccaccagccctttgcttcctgcttcctctatttgtttgccccaggaaatcagaggtgatgacatgatttggcttgggcacgacaggaataaacgatatttaagagacgtca

SEQ ID NO: 337927 - DNA, 960 bp, Artificial Sequence
  derived and/or modified sequence
atggaccagtcagtagctattcaagaaacactggccgaaggcgagtactgtgtaatcgctgtccagggtgtgctgtgcgagggagattcccggcaaagccgactcctggggctagttagatacaggcttgagcacggggggcaggaacacgccttattcctgtacacacatcggcggatggccatcaccggtgacgacgtgtcgttagaccaaatagttcccgtctctcgcgacttcacactcgaagaggtgtcgcctgacggcgagctgtatattctaggctcagatgtcacagtgcagctcgatactgctgaattgagcctggtctttcagcttccatttggatcccaaacgagaatgttcctgcacgaagtggcacgagcctgtccagggttcgatagcgctacacgtgacccggaattcctctggctatcgaggtatcgctgtgccgaacttgaactggagatgccaactcctagaggctgtaattctgccttggtgacatggcctggttacgccaccatcggtggcggtcggtacccgtctcggaaaaaaaggtggggccttgaagaagctcgaccacagggggctggtagtgtgctcttctgggggggcgccatggaaaaaactggattcagactcatggaacgtgcacacggcggcggctttgtttggggacgatccgccagagatggcaggagggatgaggagcttgaagaagcagggcgtgagatgtctgccgccgctgggtcaagagagcgaaataccgccggtagtgccggcggcggcaaattagggtggggggccgggccgggcgccgctgtgaggcccgctctcggctgggcaggatccgcagtttggcccgtggatgccagaggcgaggatcagtcccccggaggtcccctggaggctggcaccttgggacaaaagttctgtgatgtcctgttaaggagagcgtag

SEQ ID NO: 337928 - DNA, 3934 bp, Artificial Sequence
  derived and/or modified sequence
ggtgtgtgcgctcagcaggggccagcatggaccagtctgtggcaatccaggagacgctggctgagggggaatactgcgtcatcgcggtgcaaggtgtgctgtgtgagggggacagccggcagagccgcctcctgggactcgtgcgctaccgcctggagcacggcggccaggaacacgctctcttcctctatacgcaccggaggatggccattaccggggacgatgtctctctggaccagatagtgccagtctcgcgggattttacgctggaagaagtgtccccagatggtgaactctacatccttggctcagatgtgaccgtccagctggacacagcagagcttagcctcgtattccaactgccctttggttcacaaaccaggatgttcctccacgaagttgccagggcctgtccaggcttcgattctgcgacccgggatcctgaattcctgtggctgtctcggtataggtgcgcagagctggagctggagatgccaacgccgcgcggttgtaactcggccctagttacctggccagggtacgcgacaattggcggaggcaggtatccgtcccggaagaaacggtggggattggaggaggcccggccacagggggcgggctccgttctgttttggggcggagcgatggagaagacaggctttcgattgatggagcgggcacacgggggcgggttcgtctgggggcggagcgcgcgggacgggcggcgggatgaggagcttgaggaagcaggcagggaaatgtctgccgccgccggctctcgggagcgcaacactgcaggttcggcgggcggcgggaagctgggctggggagctgggccgggggcggcggtgcgcccggccctcgggtgggcagggtcggcggtttggccagtggacgctcggggcgaagaccaaagtcctggtggccctctggaggctgggacactggggcagaagttctgtgatgttcttcttaggcgtgcgtgacgagggtaggcgggtgggaatggggtacttgggaatccggaggctggggttttagtaaagctccgttccgaactcgctgtgtgacctcgggccactcgctgcccctctctgggcctgttgctccatctgagcttgctcttcaatcctgatcttccgagtttgtcgcgtggggcgggtgggggagtggtgccctgcctacgatagagtcttcctttgggtgaggtatggtatgtgttggggctctgtcagttctcagcccctgtgatgatagcgcagtgtacagggctggagtcttggggagccctgtctactctgggactagaggccaggatgaagttacaggttataaaaggactaggttttttcccacccagcagttggtggataatggggagcacagaaggccagttgctgagcaggagcttgtcgtttggagatgggaggctcagggctgaaatttgggtgagtccgtgctctgggaggacctgcagacctgtctttttttgtccagctccagggttttctgcaagggcccctggtgcttttttcccctgggtgtgtccgtgaggctccatttatgtgtgagctttggcatgacccctagtacctatttgtgacagtcatttgccagcaatgaagagcctgtcaagtagctgtgtaaagtgtgggccagccctccacttgctcttacaaggcttggaaactatgaggggcagggaggagtggcatgttgcacaagagtttgtaaactgagaggaaacgaggtgagcagaggacttcctcggtgcttgtttctccttcattgcagccatcacaaggtgcgatcgaagcgcctgatggtgctgatagtttgcatcttccttgggcttatctcagagttcactatcactagagtttccatgacattctgggctatggtgctgggacgggtgagagtttaagagcacctcatctccttgccccttcacaagagactgccagaatccagacaattggcggaggacaaggccaatggcagcagaaagaggtgggtgctgtgttctcagccagtacaccagagccaggccatgcaggcacttcattcccttagtcttctatgacaagtcaggccagctagctctgaagccagttagctgccccgactgagaaatgtgcagggatctcaatctttcatttcctttcaaaaaacagagactagccatatgctggtgaggaattattgttacggtttcggttttatttttattttaaaataatttgaaagctgaacatggtggcgcgtacctgtagtcccagccacttgagaggctgaggtggaaggcttgagcccaggagtttgagggtgatgtgcactatgattgatcctgtgaattagttgctgcactccagcctaggcaacatagtgagactgtctctaaaataaataaataaatagttttaaaaattttgtcagccaggcgtggtgactcatgcctgtaatcccagcactgtgggaagctgaggcgggcggatcacctgaggtcaggagttcgagaccagcctggccaacatggcgaaactccgtcactactaaaaatacaaaaattagatgggcgtggtggcaggtgcctgtaatcccatgtactctggaggctgaggtaggagaattgcttgaacccaggaggcagaggttgcagtgagccgagatcgtgccattgcattccagcctgggagacggagcaagactccatctcgaaaaaaaaaaaaatttttctcttaaaatacctacagtaagtggggtgacactattaattgctaagttgctcctgctaaaattggtaagaaatggtatcaagcccctcagttctatttgggtcatctgtttccagagttattatggcctcagaggagagttacatcttctataacaggtaggaagaaccctttgggctgcctttggatgtcgatacaggccccaagggaaacagagtagtagattgttttttcctatatgcatatgatcaaaatacccactttttgatagcctagagaacccaaagcaaacagttgcttaaaaatgctgtttctggctgggcacgatgactcatgcctttaatcccaacactttggaaggctgaggcgggcggatcatgaggtcaggagttcgagaccagcctggccaacatggcgaaaccctgtctctactaaaaatacaaaaattagatgggtgtagtggcacatggctataatcccaggtacttgggaagctgaggtaggagaatcgcttgaacccaggaggcagaggttgcagtgcgctgagatcgtgccactgcactccagcctgggagacagagcgagactccatctcaaaaaaaaaaaaatttttttttatcttatcgtaatacctacagtaagtgactgggtgacactgttaattgctaagttgctgctgctaaaattggtaagaaatggtatcaagctctccagttctgtttgggtcatctctgtttccagagttgttctggcctcagaggagagttacatcttctataacaggtgggaagaaccctttgggctgcctctggatgtcgatacaggccccaagggaaacggagtagtagatttgttttttcctatatgcatatgatcaaaatacccactacttgatagcctagagaaaccaaggcaaatggttgcttaaaaatgctgtttttggctgggcgcggtggctcatgcctaatcctagcactttgggaggccgaggtgggcggatcacaagatcaggagttcaagaccaggctgggcaacatgacgaaatcctgtctctactaaaaatataaaaattaggccaggcacagtggcttatgcctgtaatcccagcactttgggaggctgaggcaggcggatcacaaggtcaggagatcaagaccatcctggctaacacggtgaaaccccatctctactaaaaa

SEQ ID NO: 337929 - DNA, 960 bp, Artificial Sequence
  derived and/or modified sequence
atggaccagagcgtggccatccaggagaccctggccgagggggagtactgtgtgattgctgtgcagggcgtgctgtgtgagggggacagccggcagagccggctgctgggcctggtgcgctaccgcctggagcacggcggccaggagcacgccctcttcctgtacacccacaggaggatggccatcactggagatgatgtgtccctggaccagatcgtgcctgtgtcccgggacttcaccctggaggaggtgtccccagatggagagctgtacatcctgggcagtgatgtgacagtgcagctggacacagctgagctgagcctggtgttccagctgcccttcggcagccagaccaggatgttcctgcacgaggtggcccgggcctgccccggctttgacagcgccacccgggaccctgagttcctgtggctgagccgctaccgctgtgccgagctggagctggagatgcccaccccccggggctgcaacagcgccctggtgacctggccaggctacgccaccatcggcggcggccgctaccccagcaggaagaagcgctggggcctggaggaggcccggccccagggcgccggctctgtgctcttctggggcggggccatggagaagacaggcttccggctgatggagcgggcccatggaggcggctttgtgtggggccgcagcgccagagatggaagaagagatgaggagctggaggaggccggccgggagatgtctgctgctgctggcagccgggagaggaacacagctggcagcgctgggggcggcaagctgggctggggcgccggccctggagctgctgtgcggcctgccctgggctgggccggcagcgctgtgtggcctgtggatgcccggggggaggaccagagccctgggggccccctggaggccggcaccctgggccagaagttctgtgatgtgctgctgcggcgggcctag

SEQ ID NO: 337930 - DNA, 960 bp, Artificial Sequence
  derived and/or modified sequence
atggaccagagcgtggccatccaggagaccctggccgagggcgagtactgcgtaatcgctgtgcagggggtattgtgcgaaggggattcacggcagagccggctgttggggttggttagatatcgtttagaacatgggggacaagagcacgctctgttcctgtacacacatcggcgaatggccatcaccggcgatgatgtatctctcgaccagattgtgcccgtgagtcgcgatttcaccttggaggaagtcagcccagatggcgagctgtacatcctagggagtgacgtaactgttcagctcgatacggccgaactatccctggtttttcaactgccctttggatctcagacacgaatgttcttacacgaagtcgccagagcctgccctgggttcgattccgctacccgcgacccagagttcttatggctcagtcgttatcgctgcgcggagctcgaattggaaatgccgacaccccgtgggtgtaatagcgccctcgtcacatggcctggctatgcaacaatcggcggggggcggtacccaagtaggaaaaagcggtggggcctggaggaggctcgcccccagggcgcgggcagcgtcctgttctggggaggagccatggagaaaactggtttccgcctgatggaacgtgcccacggagggggttttgtgtggggcaggagtgcccgggacggacgtcgagatgaagagttggaagaggctggacgagaaatgagtgctgccgctggctcacgagaacggaacactgctggctccgctggcggtgggaaactcggctggggtgcgggaccaggggcagccgttcgcccagcgcttggctgggcaggctcagccgtctggccagtggatgcgaggggtgaggaccagtctccggggggaccactagaggccgggacacttgggcaaaaattttgcgacgttctgttgaggagggcctag

SEQ ID NO: 337931 - DNA, 960 bp, Artificial Sequence
  derived and/or modified sequence
atggatcagtccgtggccatccaggagaccctggccgagggggagtattgtgtaatcgcggtccagggcgttctctgcgagggcgattcccgacaaagtcgcctgctcggcttagtaaggtaccgcctggagcacggtggtcaggaacatgccttattcttgtatactcataggcgaatggctatcactggtgacgacgttagtctcgatcagatcgtccctgtatcacgcgattttactctggaggaggttagtccagatggcgaactgtacattttgggttcagatgtcaccgtgcagctggacacagcagagctgtcgctagtgttccagctaccctttggtagtcagactaggatgttcctgcatgaggtggcccgagcctgccctggctttgactccgcaacaagggacccggagttcttatggctgtccaggtatagatgcgctgaactggaactggagatgcctacccccagaggctgcaattccgcacttgtgacctggcctggatatgccaccataggaggaggcaggtacccatctcgtaagaagagatggggtttagaagaggctaggccccagggggcaggctctgtgctgttctggggtggggctatggaaaaaactggcttccgcctgatggagcgggctcacggcggaggattcgtgtggggcagatccgctcgtgacggcagaagggacgaggagttggaggaggccggtcgagaaatgagcgctgcggcagggtctagggagagaaacaccgccggatcggccggaggcggtaagctgggctggggcgctggccctggagctgcggtgcggcctgccctggggtgggcagggagtgcggtttggcccgttgacgccaggggtgaggaccagagtcccggagggcctttggaagccggaacgctggggcagaaattttgtgatgtcttgctgcggcgtgcgtag

SEQ ID NO: 337932 - DNA, 960 bp, Artificial Sequence
  derived and/or modified sequence
atggaccagagcgtggccatccaggagaccctggccgagggcgagtactgcgtgatcgccgtgcagggcgtgctgtgcgagggcgacagcagacagagcagactgctgggcctggtgagatacagactggagcacggcggccaggagcacgccctgttcctgtacacccacagaagaatggccatcaccggcgacgacgtgagcctggaccagatcgtgcccgtgagcagagacttcaccctggaggaggtgagccccgacggcgagctgtacatcctgggcagcgacgtgaccgtgcagctggacaccgccgagctgagcctggtgttccagctgcccttcggcagccagaccagaatgttcctgcacgaggtggccagagcctgccccggcttcgacagcgccaccagagaccccgagttcctgtggctgagcagatacagatgcgccgagctggagctggagatgcccacccccagaggctgcaacagcgccctggtgacctggcccggctacgccaccatcggcggcggcagataccccagcagaaagaagagatggggcctggaggaggccagaccccagggcgccggcagcgtgctgttctggggcggcgccatggagaagaccggcttcagactgatggagagagcccacggcggcggcttcgtgtggggcagaagcgccagagacggcagaagagacgaggagctggaggaggccggcagagagatgagcgccgccgccggcagcagagagagaaacaccgccggcagcgccggcggcggcaagctgggctggggcgccggccccggcgccgccgtgagacccgccctgggctgggccggcagcgccgtgtggcccgtggacgccagaggcgaggaccagagccccggcggccccctggaggccggcaccctgggccagaagttctgcgacgtgctgctgagaagagcctag

SEQ ID NO: 337933 - DNA, 528 bp, Artificial Sequence
  derived and/or modified sequence
atgcagaaatttggactgcgcgacactatcgtgaaatcccatctactgcagaaggaagaggactacacttacatacagaacttcaggttctttgccggcacttataatgtgaatggccaatcccctaaggagtgtctgcggctgtggctgagtaacggcattcaggctccagatgtatactgcgtgggtttccaggagctggacctctccaaagaagctttttttttccatgacacaccaaaggaagaggagtggtttaaagctgtatctgaagggctgcatcctgacgccaagtatgccaaggttaagcttatcaggcttgtgggcataatgttactgctgtacgtgaagcaggagcatgcagcatatatcagcgaggtggaggctgaaaccgttggcaccgggatcatgggtcgcatgtgtgatcttgtcgccggtgggccacagctgcaggatcgacgagcaggttgcggcaagtcagaaaaagcacatcgtagggagggactgagcaatgcagtttgtatctag

SEQ ID NO: 337934 - DNA, 1241 bp, Artificial Sequence
  derived and/or modified sequence
cacagtgtcggacaaggctcatattttatccatgcagaagtttggactgcgagatacaattgtgaaatcacatctactacagaaagaagaggattacacctatatccagaacttcaggttttttgcgggaacatacaatgtaaatgggcagtcccccaaagaatgcctccggctgtggctgagcaatggtatccaggccccagatgtctattgtgtagggttccaggagcttgatctgagtaaggaagcttttttctttcacgataccccaaaggaggaagagtggttcaaagctgtgtcagagggtcttcatccagatgccaaatatgcaaaggtgaagcttatccgactggttgggattatgctgctgttatatgtcaaacaggagcatgcagcttatatctcagaagtggaagccgagactgtggggacaggaatcatggggaggatgtgtgatcttgtggctgggggacctcaactacaggatagaagagctggatgtggaaaaagtgaaaaagctcatcgaagagaaggactttcaaatgctgtatgcatatgatcagctgaaaattcaggtggccgcaaagactgtctttgaaggcttcacagagggtgagctcacattccagcctacttacaagtatgatacgggctctgacgactgggataccaggatacatgttatcccttggtgggcccgaattgctcttgctgcctcagatgacttagccacatggacatgaaggccctgattcatcactccccacctgagccagggcactcgccaggcagcgggcactgctgtttctgtgagtacttccagtgtggactttgcatttcagtgagaagtgccgtgctcctgcctggtgtgatcggattctctggaaagggaagaacatcactcagctgagttaccagagccacatggccctgaagaccagtgaccacaagcctgtcagctcagtgtttgacatcggggtgagggtcgtaaatgacgagctttaccggaagacactggaggaaattgttcgctccctggataagatggaaaatgccaacattccttctgtgtccctgtccaagcgagagttctgttttcagaatgtgaagtacatgcaattgaaagtagaatcctttacaattcataatggacaagtaccctgtcattttgaattcatcaacaagcctgatgaagagtcttactgtaagcagtggctgaatgccaaccccagcagaggctt

SEQ ID NO: 337935 - DNA, 528 bp, Artificial Sequence
  derived and/or modified sequence
atgcagaagtttggcctgcgggacaccatcgtgaagagccacctgctgcagaaggaggaggactacacctacatccagaacttccgcttctttgctggcacctacaacgtgaatggccagagccccaaggagtgcctgcggctgtggctgagcaatggcatccaggccccagatgtgtactgtgtgggcttccaggagctggacctgagcaaggaggccttcttcttccatgacacccccaaggaggaggagtggttcaaggctgtgtctgagggcctgcacccagatgccaagtatgccaaggtgaagctgatccggctggtgggcatcatgctgctgctgtatgtgaagcaggagcacgccgcctacatcagcgaggtggaggccgagaccgtgggcaccggcatcatgggccgcatgtgtgacctggtggccggcggcccccagctgcaggacagaagagctggctgcggcaagtctgagaaggcccacagaagagagggcctgagcaatgctgtgtgcatctag

SEQ ID NO: 337936 - DNA, 528 bp, Artificial Sequence
  derived and/or modified sequence
atgcagaagttcggcctgcgggacaccatcgtgaagagccacctgctccaaaaagaagaagactacacatacatacaaaattttcggttcttcgcaggcacctataatgtcaatggccagagtcccaaggaatgtttgcggctctggctaagcaacgggattcaggcccccgatgtgtactgcgttggttttcaggagctcgacctgtccaaagaagcctttttttttcatgacacgccgaaggaggaggagtggttcaaggcggtgagtgagggccttcatccagacgccaagtacgccaaagttaagctcatccgcctggttgggatcatgcttctgctctatgtcaagcaggagcacgccgcctacattagtgaggtcgaagctgagactgtgggcaccgggatcatggggaggatgtgcgatctggtggccggcggcccccaactgcaggaccgcagagctgggtgcgggaagtccgagaaagcacatagacgtgaagggcttagcaacgcagtgtgcatttag

SEQ ID NO: 337937 - DNA, 528 bp, Artificial Sequence
  derived and/or modified sequence
atgcagaagttcggccttcgggataccattgtgaagagccatctactgcaaaaggaggaggactacacttatattcaaaactttagattcttcgcagggacatacaatgttaacggccagtcccctaaggaatgcctgcggttgtggcttagcaacggcatccaggccccagatgtgtattgtgttggctttcaagagctcgacttgagcaaagaagctttcttctttcatgacacccccaaggaagaagagtggttcaaggctgtgtctgagggcctgcaccctgacgcaaaatacgccaaagttaagctaatccgtcttgtaggtatcatgttactgctctatgtgaaacaggagcacgcggcatacatcagtgaagtcgaggcggagaccgttggcacaggtattatgggccgaatgtgtgacttagtcgctggcggaccgcagctccaagacaggcgggctggctgcgggaagtccgaaaaagctcaccgtcgagaggggttgtccaacgctgtgtgcatttag

SEQ ID NO: 337938 - DNA, 528 bp, Artificial Sequence
  derived and/or modified sequence
atgcagaagttcggcctgagagacaccatcgtgaagagccacctgctgcagaaggaggaggactacacctacatccagaacttcagattcttcgccggcacctacaacgtgaacggccagagccccaaggagtgcctgagactgtggctgagcaacggcatccaggcccccgacgtgtactgcgtgggcttccaggagctggacctgagcaaggaggccttcttcttccacgacacccccaaggaggaggagtggttcaaggccgtgagcgagggcctgcaccccgacgccaagtacgccaaggtgaagctgatcagactggtgggcatcatgctgctgctgtacgtgaagcaggagcacgccgcctacatcagcgaggtggaggccgagaccgtgggcaccggcatcatgggcagaatgtgcgacctggtggccggcggcccccagctgcaggacagaagagccggctgcggcaagagcgagaaggcccacagaagagagggcctgagcaacgccgtgtgcatctag

SEQ ID NO: 337939 - DNA, 1773 bp, Artificial Sequence
  derived and/or modified sequence
cctatgtgcaaggcggtgagcaggggtggaaaatctcactgtgactcatccagctgatttctggaagaaacagccctcttgggtcccccaggaagggtcccaggagctgcaagcaggccaggatcagagtgagctggggttgctgccttcctgggttcctgaagtacctgaagggctgcagcagctgggctccggaaaggagatcaagggccagcaggggaggcaacggaaccggggaatcggggaggatcagcctcctgagagctgccaggagggcagacaacaggcatgaacaaagccaagtggtgggaccaggagtaactcactcaagaccatggctcagccgggcgcggtggaacacgcttgtcatcccagcactttgggaggccaaggcggaggatcacttgaggaggtgagggacattggagagaggcgggagccagaccgtgcgcagcagcagcctcagaagcccgcggtggctgcagggacacagagcctcgggaacttccggcagggcttcatgaagtgcttgctggaggtggagaaaatggaggcctcccatcggagagcctcgaaggcccggtcccagacagcccagaagtcgcccaggaccctgaccccggtgcccacctcagctccaagcctgcctcagacccctgcctcggtccctgccagcggcccatcgtgggcccggctgccagctcctgggccagaacctgcccccatgggagccccggtccccacctccatgccttgccctgtcctgctgggccctgccctggacctgggctggagaaggatggaactcttgcaccagagcagcgagagaaccctgagctacgccaaggcgcggcaggagccggaagagcagagcctccaaaagctttatcaaaaccgggagaagtccgaggagcaactgaccctgaagcaagaggaagccttccgcagctactttgagatcttcaatggtcctggtgaggtggatgcacagagcctgaagaatatcctgctcctaatgggcttctctgtgacgctggcccaggtggaggacgccctgatgagtgctgatgtcaatggagatggtcgtgtggacttcaaagacttcttggctgtgatgacagacaccaggcgcttcttctgctctgtggaacagaacgccctgtcggacatggctccccacaacccccacactctactctttgagatcctgtccctgctggtagagatgctggccttaccagaggcagtcttagaggaaatcacaaactactaccagaaaaagctgaaggaaggcacctgcaaggcccaggagatggaagcggccgtaggccggctgcggttgcagaagcttccctacaacccccagcaagaagagagctcagaagttccagaacgaaaggtcctcagtatcctgagccggctgaagcagcagaactatgctcccaacctgcagagcccctatgcccaggtgccctgcatcctgctctgcccacagctggacaagaagatggtccgtaggcagccgagcaaccactatgcactagaccagtgcacaccccctggcctggatcctgacatccgcagccccttcttccagtcaggatctcaaggaaacagggaacacaactctgacagcagaaagtggctcagctctgtgccagctcgaacccactgaccctctggaggcctgactctaggcagctgctcaaggcctgtagacagatgggccaccaggcaggagctgctgctgggatttgcttttgtggcctggtg

SEQ ID NO: 337940 - protein, 200 aa, Artificial Sequence
  derived and/or modified sequence
MDNRNTQMYTEGRTKAPGTQPSPGLRITIKRAGVEPIIPGVSKVMFPDASEVGSKKHLSSASRGPEKGPRLRDAFEKGPSELRIQEQGPPARPGKKQPSWVPQEGSQELQAGQDQSELGLLPSWVPEVPEGLQQLGSGKEIKGQQGRQRNRGIGEDQPPESCQAGHGGSRLLIPALLEAEGGRSPEVKTSLANMVKPCLY

SEQ ID NO: 337941 - DNA, 603 bp, Artificial Sequence
  derived and/or modified sequence
atggacaacagaaacacccagatgtacaccgagggcagaaccaaggcccccggcacccagcccagccccggcctgagaatcaccatcaagagagccggcgtggagcccatcatccccggcgtgagcaaggtgatgttccccgacgccagcgaggtgggcagcaagaagcacctgagcagcgccagcagaggccccgagaagggccccagactgagagacgccttcgagaagggccccagcgagctgagaatccaggagcagggcccccccgccagacccggcaagaagcagcccagctgggtgccccaggagggcagccaggagctgcaggccggccaggaccagagcgagctgggcctgctgcccagctgggtgcccgaggtgcccgagggcctgcagcagctgggcagcggcaaggagatcaagggccagcagggcagacagagaaacagaggcatcggcgaggaccagccccccgagagctgccaggccggccacggcggcagcagactgctgatccccgccctgctggaggccgagggcggcagaagccccgaggtgaagaccagcctggccaacatggtgaagccctgcctgtactag

SEQ ID NO: 337942 - DNA, 603 bp, Artificial Sequence
  derived and/or modified sequence
atggataatagaaacacccagatgtacacggaaggcaggacaaaagctccgggaactcagccttcacctgggctacgtataaccattaaaagagctggcgtagagccaatcattcctggagtcagcaaggttatgtttcctgatgcgtcagaggtgggatccaagaagcatctctcctcagcctccagggggcccgaaaaaggcccacggcttcgcgacgcctttgagaaggggccctccgagctgcgtatccaagagcagggacccccagctagaccagggaagaagcaacctagctgggtgccccaggaaggctcacaggaacttcaagcaggccaggatcagtcagagctgggactgctgccatcatgggtgcctgaagtccctgagggcttgcagcagctagggtccgggaaagagataaaggggcagcagggtagacagcgaaaccgtggcatcggcgaggatcagccgcccgaaagctgtcaggctggccacggcgggagtagactgttgattcctgcgcttctggaagccgagggcggtcgctcacccgaagtaaagacctccctggcaaacatggtcaagccatgcctatactag

SEQ ID NO: 337943 - DNA, 603 bp, Artificial Sequence
  derived and/or modified sequence
atggacaacagaaacacccagatgtacacagagggccgcaccaaggcccctggcacccagcccagccctggcctgcgcatcaccatcaagagagctggggtggagcccatcatccctggggtgtccaaggtgatgtttcctgatgccagcgaggtgggcagcaagaagcacctgagcagcgccagccggggccctgagaagggcccccggctgagagatgcctttgagaagggccccagcgagctgcgcatccaggagcagggccccccagcccggcctgggaagaagcagcccagctgggtgccccaggagggcagccaggagctgcaggccggccaggaccagagcgagctgggcctgctgcccagctgggtgcctgaggtgcctgagggcctgcagcagctgggcagcggcaaggagatcaagggccagcagggccggcagaggaacagaggaattggagaggaccagcccccagagagctgccaggccggccacggcggcagccggctgctgatcccagccctgctggaggccgagggcggccgcagccctgaggtgaagaccagcctggccaacatggtgaagccctgcctgtactag

SEQ ID NO: 337944 - DNA, 603 bp, Artificial Sequence
  derived and/or modified sequence
atggacaaccggaacacccagatgtacaccgagggccggaccaaggccccaggaacccagccctctccgggcctccgtatcacaatcaaaagagcaggggtcgagccaatcattcctggcgtcagtaaggtcatgttccccgacgcatcagaggtggggagtaaaaagcacctgtcttccgcaagccgaggtccagaaaaaggtccacgcctccgcgatgcattcgagaaaggcccctcggaactccgtatacaggaacagggacctccggcccggccagggaaaaagcagccatcttgggttccccaggagggctcccaggagctgcaggcaggccaggaccagagcgaattgggccttctgccatcttgggtaccagaggtgcctgaagggctgcagcagctgggaagcggcaaggaaattaagggacagcagggcaggcagcgcaaccggggaatcggagaagaccaacctccggaatcctgccaggccggccacggcggttctcgcttgttgatacctgccctcctcgaagctgagggtggtcgttcaccagaggtaaaaacttcacttgccaacatggttaagccttgcttgtactag

SEQ ID NO: 337945 - DNA, 603 bp, Artificial Sequence
  derived and/or modified sequence
atggacaaccgaaatactcagatgtacaccgaggggaggaccaaagcacccggaacacagcctagcccaggcctgaggataactattaaacgcgcaggagtcgaaccaattatccctggcgtttctaaggtgatgtttcccgatgcctccgaagtgggcagcaagaagcatctcagctcagcatctcggggtccagaaaagggcccacgtctccgcgacgctttcgaaaaggggccaagcgagttgcggatccaagagcagggcccacctgccagacctggcaaaaagcaaccctcctgggtgcctcaggagggatcgcaggagcttcaggctggtcaggaccagtctgagctgggattgctcccatcatgggtcccggaggttcctgagggattgcagcaactcgggagcggaaaagagattaaagggcagcaaggccgacaaagaaaccgcggtatcggcgaagatcagcccccagagagttgccaggcaggccacggtgggagtcgtcttcttatccccgcacttcttgaagccgaagggggacggtccccagaggtgaagacctcgctggcaaacatggtgaagccgtgcctctattag

SEQ ID NO: 337946 - DNA, 1136 bp, Artificial Sequence
  derived and/or modified sequence
agtgacaagctgggggaaatgacactgtccagtagttggaggtcacacagccccttgccttattctcaaaccctaaccacatggctggatattcctgaaatgcattcctaaacctctgctgctgagaataattggacctgccatctattcccagtttaactgccctgtataccaaacaaatccaattcaagccaacaggcaaagtataggctcagacagagcccatcctatgtgcaaggcggtgagcaggggtggaaaatctcactgtgactcatccagctgatttctggagcacactaggtgatgcccctcacttggcacccgtgttggcgctggcatcatggacaatagaaacacccagatgtacacggagggtagaaccaaggctccagggacgcagccaagtcctggcctgaggatcaccataaagagggctggtgttgagcccatcataccaggagtcagcaaggtcatgtttccggatgcttcggaagtgggcagcaagaagcacctctcatcagcttcacgagggccagagaaggggcccagactcagagatgcatttgagaaggggccttcagagctcagaatccaggagcaggggcctccagcaagaccagggaagaaacagccctcttgggtcccccaggaagggtcccaggagctgcaagcaggccaggatcagagtgagctggggttgctgccttcctgggttcctgaagtacctgaagggctgcagcagctgggctccggaaaggagatcaagggccagcaggggaggcaacggaaccggggaatcggggaggatcagcctcctgagagctgccaggccgggcatggtggctcacgcctgttaatcccagcacttctggaggccgaaggaggcagatcacctgaggtcaagaccagcctggccaacatggtaaaaccctgtctctactaaaaaatataaaattagccgggtgtggtggcacatgcctgtaatcccagctactcaagaggccgaggcaggagaattgcttgaacacgggaggtggaggttgcagtgagctgagatcgcgccattgcactccaaccagggcaatgagagcaaaactccgtctcaaaaaaataaaaataaaataaaaataagtctt

SEQ ID NO: 337947 - protein, 446 aa, Artificial Sequence
  derived and/or modified sequence
MAQPGAVEHACHPSTLGGQGGGSLEEVRDIGERREPDRAQQQPQKPAVAAGTQSLGNFRQGFMKCLLEVEKMEASHRRASKARSQTAQKSPRTLTPVPTSAPSLPQTPASVPASGPSWARLPAPGPEPAPMGAPVPTSMPCPVLLGPALDLGWRRMELLHQSSERTLSYAKARQEPEEQSLQKLYQNREKSEEQLTLKQEEAFRSYFEIFNGPGEVDAQSLKNILLLMGFSVTLAQVEDALMSADVNGDGRVDFKDFLAVMTDTRRFFCSVEQNALSDMAPHNPHTLLFEILSLLVEMLALPEAVLEEITNYYQKKLKEGTCKAQEMEAAVGRLRLQKLPYNPQQEESSEVPERKVLSILSRLKQQNYAPNLQSPYAQVPCILLCPQLDKKMVRRQPSNHYALDQCTPPGLDPDIRSPFFQSGSQGNREHNSDSRKWLSSVPARTH

SEQ ID NO: 337948 - DNA, 285 bp, Artificial Sequence
  derived and/or modified sequence
atgggcgccctgttcagactgctgctgcaggagagaggcaaggccgccgagttctacagcagaggcagaaagcagagaagacccagcgccagctgcaccttcggcggcatctggagcagcggcgtggacatgctgcccaacggcgccgtgggcagcctgacccagctgggccccagcagacccgtgctgggcatcgactacagcaagaaggagttcagaggcaccgccgagaacgtgaccggcctgaacaccatcctgcacttcagaaagagaaccagaagctag

SEQ ID NO: 337949 - DNA, 1341 bp, Artificial Sequence
  derived and/or modified sequence
atggcccagcccggcgccgtggagcacgcctgccaccccagcaccctgggcggccagggcggcggcagcctggaggaggtgagagacatcggcgagagaagagagcccgacagagcccagcagcagccccagaagcccgccgtggccgccggcacccagagcctgggcaacttcagacagggcttcatgaagtgcctgctggaggtggagaagatggaggccagccacagaagagccagcaaggccagaagccagaccgcccagaagagccccagaaccctgacccccgtgcccaccagcgcccccagcctgccccagacccccgccagcgtgcccgccagcggccccagctgggccagactgcccgcccccggccccgagcccgcccccatgggcgcccccgtgcccaccagcatgccctgccccgtgctgctgggccccgccctggacctgggctggagaagaatggagctgctgcaccagagcagcgagagaaccctgagctacgccaaggccagacaggagcccgaggagcagagcctgcagaagctgtaccagaacagagagaagagcgaggagcagctgaccctgaagcaggaggaggccttcagaagctacttcgagatcttcaacggccccggcgaggtggacgcccagagcctgaagaacatcctgctgctgatgggcttcagcgtgaccctggcccaggtggaggacgccctgatgagcgccgacgtgaacggcgacggcagagtggacttcaaggacttcctggccgtgatgaccgacaccagaagattcttctgcagcgtggagcagaacgccctgagcgacatggccccccacaacccccacaccctgctgttcgagatcctgagcctgctggtggagatgctggccctgcccgaggccgtgctggaggagatcaccaactactaccagaagaagctgaaggagggcacctgcaaggcccaggagatggaggccgccgtgggcagactgagactgcagaagctgccctacaacccccagcaggaggagagcagcgaggtgcccgagagaaaggtgctgagcatcctgagcagactgaagcagcagaactacgcccccaacctgcagagcccctacgcccaggtgccctgcatcctgctgtgcccccagctggacaagaagatggtgagaagacagcccagcaaccactacgccctggaccagtgcaccccccccggcctggaccccgacatcagaagccccttcttccagagcggcagccagggcaacagagagcacaacagcgacagcagaaagtggctgagcagcgtgcccgccagaacccactag

SEQ ID NO: 337950 - DNA, 1341 bp, Artificial Sequence
  derived and/or modified sequence
atggctcaacccggtgctgtagaacacgcctgtcacccatccactttgggtgggcaaggcggcggatctctagaggaagttcgcgacataggcgagcggagagagcctgacagagcgcaacagcagccgcagaagccggcggtcgccgccgggacccagtccctgggaaacttccggcagggctttatgaaatgtctccttgaggtagagaagatggaggcctctcacaggcgtgccagcaaggctaggagtcaaaccgcccagaagagcccgcgcactctaacgccagttccgaccagcgctcccagcctgcctcaaaccccagcttcagtacctgccagcggcccatcatgggcaaggctgccagcacccggcccagagcctgccccaatgggtgcacctgtgccaacaagtatgccatgccccgtgcttcttgggcctgctctggacctgggatggagaagaatggagctcctccaccagtcatccgagcggacactgagctatgcaaaggcccgtcaggagcctgaagagcagagcctccagaagctgtatcagaatcgggagaagtctgaggagcagctgactctgaaacaggaagaggcttttagatcatatttcgaaatcttcaacggcccaggagaagtagacgcgcagagcttaaagaatatcctactgctcatgggttttagtgtgaccctcgctcaggtggaagacgctctgatgagcgctgacgtcaatggcgatggtagagtcgacttcaaggacttcctggccgtgatgaccgatactagaaggtttttttgctcagtggaacagaacgcgttgtcagatatggctccgcataacccacacacacttctgttcgagattctctcccttctagtcgagatgttggccttgcctgaagctgtactagaggaaatcaccaattactatcaaaaaaagctgaaagagggaacatgcaaagcccaggaaatggaagccgcagttggcagactccgcctccagaaactgccgtataatccccagcaggaagaatccagtgaggtccctgagagaaaagtgctatccatcctaagtcgtctgaagcagcaaaactatgctcccaatcttcaaagcccttacgctcaggttccatgcatattactctgcccacagctggataagaaaatggtgcgcagacaaccttccaatcactacgccctcgaccaatgtacacccccaggtcttgatcctgatattcggtcccctttctttcagtccgggtcccaaggcaaccgtgagcacaactcggacagtaggaagtggctctcttctgtaccagcacgcacacactag

SEQ ID NO: 337951 - DNA, 1341 bp, Artificial Sequence
  derived and/or modified sequence
atggcccagcccggggctgtggagcacgcctgccaccccagcaccctgggcggccagggcggcggcagcctggaggaggtgcgggacatcggggagcggcgggagccagaccgggcccagcagcagccccagaagccagctgtggccgccggcacccagagcctgggcaacttccggcagggcttcatgaagtgcctgctggaggtggagaagatggaggccagccacagaagagccagcaaggcccggagccagacagcccagaagagccccaggaccctgacccctgtgcccaccagcgcccccagcctgccccagaccccagcctctgtgcctgccagcggccccagctgggcccggctgcctgcccctggccctgagcccgcccccatgggcgcccctgtgcccacctccatgccctgccctgtgctgctgggccctgccctggacctgggctggaggaggatggagctgctgcaccagagcagcgagaggaccctgtcctatgccaaggcccggcaggagcctgaggagcagagcctgcagaagctgtaccagaaccgggagaagtctgaggagcagctgaccctgaagcaggaggaggccttccgcagctactttgagatcttcaatggacctggagaggtggatgcccagagcctgaagaacatcctgctgctgatgggcttctctgtgaccctggcccaggtggaggatgccctgatgtctgcagatgtgaatggagatggccgggtggacttcaaggacttcctggccgtgatgacagacacccggcgcttcttctgcagcgtggagcagaatgccctgagtgacatggccccccacaacccccacaccctgctgtttgagatcctgagcctgctggtggagatgctggccctgcctgaggccgtgctggaggagatcaccaactactaccagaagaagctgaaggagggcacctgcaaggcccaggagatggaggccgctgtgggccgcctgcggctgcagaagctgccctacaacccccagcaggaggagagcagcgaggtgcctgagaggaaggtgctgagcatcctgagccggctgaagcagcagaactatgcccccaacctgcagagcccctatgcccaggtgccctgcatcctgctgtgcccccagctggacaagaagatggtgcggcggcagcccagcaaccactacgccctggaccagtgcaccccacctggcctggaccctgacatccgcagccccttcttccagagcggcagccagggcaaccgggagcacaacagcgacagcaggaagtggctgagctctgtgcctgcccggacccactag

SEQ ID NO: 337952 - DNA, 1341 bp, Artificial Sequence
  derived and/or modified sequence
atggcccagcccggcgccgtggagcacgcctgccaccccagcaccctcggcggccagggtggggggtcattggaagaagtcagagatataggggaacggcgcgagcccgaccgggcgcagcagcagccacaaaagcccgccgttgcagccggcacacagtccctcgggaacttccgtcaagggttcatgaaatgcctgcttgaagtggaaaaaatggaagccagtcatagaagagcatcgaaagcaagatcacagacagcacagaagagcccacggacccttacacctgtgcccaccagtgctccttccctaccccagacccccgcctccgtgccagccagcggacccagctgggcacggctgcctgcgccaggcccggagccagcaccaatgggggccccagtgcctaccagcatgccatgtcccgttctcctgggccctgctctggatctcggctggcgacgcatggagctcctccaccagagttccgaacggaccctaagctacgccaaagctaggcaggaacccgaagagcaatctttgcagaaactttaccagaaccgtgagaaaagtgaagagcaactgactctaaagcaggaagaggcctttaggtcttatttcgaaatctttaatgggccgggggaagtggacgcccagagcctgaagaatatcttgctgctgatgggctttagcgttacactcgcccaagtggaagacgcccttatgtctgctgatgtgaacggggacggtcgggtggacttcaaggattttttggcagtgatgactgacacgcgccgatttttctgcagcgtagagcagaacgctctgtcagatatggcccctcacaaccctcacacactcctgtttgaaatcttgagcttactcgttgagatgctggccctcccagaagccgtacttgaggaaattaccaattactaccagaaaaaactcaaagaggggacatgtaaggcacaagagatggaggcagccgttggccggttaagactgcagaaactcccctacaatccacagcaggaagagtcttctgaagtcccagagcgaaaggtgctgtctatcctaagtcgactgaaacagcaaaattatgcccccaacctgcagtccccctacgcccaggtgccgtgcatcctcctgtgccctcagctggataagaagatggtcaggcggcagccgagcaaccattatgctttggaccagtgtacccccccaggcctagaccctgatatcagatcccccttctttcaatcgggctcccaaggaaaccgcgaacacaactcagacagcaggaagtggctctcttctgtgcccgccaggacgcactag

SEQ ID NO: 337953 - DNA, 201 bp, Artificial Sequence
  derived and/or modified sequence
atggggacttccagcatcttcctgtgtgtgctgttcctctgcggggctttggggctgaccatgtctcctgctaggggccgactgagatgttacatctgcgggtttactaagccatgccaccccgtgcccaccgagtgccgggacgatgaggcgtgtggcatttccatagggacttcagaccagtctgagattacggagtag

SEQ ID NO: 337954 - DNA, 1341 bp, Artificial Sequence
  derived and/or modified sequence
atggcacagcctggggcagtggagcatgcttgccatccgtctacactgggcggtcaaggcggaggctccctcgaagaggttagggacattggcgaacgtcgcgagcccgatagggcccagcagcagcctcaaaagcctgctgtcgccgctgggacacaaagcctgggcaacttccgccaggggtttatgaagtgtctgctggaagtggagaaaatggaagcctctcatagaagagcctcaaaggcacgttcccagactgcccaaaagtcgcctcggaccctcacccctgtgcccactagtgctccttccctgccacagaccccggcttcagtgcccgcaagtggcccatcatgggcaagattacctgccccaggaccagagccagctcccatgggcgcacccgtgccaacttcaatgccatgtcctgttctcttaggcccagccctcgaccttggatggcgccgtatggaacttttgcaccagtcatcagaacgaaccctgtcatatgccaaagcccgacaagagcctgaggaacaatctttgcaaaaactctaccagaacagggagaaatccgaagagcaactgaccctgaagcaggaagaggcatttcgaagttacttcgaaatctttaacggtccgggagaagtcgacgcccagtcgctgaagaatatcctgctccttatggggttctcagtcacattggcccaggtcgaggacgccttgatgtctgctgacgtcaatggggatggacgggttgacttcaaagatttccttgctgttatgaccgatacccgcaggttcttttgtagcgtagagcagaatgcattaagcgacatggccccacacaacccacacaccctgctatttgagatcttaagcctactcgtggagatgctcgctttaccggaagcggttctcgaggagattacaaattattatcagaagaaactaaaggagggcacctgcaaagcccaggagatggaggccgctgtcggcagactgaggcttcaaaaactgccttacaaccctcagcaggaggaatctagcgaggttccagagcgaaaggtgctgtctatcctgagtagactgaagcagcagaactacgctcccaacttacagtcaccatatgctcaggttccttgtatcttgctgtgtccacaactggacaagaagatggtgaggcgccagcctagcaatcattacgctcttgaccagtgtactccaccgggattggatccagatatcagaagccccttcttccaatccggaagtcagggaaatagggaacataacagcgacagccgcaagtggttgagcagcgttccagccaggacacactag

SEQ ID NO: 337955 - DNA, 666 bp, Artificial Sequence
  derived and/or modified sequence
gccaggcgcagaggagccgctgctgctttgagcagagccagagtgtggggcagactgtatccccaaccaaagctccaggaggccgcacctcttcctcggaggggctgggacgggggtggccacgttggcggtggaggagacgcgagaggaccacgactggagggagagtccctgcctcaccctaggctagcaccagcagccccatccgctagcccagcactggcacacccattggtggcacatcctgccaggctggacagcagccggaaccctggcacagggatttatttcggcggttccgctgcttggcgccctggtctgtcacgcgtgagtcaggatcgttctccaaattcctccaggccactatcccttagcgggattcccgctgacgtgagcccccctgctaaaacccgggaggagaaacgcgaacccgcattgtggtcacgggaaaaagaggaaggtgctacagcactgcaagatcacggctgggaaaaagagtggcgaggcttccgtactttttcagtgcggctccatgtgccggtgtttataagtggatcccaagcactgggctcttgggcccgtatcacctgttgcccgccactctggtcacgaggatgtttctgtaaggaatcaagtggtagggagtctatggcctgcctcacctag

SEQ ID NO: 337956 - protein, 609 aa, Artificial Sequence
  derived and/or modified sequence
MSDERRLPGSAVGWLVCGGLSLLANAWGILSVGAKQKKWKPLEFLLCTLAATHMLNVAVPIATYSVVQLRRQRPDFEWNEGLCKVFVSTFYTLTLATCFSVTSLSYHRMWMVCWPVNYRLSNAKKQAVHTVMGIWMVSFILSALPAVGWHDTSERFYTHGCRFIVAEIGLGFGVCFLLLVGGSVAMGVICTAIALFQTLAVQVGRQADRRAFTVPTIVVEDAQGKRRSSIDGSEPAKTSLQTTGLVTTIVFIYDCLMGFPVLVVSFSSLRADASAPWMALCVLWCSVAQALLLPVFLWACDRYRADLKAVREKCMALMANDEESDDETSLEGGISPDLVLERSLDYGYGGDFVALDRMAKYEISALEGGLPQLYPLRPLQEDKMQYLQVPPTRRFSHDDADVWAAVPLPAFLPRWGSGEDLAALAHLVLPAGPERRRASLLAFAEDAPPSRARRRSAESLLSLRPSALDSGPRGARDSPPGSPRRRPGPGPRSASASLLPDAFALTAFECEPQALRRPPGPFPAAPAAPDGADPGEAPTPPSSAQRSPGPRPSAHSHAGSLRPGLSASWGEPGGLRAAGGGGSTSSFLSSPSESSGYATLHSDSLGSAS

SEQ ID NO: 337957 - DNA, 357 bp, Artificial Sequence
  derived and/or modified sequence
atggtgacccccgccggctgcctgggcggccggaaccagggcccccgggagatccccggaactgctttccccaggtctagccgagccggccaaactggacaggcagtgtcgggagcccaggtgagcagttggagagaacggcaaccctgcagcggctcgcgggggcccctccatatactgggcactgatggaaatgttgacaccactggcaaactcggtttagtacctacacctcctcgcatccagaaggaaactaaacagggagcgttgtgtggaatgaagcctcccttcttgccggaggctttgctgatcgtatggtggttgccctttgtggcagtaagcccatgcttattttag

SEQ ID NO: 337958 - DNA, 4082 bp, Artificial Sequence
  derived and/or modified sequence
ccgccgccagcatgccccggcccgcgggccgctccgccgccagccacccccgcggccctcggcggcctgcgctcggcccgggggcgcgggaaccgcagccggagccggaggcgggagcagcgagccggagccccgggcgctcgaatgcaggatgctcgtggtccccagcatccttgagccaccaggagtgagggctgctgctccctgagacctggctccaaggaggatgccacagccgcctgccagctccggtctgcaccatgagtgatgagcggcggctgcctggcagtgcagtgggctggctggtatgtgggggcctctccctgctggccaatgcctggggcatcctcagcgttggcgccaagcagaagaagtggaagcccttggagttcctgctgtgtacactcgcggccacccacatgctaaatgtggccgtgcccatcgccacctactccgtggtgcagctgcggcggcagcgccccgacttcgagtggaatgagggtctctgcaaggtcttcgtgtccaccttctacaccctcaccctggccacctgtttctctgtcacctccctctcctaccaccgcatgtggatggtctgctggcctgtcaactaccggctgagcaatgccaagaagcaggcggtgcacacagtcatgggtatctggatggtgtccttcatcctgtcggccctgcctgccgttggctggcacgacaccagcgagcgcttctacacccatggctgccgcttcatcgtggctgagatcggcctgggctttggcgtctgcttcctgctgctggtgggcggcagcgtggccatgggcgtgatctgcacagccatcgccctcttccagacgctggccgtgcaggtggggcgccaggccgaccgccgcgccttcaccgtgcccaccatcgtggtggaggacgcgcagggcaagcggcgctcctccatcgatggctcggagcccgccaaaacctctctgcagaccacgggcctcgtgaccaccatagtcttcatctacgactgcctcatgggcttccctgtgctggtggtgagcttcagcagcctgcgggccgacgcctcagcgccctggatggcactctgcgtgctgtggtgctccgtggcccaggccctgctgctgcctgtgttcctctgggcctgcgaccgctaccgggctgacctcaaagctgtccgggagaagtgcatggccctcatggccaacgacgaggagtcagacgatgagaccagcctggaaggtggcatctccccggacctggtgttggagcgctccctggactatggctatggaggtgattttgtggccctagataggatggccaagtatgagatctccgccctggaggggggcctgccccagctctacccactgcggcccttgcaggaggacaagatgcaatacctgcaggtcccgcccacgcggcgcttctcccacgacgatgcggacgtgtgggccgccgtcccgctgcccgccttcctgccgcgctggggctccggcgaggacctggccgccctggcgcacctggtgctgcctgccgggcccgagcggcgccgcgccagcctcctggccttcgcggaggacgcaccaccgtcccgcgcgcgccgccgctcggccgagagcctgctgtcgctgcggccctcggccctggatagcggcccgcggggagcccgcgactcgccccccggcagcccgcgccgccgccccgggcccggcccccgctccgcctcggcctcgctgctgcccgacgccttcgccctgaccgccttcgagtgcgagccacaggccctgcgccgcccgcccgggcccttccccgctgcgcccgccgcccccgacggcgcagatcccggagaggccccgacgcccccaagcagcgcccagcggagcccagggccacgcccctctgcgcactcgcacgccggctctctgcgccccggcctgagcgcgtcgtggggcgagcccggggggctgcgcgcggcgggcggcggcggcagcaccagcagcttcctgagttccccctccgagtcctcgggctacgccacgctgcactcggactcgctgggctccgcgtcctaggaccgccggcgcctccccacggacgccaggcaggccaggccgctctccggggccgcagcaccaaagacgcccgcctccgccccgcgcgcagacatgcgccacccctcccaggggtgagggggcgttggcctcagcgtttgtcttccggctcctcccagctggccttgtcccaggggcgacggctgccccggacgactgcgctgggcaccgcatgtcccgggccgagtgaggtcgggcctggggagctgagtgacatcccaagcttgggcttgggtagtgagtgacatgtgcacacgtccagctgcgccatcaccagccctgcgcaacaggacgtcgggagcagggaacctgagacagggccactgcgggatcggacaaagccccgctttggagaggctgagctggagccattggcctccccaggggctttccacccacactgcaccataaccgccacacccttcggggggggggagggtacagagggtctctaagcacaggggtgttcagagcccgaacaagctttgatcaggtttccctgcttccgacctgtcctgcctcagtttccccatctgtgatgagcaggtgaccacgttaactctcagggctgtttgaagtctcttggttgtaggccctcgccactgagtggcccaggtgtgagaggtagtctagagccctctgcggcctttgtggaggtccgttttcagcatgtggcctggtgtggctccctaggcctgaggcctcccactctcagtgccccctgcccccttgggaacccacactccaccccagctaagcacaacactgtggaccaccaccaatggcacctgagccaccttgaccaccattagtgtccccaccctcattactctgccgtcgttgcctgtccccaccacatcatctccctccatggctcccaccatgacgctggcaggtgcaagcggagagcacgagggcagcagggcctggccttccgtgtccctgcgtcatccccagcctcactccccacccgtgcaggcctggccaggaagggatcctggcaggggcttccaggttctcagctcaaggcctggtcccgggcaggcgtccaacccctgggagcaatgtatttctttgccttccatcctgggcagaccccttacaggcctgggcattgccatgggccctgggtcttcccaggctaaggagaaccaggaacagctataaccttgagctagtgaaatagggtagatgagaaggctgtctcctccagacccctacccctacacagtggccccacaatatgaagacctggggtaattccaaggtgagcatagagcctgcctgtgcccagttccttctggccctcaggtggccaagcccatctcttcatccttcagatagggtcccactcccagaagaagctgctggggtgggggtgggaggctgcctaagcctgtctgtgcttcagaggcccctccagtccctggctgtggggtaactgggggtatgagctgtggccacaggtgagcaaggcagggaactgcaatccagccctggccgcgggaggggccatctctggccaatgctgctgtgccttcaaggactgacaagttacgtaggggcagaggtcgccagctagccagtgtctcctccatctggggggcgtctgtccacttgtcaccttaggttttcactcatttgtcaccttggggttttgctctgtgtgtttcatatccaacggcaatacttgcagggggacagagtcctctaaatactccaatcctgcggtttttacaaacataaagggggagaccccaagtggaggaccctgggcctggagctccctcccaaactttgtccagcatccagcctgttccctgggctcactggggagggagttgtcttcatagcacacccagagccagggatccctttgtagttttttgacaacggagcatttctcttctgtacaggacccaataaaaacttccttatgatttgcacctggca

SEQ ID NO: 337959 - DNA, 1830 bp, Artificial Sequence
  derived and/or modified sequence
atgtctgacgagcgacgattacctggctcagcggtcggctggcttgtctgtggcggcttaagcctcctggccaacgcttggggaatacttagtgtgggtgccaagcagaagaaatggaagccactggaattcttattatgtactttggccgctacacatatgcttaacgtggccgtacccattgccacatattccgtagttcagctccgacgtcagagacctgactttgaatggaacgaaggactgtgcaaagtgtttgtgtcaacattttacaccttgacattagccacctgtttctccgtcacgtctctgagctaccataggatgtggatggtctgctggccagttaactatcgactcagcaatgccaagaagcaagccgtgcacaccgtaatggggatttggatggtgagtttcattctgagcgcactgcctgccgtcggctggcacgatacatccgaaaggttttacactcacggctgcaggtttatagtcgccgaaattggcttggggttcggggtttgtttcctcttattggtgggcgggtccgtggcaatgggagttatctgcactgcaatcgcattgttccaaactcttgcagtgcaggtaggccgacaggcggatcgtcgggcctttacagtccctacgattgtcgttgaagatgctcaagggaagaggagaagctccattgatggctctgagccagctaaaacctcgcttcagactacgggccttgtaacaacaatagttttcatctatgactgtcttatgggtttccccgtgctggtggtttccttctcatccttaagagcggacgctagtgctccttggatggccctctgtgtgctttggtgctcagtggcccaagcacttctcttacctgtgtttttgtgggcctgcgaccgctatcgtgcagatctgaaagcagtacgggaaaaatgcatggcactcatggcaaacgatgaggaatcagatgatgaaaccagcctcgagggagggatctcccccgacttagtgctcgagcggtcactggactacggctacggcggcgacttcgtggccctggacagaatggctaaatacgaaatcagcgcacttgaaggcggactgccccaactgtatcccctgcggccattgcaggaggataaaatgcaatatctacaggtgccgccaacacgtagattttctcatgatgacgcagatgtgtgggccgcagtgccccttcccgccttcttaccccgctggggctccggagaagatctcgccgctcttgcccacttggtgctccccgccggtccagagcgccgcagagccagcctactagctttcgctgaggatgcaccaccctcgagagcacgtcggcgatcggctgaatccctgttatctctgaggccctctgctcttgactccggaccaagaggagctcgggactccccacccggtagtcctcgtcgacggccgggcccaggcccaagaagtgccagcgcttcactcctgcccgatgcattcgcccttaccgcgtttgagtgtgagccacaggccctgaggcgacccccgggccctttccctgcagcccctgctgccccagacggagccgacccaggcgaagcccccacaccaccaagcagcgcccagaggagcccaggtcccagacccagcgctcactcacacgccggatcgctgcggccaggcctcagcgcctcttggggggagccaggggggcttagagctgccgggggtgggggaagtacttccagttttctttcctccccctcagagtcttctggctacgctacacttcacagcgactcactgggaagcgcatcttag

SEQ ID NO: 337960 - DNA, 1830 bp, Artificial Sequence
  derived and/or modified sequence
atgtctgatgaaagaaggctgcccggcagcgctgtgggctggctggtgtgtggcggcctgagcctgctggccaatgcctggggcatcctgtctgtgggcgccaagcagaagaagtggaagcccctggagttcctgctgtgcaccctggccgccacccacatgctgaatgtggccgtgcccatcgccacctacagcgtggtgcagctgcggcggcagaggccagactttgagtggaatgaaggcctgtgcaaggtgtttgtgtccaccttctacaccctgaccctggccacctgcttctctgtgaccagcctgagctaccacaggatgtggatggtgtgctggcctgtgaactaccgcctgagcaatgccaagaagcaggccgtgcacacagtgatgggcatctggatggtgtccttcatcctgagcgccctgcctgctgtgggctggcatgacaccagcgagcgcttctacacccacggctgccgcttcatcgtggccgagatcggcctgggcttcggcgtgtgcttcctgctgctggtgggcggctctgtggccatgggcgtcatctgcacagccatcgccctcttccagaccctggccgtgcaggtgggccggcaggccgacagaagagccttcaccgtgcccaccatcgtggtggaggatgcccagggcaagaggaggagcagcattgatggcagcgagcccgccaagaccagcctgcagaccaccggcctggtgaccaccatcgtgttcatctatgactgcctgatgggcttccctgtgctggtggtgtccttcagcagcctgcgggcagatgccagcgccccctggatggccctgtgtgtgctgtggtgcagcgtggcccaggccctgctgctgcccgtcttcctgtgggcctgtgaccgctacagagctgacctgaaggctgtgcgggagaagtgcatggccctgatggccaatgatgaggagagtgatgatgagaccagcctggagggcggcatcagcccagacctggtgctggagaggagcctggactatggctacggcggggactttgtggccctggacaggatggccaagtatgagatcagcgccctggagggcggcctgccccagctgtaccccctgcggcccctgcaggaggacaagatgcagtacctgcaggtgccccccacccggcgcttcagccatgatgatgctgatgtgtgggccgctgtgcccctgcctgccttcctgccccgctggggcagcggggaggacctggccgccctggcccacctggtgctgcctgctggccctgagcggcggcgggccagcctgctggcctttgctgaagatgccccacccagccgggcccggcggcgctctgctgagagcctgctgagcctgcggcccagcgccctggacagcggccccaggggggcccgggacagccccccaggcagccccaggagaagacctggccctggccccaggtctgccagcgccagcctgctgcctgatgcctttgccctgacagcctttgaatgtgagccccaggccctgcggcggcccccaggccccttccctgctgccccagctgccccagatggagctgaccccggggaggcccccaccccacccagcagcgcccagaggagccctggcccccggcccagcgcccacagccacgccggcagcctgcggcccggcctgagcgcctcctggggcgagcccggcggcctgcgggccgccggcggcggcggcagcaccagcagcttcctgagcagccccagcgagagcagcggctacgccaccctgcacagcgacagcctgggcagcgccagctag

SEQ ID NO: 337961 - DNA, 1830 bp, Artificial Sequence
  derived and/or modified sequence
atgagcgacgagcggcggctgcccggcagcgccgtgggctggctggtttgtggagggttgtcactgttagctaacgcatgggggattctgagcgtgggcgcaaaacagaaaaaatggaaacctctagagtttctgctctgcaccctggctgctacccacatgttaaacgtagccgtgcctatagctacatatagtgtggtgcagttgaggcgccagaggccagacttcgaatggaacgagggtctgtgcaaagtctttgttagcaccttctataccttgacactggctacgtgttttagcgtaacgagcttgtcttaccatcgcatgtggatggtgtgttggcctgttaattacaggttgtcaaatgccaagaaacaggccgtgcacacggttatgggtatatggatggtgtcttttatcctatccgctctacctgctgtgggctggcacgacacatcagagaggttttacactcacggctgccgctttatcgtagccgaaatcggactgggcttcggcgtgtgctttctgctcttagttgggggcagcgtggctatgggagtcatatgtacagccattgccctgtttcagaccctcgccgtccaggtcggaagacaagccgacaggagggcattcaccgtgcctaccattgtcgtggaggacgctcaaggcaaaagaaggtctagcatcgatggctcagaacccgcaaagacaagcttgcaaactacaggacttgtgaccacaatcgttttcatttatgactgccttatgggctttcctgtgttggtggtgagcttcagttccctgcgggctgatgcctcggccccctggatggccctgtgtgttctttggtgcagcgtggcccaggccctgcttctgcctgtctttctctgggcctgtgataggtacagggccgacctcaaagctgtgcgggaaaagtgcatggcattgatggccaatgacgaggaaagcgacgacgagacctccctagagggcgggattagtcccgacctggtccttgagcgtagcttagattacgggtatgggggggattttgtagcactggaccgcatggccaagtatgaaatttctgccctggaggggggacttcctcagctgtaccccctgaggcctttacaggaggataaaatgcagtatttgcaagtgcccccaactaggagatttagtcacgatgatgccgacgtctgggctgctgtaccgctccctgcgtttctcccaaggtggggctccggggaagatctggcggcccttgctcacttagtcctgccagcgggccctgagcggaggcgcgccagtttactggcgttcgccgaggatgcacctcccagtagggcacgtcgcaggtctgcggaatcgctgttaagtctgaggccgtctgcgctggactccggtcccaggggtgcccgggatagcccacctggcagccctcgccgccggcccgggccaggcccccgctcggcttcagcaagcctcctccctgacgcctttgccctaacagcatttgaatgcgagcctcaggccctgaggcggcctcccggtccgttccctgctgcacctgcagcacctgacggagcggaccctggcgaggctcctactcccccatcctctgcccagcgcagtccgggaccgcggccttcagctcactcccatgctggctctcttaggcccggcctgtcagcctcttggggagagcccgggggcctgagggccgcaggcggaggcggctcaacatcaagcttcttatctagtccttccgaatcctcaggctacgccacactccactccgacagtctaggaagtgctagttag

SEQ ID NO: 337962 - DNA, 1830 bp, Artificial Sequence
  derived and/or modified sequence
atgtctgacgagcggagactaccaggcagtgccgtcggatggcttgtgtgcggtggtctcagccttctagctaacgcttgggggatcctatccgtgggagcaaaacagaaaaagtggaaaccactggaattcctcctctgcactctcgcagccactcacatgttaaacgtagcagtgcccattgcaacctactccgtcgtccagctgcgacgtcagcggcctgatttcgaatggaatgagggcctgtgtaaagtttttgtgtcgacattttataccctgactttagcaacctgcttctcagtgaccagcctgagttaccatcgaatgtggatggtctgctggcccgtcaactaccggctgtctaacgccaagaaacaagctgtgcatacagtgatgggaatttggatggtcagttttattttgtcggccctgcctgccgtgggctggcatgacacaagcgagagattctacacccatggatgccgattcattgttgccgaaattggactgggatttggtgtctgcttcctgctgctggtgggtggttctgtcgccatgggcgtgatttgtacagctatcgcgttgttccagactctggcagtccaggtgggcaggcaggctgacaggcgggcatttaccgtgccgacaatcgtggtggaggatgcacaggggaagcgacggtctagcatagacgggagcgagcctgccaaaactagtctccagactaccggcctggtgacaacaattgtcttcatctatgattgccttatggggttccccgttctggtggtcagcttctcctcccttagggctgatgcttctgctccatggatggcgctatgtgtgttatggtgctctgtcgcccaggcgttgctcttgcctgtctttttgtgggcctgtgaccggtaccgcgcagatttgaaggccgtgcgggaaaagtgtatggcacttatggcaaatgatgaagagagcgacgacgagactagtctcgagggtggcatcagtcccgacctagtgcttgagaggagtcttgactatggctacgggggagattttgttgccctcgatagaatggccaagtacgagatctccgctctggagggagggctgccccaactgtaccccttgcgaccattgcaggaagataagatgcagtacttgcaagtgcctcccactcgcagattttcccacgacgatgccgatgtgtgggccgctgtgccattaccagccttccttcccaggtggggttctggcgaggatctcgccgcattagcccatcttgtgctacctgccggacccgaacgaagacgcgctagccttctggcgttcgccgaggatgcccctccaagcagggcacggaggaggtccgcagagtccttgttaagtttgaggccttccgcccttgattctgggcctcgcggagcgcgagacagccctccaggtagccctaggaggcgtcctggacccggaccaagaagtgccagcgccagcctgctccccgatgctttcgcccttaccgccttcgaatgtgaaccccaggccctccgcagacctccaggcccattccccgcagcgcctgcagcccctgatggcgctgaccccggtgaggcaccaacgccacccagctccgcccaacggagcccagggcctcggccttcagcacacagccacgctggctcactgcggcctggcctgtctgcttcttggggtgaaccaggcggtctgcgcgcagccggagggggagggtccacatcttccttcctgtcttcaccatcagagtcctccgggtacgctactctacattccgattccttgggctccgcctcttag

SEQ ID NO: 337963 - DNA, 1830 bp, Artificial Sequence
  derived and/or modified sequence
atgagcgacgagagaagactgcccggcagcgccgtgggctggctggtgtgcggcggcctgagcctgctggccaacgcctggggcatcctgagcgtgggcgccaagcagaagaagtggaagcccctggagttcctgctgtgcaccctggccgccacccacatgctgaacgtggccgtgcccatcgccacctacagcgtggtgcagctgagaagacagagacccgacttcgagtggaacgagggcctgtgcaaggtgttcgtgagcaccttctacaccctgaccctggccacctgcttcagcgtgaccagcctgagctaccacagaatgtggatggtgtgctggcccgtgaactacagactgagcaacgccaagaagcaggccgtgcacaccgtgatgggcatctggatggtgagcttcatcctgagcgccctgcccgccgtgggctggcacgacaccagcgagagattctacacccacggctgcagattcatcgtggccgagatcggcctgggcttcggcgtgtgcttcctgctgctggtgggcggcagcgtggccatgggcgtgatctgcaccgccatcgccctgttccagaccctggccgtgcaggtgggcagacaggccgacagaagagccttcaccgtgcccaccatcgtggtggaggacgcccagggcaagagaagaagcagcatcgacggcagcgagcccgccaagaccagcctgcagaccaccggcctggtgaccaccatcgtgttcatctacgactgcctgatgggcttccccgtgctggtggtgagcttcagcagcctgagagccgacgccagcgccccctggatggccctgtgcgtgctgtggtgcagcgtggcccaggccctgctgctgcccgtgttcctgtgggcctgcgacagatacagagccgacctgaaggccgtgagagagaagtgcatggccctgatggccaacgacgaggagagcgacgacgagaccagcctggagggcggcatcagccccgacctggtgctggagagaagcctggactacggctacggcggcgacttcgtggccctggacagaatggccaagtacgagatcagcgccctggagggcggcctgccccagctgtaccccctgagacccctgcaggaggacaagatgcagtacctgcaggtgccccccaccagaagattcagccacgacgacgccgacgtgtgggccgccgtgcccctgcccgccttcctgcccagatggggcagcggcgaggacctggccgccctggcccacctggtgctgcccgccggccccgagagaagaagagccagcctgctggccttcgccgaggacgccccccccagcagagccagaagaagaagcgccgagagcctgctgagcctgagacccagcgccctggacagcggccccagaggcgccagagacagcccccccggcagccccagaagaagacccggccccggccccagaagcgccagcgccagcctgctgcccgacgccttcgccctgaccgccttcgagtgcgagccccaggccctgagaagaccccccggccccttccccgccgcccccgccgcccccgacggcgccgaccccggcgaggcccccaccccccccagcagcgcccagagaagccccggccccagacccagcgcccacagccacgccggcagcctgagacccggcctgagcgccagctggggcgagcccggcggcctgagagccgccggcggcggcggcagcaccagcagcttcctgagcagccccagcgagagcagcggctacgccaccctgcacagcgacagcctgggcagcgccagctag

SEQ ID NO: 337964 - protein, 144 aa, Artificial Sequence
  derived and/or modified sequence
MVEEVRHSAAEEEDAIHALFGSMQDRLAERKALLLQAVQSQYEEKDKAFKEQLSHLATLLPTLQVHLVICSSFLSLANKAEFLDLGYAGRGLRPQGADGAPLPLPSRKDVGVTRPKAHAAPVHQHQGAAGGGREHALRRALPPL

SEQ ID NO: 337965 - DNA, 435 bp, Artificial Sequence
  derived and/or modified sequence
atggtggaggaggtgagacacagcgccgccgaggaggaggacgccatccacgccctgttcggcagcatgcaggacagactggccgagagaaaggccctgctgctgcaggccgtgcagagccagtacgaggagaaggacaaggccttcaaggagcagctgagccacctggccaccctgctgcccaccctgcaggtgcacctggtgatctgcagcagcttcctgagcctggccaacaaggccgagttcctggacctgggctacgccggcagaggcctgagaccccagggcgccgacggcgcccccctgcccctgcccagcagaaaggacgtgggcgtgaccagacccaaggcccacgccgcccccgtgcaccagcaccagggcgccgccggcggcggcagagagcacgccctgagaagagccctgccccccctgtag

SEQ ID NO: 337966 - DNA, 435 bp, Artificial Sequence
  derived and/or modified sequence
atggtagaagaggtacgccactcagcggctgaggaggaggatgccattcatgctctgttcggcagcatgcaggatagactggcagaacggaaggctcttctgctgcaggcggtgcagtcccaatacgaagagaaggataaggcatttaaagagcagctaagtcacctcgctacactgcttccgacactacaggtccaccttgtcatctgtagcagtttcttgagcctagctaacaaggctgaattcctggatctcggctacgccgggcggggactgcgcccccagggtgctgatggcgcccccctgccgctcccaagcagaaaggacgtgggggtgacaagacccaaagctcatgcggcacctgtgcatcagcaccagggcgccgctggtgggggccgcgagcatgcgcttcggcgggcactgcctcctctttag

SEQ ID NO: 337967 - DNA, 435 bp, Artificial Sequence
  derived and/or modified sequence
atggtggaggaggtgcgccacagcgctgctgaggaggaggatgccatccacgccctgtttggctccatgcaggaccggctggccgagaggaaggccctgctgctgcaggccgtgcagagccagtatgaggagaaggacaaggccttcaaggagcagctgagccacctggccaccctgctgcccaccctgcaggtgcacctggtgatctgcagcagcttcctgagcctggccaacaaggccgagttcctggacctgggctacgccggccggggcctgcggccccagggcgcagatggagcccccctgcccctgcccagcaggaaggatgtgggcgtgacccggcccaaggcccatgctgcccctgtgcaccagcaccagggcgctgctgggggcggccgggagcacgccctgcggcgggccctgccccccctgtag

SEQ ID NO: 337968 - DNA, 435 bp, Artificial Sequence
  derived and/or modified sequence
atggtggaggaggtgcggcacagcgccgccgaggaggaggacgccatccacgcattgttcggtagcatgcaggacagacttgccgagagaaaagccctgctgttacaggcagtgcagagccagtacgaagagaaagacaaggccttcaaggaacagttatcccatctagccacactgctgcctaccctccaggtgcacttagtcatttgcagcagttttctgtctcttgccaataaggccgaattcttggacctgggttatgctggacggggattgcggccgcagggcgcggatggggccccgctgccactgcccagccggaaagacgtgggcgtgacgaggccaaaggcgcacgccgcgcctgtgcaccaacatcaaggagcggcaggcggggggcgggaacacgctttgagacgcgccctcccgcctctgtag

SEQ ID NO: 337969 - DNA, 435 bp, Artificial Sequence
  derived and/or modified sequence
atggtggaggaagtcagacattctgcggcagaggaagaggatgctattcacgccctgtttggtagcatgcaggacaggctcgccgaaaggaaggccctgctactgcaggctgttcagtcccaatacgaggagaaggacaaggcctttaaggagcaactgtcacatcttgcaaccctgttgccaaccctgcaggtccacctggtgatctgtagtagctttctctcattagcgaataaagcggaatttttggacctgggatacgcagggagagggcttcggcctcagggtgctgacggtgctcctttacccctcccatcccggaaagatgtcggagtgacacgtccaaaggcccacgcagctcccgttcatcagcatcagggcgcagctggtggagggagggagcatgcattgagaagggccctgccaccgctatag

SEQ ID NO: 337970 - protein, 516 aa, Artificial Sequence
  derived and/or modified sequence
MGCGCSSHPEDDWMENIDVCENCHYPIVPLDGKGTLLIRNGSEVRDPLVTYEGSNPPASPLQGDPRQQGLKDKACGSLAVGFHLSPTYFLPGLAFLVPHPVTPGFLPIPARFSLMPLVFTDNLVIALHSYEPSHDGDLGFEKGEQLRILEQSGEWWKAQSLTTGQEGFIPFNFVAKANSLEPEPWFFKNLSRKDAERQLLAPGNTHGSFLIRESESTAGSFSLSVRDFDQNQGEVVKHYKIRNLDNGGFYISPRITFPGLHELVRHYTRYYNGHTKVAVKSLKQGSMSPDAFLAEANLMKQLQHQRLVRLYAVVTQEPIYIITEYMENGSLVDFLKTPSGIKLTINKLLDMAAQIAEGMAFIEERNYIHRDLRAANILVSDTLSCKIADFGLARLIEDNEYTAREGAKFPIKWTAPEAINYGTFTIKSDVWSFGILLTEIVTHGRIPYPGMTNPEVIQNLERGYRMVRPDNCPEELYQLMRLCWKERPEDRPTFDYLRSVLEDFFTATEGQYQPQP

SEQ ID NO: 337971 - DNA, 1551 bp, Artificial Sequence
  derived and/or modified sequence
atgggctgcggctgcagcagccaccccgaggacgactggatggagaacatcgacgtgtgcgagaactgccactaccccatcgtgcccctggacggcaagggcaccctgctgatcagaaacggcagcgaggtgagagaccccctggtgacctacgagggcagcaacccccccgccagccccctgcagggcgaccccagacagcagggcctgaaggacaaggcctgcggcagcctggccgtgggcttccacctgagccccacctacttcctgcccggcctggccttcctggtgccccaccccgtgacccccggcttcctgcccatccccgccagattcagcctgatgcccctggtgttcaccgacaacctggtgatcgccctgcacagctacgagcccagccacgacggcgacctgggcttcgagaagggcgagcagctgagaatcctggagcagagcggcgagtggtggaaggcccagagcctgaccaccggccaggagggcttcatccccttcaacttcgtggccaaggccaacagcctggagcccgagccctggttcttcaagaacctgagcagaaaggacgccgagagacagctgctggcccccggcaacacccacggcagcttcctgatcagagagagcgagagcaccgccggcagcttcagcctgagcgtgagagacttcgaccagaaccagggcgaggtggtgaagcactacaagatcagaaacctggacaacggcggcttctacatcagccccagaatcaccttccccggcctgcacgagctggtgagacactacaccagatactacaacggccacaccaaggtggccgtgaagagcctgaagcagggcagcatgagccccgacgccttcctggccgaggccaacctgatgaagcagctgcagcaccagagactggtgagactgtacgccgtggtgacccaggagcccatctacatcatcaccgagtacatggagaacggcagcctggtggacttcctgaagacccccagcggcatcaagctgaccatcaacaagctgctggacatggccgcccagatcgccgagggcatggccttcatcgaggagagaaactacatccacagagacctgagagccgccaacatcctggtgagcgacaccctgagctgcaagatcgccgacttcggcctggccagactgatcgaggacaacgagtacaccgccagagagggcgccaagttccccatcaagtggaccgcccccgaggccatcaactacggcaccttcaccatcaagagcgacgtgtggagcttcggcatcctgctgaccgagatcgtgacccacggcagaatcccctaccccggcatgaccaaccccgaggtgatccagaacctggagagaggctacagaatggtgagacccgacaactgccccgaggagctgtaccagctgatgagactgtgctggaaggagagacccgaggacagacccaccttcgactacctgagaagcgtgctggaggacttcttcaccgccaccgagggccagtaccagccccagccctag

SEQ ID NO: 337972 - DNA, 1551 bp, Artificial Sequence
  derived and/or modified sequence
atgggctgtggttgttcctcccatccagaagatgattggatggagaatattgatgtgtgtgagaattgccactaccccattgtgcccctcgatggtaagggtaccctccttattagaaatggctctgaggtgagagaccctctcgtcacctacgagggctccaatccccccgcctcaccactgcagggggaccccaggcagcaagggctgaaagataaagcctgcggcagcctcgcggtcggctttcatctttcccccacctatttcctcccagggttggcctttctggtcccgcaccctgtgacccccggcttccttcccattcccgccagattcagccttatgcccttggtcttcaccgacaatctggtaatcgccctgcattcctacgaaccctcccacgatggcgacctcggtttcgagaagggagagcagcttcggatcctggaacaaagcggggagtggtggaaggcccagagtctgactacaggacaggagggctttataccatttaacttcgtcgcaaaagctaattccctagagccggaaccatggttctttaagaacctgtctcgcaaggatgccgagcgtcagctgctggcacccggtaatacacacgggagtttcttgattcgagagtcagaatccactgctggctctttctccctgtcagtaagggactttgaccagaatcagggtgaagtggtcaaacattacaagattcggaacttggacaatggcggattctacatttctccgcggattacgtttccaggtcttcacgaactggttcggcattacacacgctattacaatgggcacaccaaggtcgcggtcaaatcgttgaaacaagggtccatgtcccccgacgcctttctcgcagaggcgaatctgatgaaacagttacagcaccaaaggctggttcgtttatacgcagtggttacccaggaaccaatctatatcattacagagtatatggagaacggtagtctagtggacttcctcaaaactcccagcgggatcaaactgacaattaacaaacttttggacatggccgcccagattgccgagggcatggcgttcatcgaagagcgcaactacattcacagagatctgcgtgcagctaatatccttgtgagtgacactctgtcgtgtaaaatcgctgacttcggccttgcccgactgatagaagataacgagtacactgccagggagggcgcaaagttccctatcaagtggacagcgcctgaggccattaactatggcaccttcactatcaagtcagacgtgtggagctttggaattttgcttacagagattgtcactcatggaaggataccttacccaggaatgaccaacccggaggtaatccagaatttggagcggggatataggatggtccgtccagacaattgcccagaggagctttatcagttaatgagactgtgttggaaggagagaccggaggaccgccccacatttgactatctaaggtcagtacttgaagacttttttaccgctacagagggccagtaccagccacaaccttag

SEQ ID NO: 337973 - DNA, 1551 bp, Artificial Sequence
  derived and/or modified sequence
atgggctgcggctgcagcagccacccagaagatgactggatggagaacattgatgtgtgtgagaactgccactaccccatcgtgcccctggatggcaagggcaccctgctgatcagaaatggcagcgaggtgcgggaccccctggtgacctatgagggcagcaaccccccagccagccccctgcagggcgacccccggcagcagggcctgaaggacaaggcctgtggcagcctggccgtgggcttccacctgagccccacctacttcctgcccggcctggccttcctggtgccccaccctgtgaccccaggcttcctgcccatcccagcccgcttcagcctgatgcccctggtgttcacagacaacctggtgattgccctgcacagctatgagcccagccatgatggagacctgggctttgagaagggggagcagctgcgcatcctggagcagagcggggagtggtggaaggcccagagcctgaccaccggccaggagggcttcatccccttcaactttgtggccaaggccaacagcctggagcctgagccctggttcttcaagaacctgagcaggaaggatgctgagcggcagctgctggcccctggcaacacccacggcagcttcctgatccgggagagcgagagcacagctggcagcttcagcctgtctgtgcgggactttgaccagaaccagggcgaggtggtgaagcactacaagatccggaacctggacaatggaggcttctacatcagcccccgcatcaccttccctggcctgcacgagctggtgcgccactacacccgctactacaacggccacaccaaggtggccgtgaagagcctgaagcagggctccatgagcccagatgccttcctggccgaggccaacctgatgaagcagctgcagcaccagaggctggtgcggctgtatgctgtggtgacccaggagcccatctacatcatcacagagtacatggagaatggcagcctggtggacttcctgaagaccccatctggcatcaagctgaccatcaacaagctgctggacatggccgcccagattgctgagggcatggccttcatcgaggagaggaactacatccaccgggacctgcgggccgccaacatcctggtgtctgacaccctgagctgcaagattgctgactttggcctggcccggctgattgaagataatgagtacacagcccgggagggcgccaagttccccatcaagtggacagcccctgaggccatcaactacggcaccttcaccatcaagagtgatgtgtggagctttggcatcctgctgacagagatcgtgacccacggccgcatcccctacccaggcatgaccaaccctgaggtgatccagaacctggagcggggctacaggatggtgcggccagacaactgcccagaggagctgtaccagctgatgaggctgtgctggaaggagaggccagaagatcggcccacctttgactacctgcggtctgtgctggaggacttcttcaccgccacagagggccagtaccagccccagccctag

SEQ ID NO: 337974 - DNA, 1551 bp, Artificial Sequence
  derived and/or modified sequence
atgggctgtggctgcagctcacacccggaagatgactggatggaaaacatcgatgtgtgtgagaactgccattatcccatagtcccactggatggcaagggcacgctgctcatccgaaatggctctgaggtgcgggacccactggttacctacgaaggctccaatccgccggcttccccactgcaaggtgaccccaggcagcagggcctgaaagacaaggcctgcggatccctggctgttggcttccacctctcccccacctactttctccccggtcttgccttccttgtcccccaccctgtaactccaggcttcctgccgatcccagctcggttctccctgatgccccttgtctttacagacaacctggttatcgctctgcacagctatgagccctctcacgacggagatctgggctttgagaagggggaacagctccgcatcctggagcagagcggcgagtggtggaaggcgcagtccctgaccacgggccaggaaggcttcatccccttcaattttgtggccaaagcgaacagcctggagcccgaaccctggttcttcaagaacctgagccgcaaggacgcggagcggcagctcctggcgcccgggaacactcacggctccttcctcatccgggagagcgagagcaccgcgggatcgttttcactgtcggtccgggacttcgaccagaaccagggagaggtggtgaaacattacaagatccgtaatctggacaacggtggcttctacatctcccctcgaatcacttttcccggcctgcatgaactggtccgccattacaccaggtactacaacgggcacacgaaggtggcggtgaagagcctgaagcagggcagcatgtccccggacgccttcctggccgaggccaacctcatgaagcagctgcaacaccagcggctggttcggctctacgctgtggtcacccaggagcccatctacatcatcactgaatacatggagaatgggagtctagtggattttctcaagaccccttcaggcatcaagttgaccatcaacaaactcctggacatggcagcccaaattgcagaaggcatggcattcattgaagagcggaattatattcatcgtgaccttcgggctgccaacattctggtgtctgacaccctgagctgcaagattgcagactttggcctagcacgcctcattgaggacaacgagtacacagccagggagggggccaagtttcccattaagtggacagcgccagaagccattaactacgggacattcaccatcaagtcagatgtgtggtcttttgggatcctgctgacggaaattgtcacccacggccgcatcccttacccagggatgaccaacccggaggtgattcagaacctggagcgaggctaccgcatggtgcgccctgacaactgtccagaggagctgtaccaactcatgaggctgtgctggaaggagcgcccagaggaccggcccacctttgactacctgcgcagtgtgctggaggacttcttcacggccacagagggccagtaccagcctcagccttga

SEQ ID NO: 337975 - DNA, 1551 bp, Artificial Sequence
  derived and/or modified sequence
atgggctgcggctgcagcagccaccccgaggacgactggatggagaacatcgacgtttgcgagaattgtcactacccgattgttcctctggatgggaagggaaccctgctgatcaggaacggaagtgaagttagagacccacttgttacctatgaaggcagcaaccctcctgcttcacctttgcaaggtgacccacgccaacaaggcctgaaagataaggcgtgcggcagcctcgccgtaggcttccacctgagtccaacttactttctgcccggactagcattcctggtgcctcatccagtgacaccaggctttctgccaatacctgctcgcttttctttgatgccacttgtgtttaccgataatctggtgatcgccctgcactcttacgagccaagtcacgacggagatctcggtttcgagaagggggagcagctgcgcattctcgaacagagcggcgaatggtggaaggcccagtctttaacaacaggtcaggaagggtttatacctttcaattttgttgccaaggctaatagtctggagcccgagccgtggttctttaaaaatctgtcccggaaagacgccgaacgacagctcttagcacctggtaacacccacgggagtttccttattcgtgagtccgaaagtactgccggtagtttttctctgtctgtgagagacttcgaccagaaccagggtgaggtagtcaagcattataagatccggaacctagacaacggagggttctacataagcccacggattacattcccaggtcttcatgagttggtcaggcattatacacggtactacaacggacataccaaggtagctgttaagtcactgaagcagggctctatgagtcctgatgcgtttttggccgaggctaatctgatgaagcagctccagcatcagcggctggtgaggctgtacgcggtcgtgacacaggagcctatctatattatcactgaatacatggaaaacggttccctggtggatttccttaagactccctcaggcatcaagctgactatcaacaaactcctggatatggcagcgcagattgcagagggcatggcttttattgaagagagaaattatatacacagggatctcagagccgcaaacatcctcgtttccgatactttatcttgcaagatcgccgacttcggtctggcccggctgatcgaggacaacgagtacacagcccgggaaggagccaaattcccaataaaatggaccgcacctgaggctattaattacggtaccttcacaataaagagtgacgtgtggagtttcggcattcttttgactgagatagttactcacggccgtatcccctatcctggaatgactaaccctgaggtgattcagaacctggaaaggggctaccggatggtcaggccagacaactgtcctgaggagctgtaccaattgatgagactgtgctggaaagaaagaccagaggataggccaacgttcgactatttaagatccgtgctggaggacttctttaccgccaccgaaggccagtaccagccacagccatag

SEQ ID NO: 337976 - DNA, 1551 bp, Artificial Sequence
  derived and/or modified sequence
atggggtgtggatgttcgtcacatccagaggacgactggatggagaacatcgacgtttgtgaaaactgtcactaccccatcgtgcccctggacggcaaaggaacactactgatccgcaacggcagtgaagtgagagatcccctggttacttacgaagggtcaaatcctccggcttctccattacagggggaccccagacagcagggactgaaagacaaggcctgcggatctctggccgtggggttccacctgagtcctacatattttctgcccggactggcttttctggtgccccatcctgttacccctgggtttctgccaatccctgcgagattctcactgatgccacttgtgtttaccgacaacctagtgattgctctccattcgtatgaaccatctcatgatggggatttaggctttgagaagggggaacagctgcgcatcctggaacaatcaggagaatggtggaaagcccaaagtctcacaacaggccaagaaggatttattccttttaatttcgtcgccaaggccaacagtctagagccggaaccctggttttttaagaatctgtccagaaaagacgcggaacgccagctcctcgcgcctgggaacacccacggcagctttctgatcagagagtcagaaagcactgccggatcgttctccctgagtgtgcgcgattttgaccagaaccagggcgaggttgtcaagcactataagatcagaaatctggataatgggggattctatatcagtccacgtattacattccctggattgcatgaattggtccggcattacactaggtactacaatgggcacactaaagtagcagtgaagtcgctaaagcaggggtctatgtcccccgatgcgtttctggcggaagctaaccttatgaaacagctgcaacaccaacgtcttgtgcgcctctatgcagtggtgacacaggagccgatctacatcatcactgagtatatggaaaatggctcccttgttgatttcctaaagacgcctagtggaattaaactcaccatcaacaagctgctcgatatggccgctcaaattgcggaaggaatggcattcatcgaagagaggaattacattcaccgggacttgcgagcagccaacatactcgtgagcgatactctctcatgtaaaatcgctgattttggcctggctcggttgatcgaggacaacgaatacacagcaagggagggcgcaaagtttccaattaaatggaccgcacctgaagcgatcaactacgggaccttcactattaaaagcgatgtgtggtcgttcgggattctgctcaccgaaattgtgacacatgggaggataccgtatccgggaatgactaaccccgaggtcattcagaatttagagaggggatacagaatggtgagacccgataactgcccagaggagctctaccaattgatgcggctctgttggaaagaaaggcccgaagaccggccaaccttcgattatctccgaagcgtcctcgaggatttcttcactgcaacagagggccagtaccagccgcagccttag

SEQ ID NO: 337977 - protein, 80 aa, Artificial Sequence
  derived and/or modified sequence
MAEKILEKLDVLDKQAEIILARRTKINRLQSEGRKTTMAIPLTFDFQLEFEEALATSASKAISKIKEDKSCSITKSKISE

SEQ ID NO: 337978 - protein, 281 aa, Artificial Sequence
  derived and/or modified sequence
MAEKILEKLDVLDKQAEIILARRTKINRLQSEGRKTTMAIPLTFDFQLEFEEALATSASKAISKIKEDKSCSITKSKMHVSFKCEPEPRKSNFEKSNLRPFFIQTNVKNKESESTEPVEEHLKSRSIRPYLYLKDTTEMENAGPLNVLYSQHRQACRRSLGSTDFSPMFNIQSNAHKKEKDSTLFTAQIEKKPRKPLDSVGLLEGDRNKRKKSPQMNDFNIKENKSVRNYQLSKYRSVRKKSLLPLCFEDELKNPHAKIVNVSPTKTVTSHMEQKDTNPII

SEQ ID NO: 337979 - DNA, 846 bp, Artificial Sequence
  derived and/or modified sequence
atggccgagaagatcctggagaagctggacgtgctggacaagcaggccgagatcatcctggccagaagaaccaagatcaacagactgcagagcgagggcagaaagaccaccatggccatccccctgaccttcgacttccagctggagttcgaggaggccctggccaccagcgccagcaaggccatcagcaagatcaaggaggacaagagctgcagcatcaccaagagcaagatgcacgtgagcttcaagtgcgagcccgagcccagaaagagcaacttcgagaagagcaacctgagacccttcttcatccagaccaacgtgaagaacaaggagagcgagagcaccgagcccgtggaggagcacctgaagagcagaagcatcagaccctacctgtacctgaaggacaccaccgagatggagaacgccggccccctgaacgtgctgtacagccagcacagacaggcctgcagaagaagcctgggcagcaccgacttcagccccatgttcaacatccagagcaacgcccacaagaaggagaaggacagcaccctgttcaccgcccagatcgagaagaagcccagaaagcccctggacagcgtgggcctgctggagggcgacagaaacaagagaaagaagagcccccagatgaacgacttcaacatcaaggagaacaagagcgtgagaaactaccagctgagcaagtacagaagcgtgagaaagaagagcctgctgcccctgtgcttcgaggacgagctgaagaacccccacgccaagatcgtgaacgtgagccccaccaagaccgtgaccagccacatggagcagaaggacaccaaccccatcatctag

SEQ ID NO: 337980 - DNA, 846 bp, Artificial Sequence
  derived and/or modified sequence
atggctgagaaaatcctcgagaaactggacgtgctggacaagcaggccgaaattattcttgcacgaagaaccaaaataaatcggttacagtcagaggggagaaagacaacaatggcgatcccacttacatttgatttccaactggagttcgaagaggcactggctactagtgcaagtaaggctattagtaagatcaaagaggacaagagctgttcaattaccaagtccaaaatgcatgtgagttttaagtgcgagcccgagccccgtaaatcaaactttgagaaatcaaatctgagaccttttttcatccagaccaatgtcaaaaataaagagtccgagtccactgagcctgtcgaagagcatctgaaaagccgcagtatacggccctacctgtatctcaaggatacaactgaaatggagaatgcaggccctctgaacgtcctgtatagccagcaccgacaggcctgtcggcgctctctgggcagcacagacttttcacctatgtttaacatccaaagtaacgcgcacaagaaagagaaagactctacgctgtttactgcccagatagagaagaagccccggaagccactcgattcggttggcctactggagggggaccgtaacaagcgcaaaaagtcgcctcaaatgaacgattttaatatcaaggaaaacaaaagcgttcggaattaccaactttcaaaatatcgctctgtgcgcaagaagagcctgctgcccttgtgctttgaggacgagctgaagaatccccacgctaagatcgtcaacgtgtccccaaccaagaccgtaacctctcacatggaacaaaaggacacgaaccctataatttag

SEQ ID NO: 337981 - DNA, 846 bp, Artificial Sequence
  derived and/or modified sequence
atggccgagaaaattttggagaaactggatgtgctggataagcaggccgagattatcttggcccgcagaaccaagattaatagacttcagagtgaggggcgcaaaaccaccatggcaataccactgaccttcgatttccaactcgaattcgaagaggccttagccacctctgcaagcaaggcaatttctaaaatcaaggaggataagtcatgttcaataacaaagtccaagatgcacgtctctttcaaatgcgaaccagaaccacgcaagtcaaacttcgaaaagagtaatctccggcccttcttcattcagactaacgttaagaataaggagtcagaatctacagagcccgtggaagagcatctcaagagtcgttcaatccgcccctacctgtatctaaaggatactacggagatggagaacgctggccctctgaacgtcctttactcacagcacaggcaagcctgcagaaggtccttgggttccacagatttttcgcccatgttcaatatccagtcgaacgctcataagaaggaaaaggattcgaccttgtttacagcccagatcgagaaaaagccaagaaaaccgctggatagcgttggacttctggagggggatcgcaacaaaagaaaaaagagcccacaaatgaacgatttcaatataaaggaaaacaagtctgtaaggaattaccagctctccaagtaccggtcagttcgcaagaaatccctgctgcctctgtgctttgaggacgaactgaagaacccccatgcaaaaattgtgaatgtgagccccactaaaactgttacttcacacatggagcagaaggacaccaaccctatcatttag

SEQ ID NO: 337982 - DNA, 846 bp, Artificial Sequence
  derived and/or modified sequence
atggccgagaagatcctggagaagctggatgtgctggacaagcaggccgagatcatcctggcccggaggaccaagatcaaccggctgcagagcgagggcaggaagaccaccatggccatccccctgacctttgacttccagctggagtttgaggaggccctggccaccagcgccagcaaggccatcagcaagatcaaggaggacaagagctgcagcatcaccaagagcaagatgcacgtgtccttcaagtgtgagcctgagcccaggaagagcaactttgagaagagcaacctgcggcccttcttcatccagaccaacgtgaagaacaaggagagcgagagcacagagcctgtggaggagcacctgaagagccgcagcatccggccctacctgtacctgaaggacaccacagagatggagaatgccggccccctgaatgtgctgtacagccagcaccggcaggcctgcagaagaagcctgggcagcacagacttcagccccatgttcaacatccagagcaatgcccacaagaaggagaaggacagcaccctcttcaccgcccagatcgagaagaagcccaggaagcccctggacagcgtgggcctgctggagggggacaggaacaagaggaagaagagcccccagatgaatgacttcaacatcaaggagaacaagtctgtgaggaactaccagctgagcaagtacagatctgtgaggaagaagagcctgctgcccctgtgctttgaagatgagctgaagaacccccacgccaagatcgtgaatgtgagccccaccaagacagtgaccagccacatggagcagaaggacaccaaccccatcatctag

SEQ ID NO: 337983 - DNA, 846 bp, Artificial Sequence
  derived and/or modified sequence
atggccgagaagatcctggagaagctggacgtgctggacaagcaggcagaaataatcctcgctaggcgaactaaaatcaacaggctacaatcagagggaaggaaaacaactatggctatcccactgacctttgacttccaattagagtttgaggaggcattggctacttctgcttccaaagccatctccaagatcaaagaagacaaaagctgctctataaccaaaagtaagatgcacgtcagcttcaaatgtgagcctgagcctaggaagagcaacttcgagaaatccaacttgaggcctttctttatccagacgaatgttaaaaacaaagaatccgaaagcacggagcctgtggaggagcatttaaagtcccggtctatcagaccctacctttatctcaaagatacgactgagatggaaaatgcaggtcctttaaatgtattgtattcccaacaccggcaggcatgtcggagaagtcttgggtccaccgatttctcgccaatgttcaacattcagagcaatgctcacaaaaaagaaaaggacagcactctgttcactgctcaaatagagaagaagccccggaagcccctggattcagtggggttgctggaaggtgaccgaaacaagcgcaaaaagtcaccgcagatgaacgattttaacatcaaagaaaataaatctgtcagaaactatcagttatcaaaatacagatcagtaagaaagaagtctctcttgcccctgtgttttgaggatgaactgaaaaacccccacgccaagatcgttaatgtgagccctaccaaaaccgtgacttcacatatggagcagaaggacacaaatcccatcatttag

SEQ ID NO: 337984 - DNA, 846 bp, Artificial Sequence
  derived and/or modified sequence
atggccgagaagatcctggagaagctggacgtgctggacaagcaggccgaaatcattctcgcaaggcgaactaagatcaaccggctccagtctgaaggccgcaagactacaatggcgatacctctgacgttcgacttccagctcgaattcgaggaagctcttgcaacatcggcgtcaaaagcaatatccaaaattaaagaggacaagtcctgttctattacaaagtctaaaatgcacgtatcgttcaagtgtgagcctgagcctcgcaagtctaattttgagaagtccaatctgcggcctttttttatccaaacaaacgtgaaaaataaggaaagcgaaagcacagagcccgtagaagaacacctgaagagtaggagcatcaggccatatctatacctgaaggataccacagaaatggaaaacgctgggcccctgaacgttctgtatagccagcaccggcaagcatgccggaggtctctgggatccacggactttagccccatgttcaatatccagtccaatgcccacaaaaaggaaaaagacagtactctgttcaccgcacaaatcgaaaaaaaaccccgaaagcctcttgattcggtaggcctgctggagggagatcggaataagcgtaagaaaagtccccaaatgaacgactttaatattaaagagaataagtccgtccggaattatcagctgagcaaatatcggagcgtaaggaaaaaaagcttgctgcccctgtgcttcgaagatgagctcaagaacccgcatgccaaaattgtgaatgtctctccaactaagaccgtcacaagccacatggaacagaaagatacgaatcctatcatttag

SEQ ID NO: 337985 - DNA, 846 bp, Artificial Sequence
  derived and/or modified sequence
atggctgaaaagatcctggaaaagctagacgtgttagacaaacaggctgagatcattctggccaggaggactaagataaatcgtctgcagtcggagggcagaaaaaccacgatggcaattccgctcacttttgacttccagctggagttcgaggaggccttggccacctcggccagcaaagccattagcaagatcaaggaggacaaatcttgctccattactaagtcaaaaatgcacgtgtccttcaaatgcgaacccgaacctaggaagtcaaatttcgagaagtctaatttacgaccttttttcatccagacaaacgtcaagaacaaggagagtgagtctaccgaacccgtggaggaacacctgaagagcaggtcaattaggccttatctctacctcaaggacactacagagatggagaacgctggccctctgaatgtgctgtattctcaacatagacaggcttgcaggcggagtctcggatccaccgatttctcacccatgttcaatatacagtccaacgcacacaagaaagagaaggattctacactctttaccgcccagatcgaaaagaagcccaggaaacccttagactcggtgggactactggagggtgatcgtaacaagcgaaaaaaatcacctcaaatgaacgatttcaacatcaaagaaaacaaatccgttcggaattatcaactgtctaagtatcgatctgttcgcaagaagagcttacttcccttatgctttgaagacgagctgaaaaatccccatgctaagatcgtcaacgtgagccctaccaaaaccgtgacatctcatatggagcagaaggacaccaatccgattatatag

SEQ ID NO: 337986 - DNA, 846 bp, Artificial Sequence
  derived and/or modified sequence
atggctgagaagatccttgagaagcttgacgtgctggataagcaggctgaaataatcctagcaagaagaaccaagatcaaccggctgcagtccgaaggacggaagaccaccatggcaattccattgacattcgatttccagctggagtttgaggaggcgttggccacctccgccagtaaagcaatcagtaaaatcaaagaagacaagagttgttccatcaccaagagtaagatgcacgtgagctttaagtgcgaacccgagcctcggaagtcaaattttgagaagtcaaacttacggccattttttattcagacaaacgttaaaaataaagaatccgagtctaccgaaccggtggaagagcatttgaagagcagatctatcaggccgtacctttatctaaaagacactacagagatggagaacgccggaccacttaatgtgctatactctcagcataggcaggcgtgccgtcgaagtctcggcagcacagacttctccccaatgttcaatatacaatcaaatgcccacaagaaggagaaggatagcacgctgtttacagctcaaattgagaagaaacctaggaagcctttggattcagtcggtctgctggaaggcgatcgcaataaaagaaaaaagagcccccaaatgaatgactttaacatcaaagaaaataagtccgtcaggaactaccaacttagtaagtacaggagcgtcaggaagaagtcgcttctcccactgtgttttgaggatgagcttaagaacccacacgccaaaattgtcaacgtaagtcctaccaagaccgtcacttcacacatggagcagaaggatacgaatcccatcatctag

SEQ ID NO: 337987 - DNA, 1599 bp, Artificial Sequence
  derived and/or modified sequence
gccagaagagggaggaaaggagatgagatttcatcatgttggccagcctggtctcaaactcctgacctcaagtgacccgcctgcctcagcctcccaaagtgctgggattacaggaatttagtgattgacaatggcagaaaaaatcctagagaagttggatgtccttgataagcaagcagagataatcttggccagaagaacaaagataaacaggcttcagagtgaaggaagaaaaacaactatggctatacccctgacatttgattttcagttggaatttgaagaagctcttgctacatccgcgtctaaggcaatatcaaagatcaaagaagacaagtcatgcagcattacaaaatcaaaaatgcatgtctctttcaaatgtgagcctgaacctagaaagagtaattttgaaaagtcaaatttaagaccattctttattcaaacaaatgtaaaaaataaagaaagtgagtcaacagagccagtagaagaacatctaaaatcaagatctattagaccctatctttatcttaaggatacaactgagatggaaaatgcagggcctttgaatgttctatattcacagcatagacaagcatgtagaagatcactgggttctacagacttttctcctatgttcaacattcagtctaatgctcataaaaaggaaaaagactctactttatttacagctcaaattgaaaaaaaacctaggaaaccattggattctgttggtctcttagaaggtgatagaaataaaagaaaaaaatctccacagatgaacgattttaatataaaagaaaacaaatcggtcagaaattatcaattaagtaagtataggtcagtaagaaagaaaagcttgctcccgttgtgctttgaggatgaattgaaaaatccacatgccaagatagtcaacgttagtccaacaaagacagtaacttctcacatggaacaaaaggacacaaatcccataattttccatgacacagaatatgtacgaatgttacttttgacaaaaaatagattttcttctcatcctttggaaaatgaaaacatttacccacataaaagaacaaatttcattttagaaagaaattgtgaaatcctcaaatctataattggcaatcaatctatttctcttttcaaaccccaaaaaactatgcctacagtacagagaaaagatatacagatccctatgtcttttaaagcgggccacacaactgtagatgataaactaaagaagaaaactaataagcagacactagaaaacagatcttggaatacactctataatttctcacagaatttttctagcctaacaaaacaatttgtgggttaccttgataaagctgttattcatgaaatgagtgcccaaactggaaaatttgaaagaatgttttctgcaggaaaaccaacgagcatacccacatccagtgccttacctgtcaaatgttactcaaagccttttaaatatatatatgaactaaataatgtaacgccactggataatttgttaaacttatcaaatgaaattttaaatgcctcataaaatattatgtatgcagcaatatttgagtaacaagaagcaaatatccaagttcc

SEQ ID NO: 337988 - DNA, 950 bp, Artificial Sequence
  derived and/or modified sequence
gggtttcagtatgttggccaggctggtcttgaactcctgacctcaagtgatctgcccgcctcggcctcccaaagtgctgggattacaggaatttagtgattgacaatggcagaaaaaatcctagagaagttggatgtccttgataagcaagcagagataatcttggccagaagaacaaagataaacaggcttcagagtgaaggaagaaaaacaactatggctatacccctgacatttgattttcagttggaatttgaagaagctcttgctacatccgcgtctaaggcaatatcaaagatcaaagaagacaagtcatgcagcattacaaaatcaaaaatgcatgtctctttcaaatgtgagcctgaacctagaaagagtaattttgaaaagtcaaatttaagaccattctttattcaaacaaatgtaaaaaataaagaaagtgagtcaacagagccagtagaagaacatctaaaatcaagatctattagaccctatctttatcttaaggatacaactgagatggaaaatgcagggcctttgaatgttctatattcacagcatagacaagcatgtagaagatcactgggttctacagacttttctcctatgttcaacattcagtctaatgctcataaaaaggaaaaagactctactttatttacagctcaaattgaaaaaaaacctaggaaaccattggattctgttggtctcttagaaggtgatagaaataaaagaaaaaaatctccacagatgaacgattttaatataaaagaaaacaaatcggtcagaaattatcaattaagtaagtataggtcagtaagaaagaaaagcttgctcccgttgtgctttgaggatgaattgaaaaatccacatgccaagatagtcaacgttagtccaacaaagacagtaacttctcacatggaacaaaaggacacaaatcccataatttt

SEQ ID NO: 337989 - protein, 80 aa, Artificial Sequence
  derived and/or modified sequence
MAEKILEKLDVLDKQAEIILARRTKINRLQSEGRKTTMAIPLTFDFQLEFEEALATSASKAISKIKEDKSCSITKSKISN

SEQ ID NO: 337990 - DNA, 4271 bp, Artificial Sequence
  derived and/or modified sequence
gagacagggtttcagtatgttggccaggctggtcttgaactcctgacctcaagtgatctgcccgcctcggcctcccaaagtgctgggattacaggaatttagtgattgacaatggcagaaaaaatcctagagaagttggatgtccttgataagcaagcagagataatcttggccagaagaacaaagataaacaggcttcagagtgaaggaagaaaaacaactatggctatacccctgacatttgattttcagttggaatttgaagaagctcttgctacatccgcgtctaaggcaatatcaaagatcaaagaagacaagtcatgcagcattacaaaatcaaaaatctcaaattgaaaaaaaacctaggaaaccattggattctgttggtctcttagaaggtgatagaaataaaaggtaatttattttaaaatgcttaatactttgttctgtttaatgatgtttctagtaggacacattttataattgacaggaataaatttattctgccttattatttagttccacagcacaatccaatgaatggtccaagactgcttagccactagatatcacatccagaccttgagtattgttaaatggagagaaaggcatggaaaaatgaatagagggaatacaatttttttttttagtaaatacacacatttacttacatgacaacatggacatgaaaaagtagcttttctttggataaagttctcatttttctcatgaacccttccatctctgtataatgaaaaaaatcattaatccagtgtgtttcaaactttgtttgaatcaataatgaacaagcactttaggtttaactcagtttaaaaattatatcctgtctctgcctgaccacactattctatcctcttaacaaagctggggccaccctatgttggcatgaagctgccctgtggagcttcttccagaatttcaacataggacgttgcaaatacctctctacctttggtgttctcctcaacctacgtaataatacaactcgtccccactcaaaatccaaagaggcatatatatgactctcttgcttccactcctactcttgctgttttctcccacaaaccaggcaggacgggatgatcttgtcggtttgaaaagtctgtgggagagaggttggtgcagaagttggcagtgacttccagggataaaaggaggcagacaagaactgacaagctgtaatcagccccatgaacactaccctgaactgtgtttattttcagaaaaaaatctccacagatgaacgattttaatataaaagaaaacaaatcggtcagaaattatcaattaagtaagtataggtcagtaagaaagaaaagcttgctcccgttgtgctttgaggatgaattgaaaaatccacatgccaagatagtcaacgttagtccaacaaagacagtaacttctcacatggtaataagcatatcatctattgttaagtaaatatgtgtagtcataagacttatgggaatcacccatatattttagtgaccagaatctttgataaatcctttttacctcttggtttcatattccaaagtgataacagcacttaagttcttaatgcactttgcacaactcccaaaccagggattcctttataccagctgaaaattcagtgtttttctttatgaagaagcctttatcaaatttgcttgattataatagaactgtagaataaaaagaattttttaaaaatggctgtaccaatctagcagaatgcagtggtgtgcacctgtaatccccgctactctggagtctgaggcaggggaactgcttgagcccaggcatttgaatccagcctgagcaatataacaagaccccagttctaaaatgatgggaccatgaccatgtgtcaatttttctaacaatctgttttggctttttcaaccagaaagtgcatttattaaaggctatttagtaactcatgctctctagagaggcaatatggctcgaaagctgtctagtcaggaatcacctaattatatagccccagactgctccactgaggcccatgctattgtcacagataaaagtttacaactctgatgctgagcagggaatactctaagacatttgctactgctgtcattcaaagctagatgtaactcctaccaccctcactagaatagttttcccaatactttttcacagtgcttgctttctctgaactgaagacttcataggtgtatctgaatggcagagcctagggcaaatgcctatgtcctaaccgcaaagaagctgataaacatggttcttgcctctacctaagggtacatagacttgtcaagtggaaaattccctaaggtgttggacagaccaaaagcattacaaacatccattactatggctaaataggtaatattggcatcaccagtggattgcaaaactagatctttgtcatcttttcagtaatcatagcagacttggatattactgcgataaaaatgtctattcttaagtcaatctattactttggctattttattccacaaatatatattgagcactttttaggtgtcaggtattgtgctaagtattagggtacaataataacagttgtagagataatttttaattttttgaattacttactagaatatccagatttgtaattttggcttgtaatcagttatgtctcttctgaactttgactcaatccattttttggtatgctttttaatttctagaacatggaaacctaagaaatgccagaacaaccaccttatttctcaatgacagtaccccagatatttaacaaatatattaattttttcgtattccaatttatttcaaaaaacatttaaggccaaaagttcaagttttatcactaacatctctatagaatattaagataagaaggatgtatgttacatacaagtacagtattttcatgtatttgaataatgctactgttcatattaaatatttgtatgtagtcatttttagaatattttacaattttatttacatgttttaaaatatatggagctttcttgactcaatgaacttatgactaattattcttttctttaatctacaggaacaaaaggacacaaatcccataattttccatgacacagaatatgtacgaatgttacttttgacaaaaaatagattttcttctcatcctttggaaaatgaaaacatttacccacataaaagaacaaatttcattttagaaagaaattgtgaaatcctcaaatctataattggcaatcaatctatttctcttttcaaaccccaaaaaactatgcctacagtacagagaaaagatatacagatccctatgtcttttaaagcgggccacacaactgtagatgataaactaaagaagaaaactaataagcagacactagaaaacagatcttggaatacactctataatttctcacagaatttttctagcctaacaaaacaatttgtgggttaccttgataaagctgttattcatgaaatgagtgcccaaactggaaaatttgaaagaatgttttctgcaggaaaaccaacgagcatacccacatccagtgccttacctgtcaaatgttactcaaagccttttaaatatatatatgaactaaataatgtaacgccactggataatttgttaaacttatcaaatgaaattttaaatgcctcataaaatattatgtatgcagcaatatttgagtaacaagaagcaaatatccaagttccaaaattataaaagaaattcttatccaaatagtaatgttctaattgatcatataagaaagcaaagcatagacattagaattataagtcagcagtggtctgttcaagaacaatcaacatttttagaaaatagtaggacaaaattaggaaataattatcaccaagaggatctagttcatgactttctattatctcaattagattgctcaatcatcagccttcctatactaaactctgattcaggaccaagaaaggcatagtctgactctggaaatgcgctgttggaagccaaataacatcaatactcttgttctataattgaatatcaaataagacaaattaccattaatttaatgactgtggagttaattgtataccagcatttcagcaaatcatcatcaatagtattacattagcaatttatgcaattaaaagggctttgtaaaactttgaatagattttattgtcattagtagctgttggaacttcattattatataatgtttttgcaaactttaacttttttctaaattgttaaataaaagaataactatccttaa

SEQ ID NO: 337991 - DNA, 243 bp, Artificial Sequence
  derived and/or modified sequence
atggccgagaagatcctggagaagctggacgtgctggacaagcaggccgagatcatcctggccagaagaaccaagatcaacagactgcagagcgagggcagaaagaccaccatggccatccccctgaccttcgacttccagctggagttcgaggaggccctggccaccagcgccagcaaggccatcagcaagatcaaggaggacaagagctgcagcatcaccaagagcaagatcagcgagtag

SEQ ID NO: 337992 - DNA, 243 bp, Artificial Sequence
  derived and/or modified sequence
atggccgagaagatcctggagaagctggacgtgctggacaagcaggccgagatcatcctggccagaagaaccaagatcaacagactgcagagcgagggcagaaagaccaccatggccatccccctgaccttcgacttccagctggagttcgaggaggccctggccaccagcgccagcaaggccatcagcaagatcaaggaggacaagagctgcagcatcaccaagagcaagatcagcaactag

SEQ ID NO: 337993 - DNA, 243 bp, Artificial Sequence
  derived and/or modified sequence
atggctgaaaagattctggaaaagcttgatgtgctcgacaagcaggccgagattattttggccaggcgcacaaaaatcaacagactgcagagtgagggacggaaaacaactatggctattccgctgacattcgattttcagttggaatttgaggaagcactggctacttcagcctccaaagctatctccaagattaaggaggacaagtcttgcagcatcaccaagagcaagatctcagaatag

SEQ ID NO: 337994 - DNA, 243 bp, Artificial Sequence
  derived and/or modified sequence
atggcagagaaaatccttgaaaagcttgacgtgctggacaaacaagctgaaattattcttgcacgcagaacaaagataaatagactgcagtcagaaggccgtaaaacaacgatggctattccattgacattcgacttccagctggaatttgaagaagccttggcaacctccgcctcaaaggccatctccaaaattaaagaggataagagctgctccatcaccaagtccaaaatcagtaattag

SEQ ID NO: 337995 - DNA, 243 bp, Artificial Sequence
  derived and/or modified sequence
atggccgagaagatcctggagaagctggatgtgctggacaagcaggccgagatcatcctggcccggaggaccaagatcaaccggctgcagagcgagggcaggaagaccaccatggccatccccctgacctttgacttccagctggagtttgaggaggccctggccaccagcgccagcaaggccatcagcaagatcaaggaggacaagagctgcagcatcaccaagagcaagatcagcgagtag

SEQ ID NO: 337996 - DNA, 243 bp, Artificial Sequence
  derived and/or modified sequence
atggccgagaagatcctggagaagctggatgtgctggacaagcaggccgagatcatcctggcccggaggaccaagatcaaccggctgcagagcgagggcaggaagaccaccatggccatccccctgacctttgacttccagctggagtttgaggaggccctggccaccagcgccagcaaggccatcagcaagatcaaggaggacaagagctgcagcatcaccaagagcaagatcagcaactag

SEQ ID NO: 337997 - DNA, 243 bp, Artificial Sequence
  derived and/or modified sequence
atggccgagaagatcctggagaagctggacgtgctggacaagcaggccgagattattctggcccggagaaccaaaatcaatagactgcaaagcgagggacggaaaaccacaatggcaatccctcttacattcgattttcagcttgagttcgaagaagcgttggccacgagcgcgtctaaggccatctcaaagattaaggaagacaaaagctgcagcattaccaaaagcaaaatcagcgagtag

SEQ ID NO: 337998 - DNA, 243 bp, Artificial Sequence
  derived and/or modified sequence
atggccgagaagatcctggagaagctggacgtgctggacaagcaggcagaaatcatcctggctaggaggacgaaaataaatcgactgcagtccgaaggcagaaagactaccatggctattcccctaacatttgattttcagttggagtttgaagaggctttagcgacaagtgcatccaaggctatctccaagatcaaagaagacaagtcttgctctattaccaaatcaaagatttccaattag

SEQ ID NO: 337999 - DNA, 243 bp, Artificial Sequence
  derived and/or modified sequence
atggccgaaaaaattcttgaaaagctggatgtgctcgacaagcaggccgaaattattctcgcgagacgcaccaagatcaacaggctgcagagcgagggtcggaaaacaactatggccatccctttgaccttcgacttccaactggagttcgaggaagccctggccacgagtgcctcaaaagcgatcagcaagataaaggaggacaagagctgctccatcaccaagtcgaagataagtgagtag

SEQ ID NO: 338000 - DNA, 243 bp, Artificial Sequence
  derived and/or modified sequence
atggctgagaaaattctagaaaaacttgatgtcctggacaagcaggccgaaataatcctcgcgaggaggactaagattaacaggctccagtcagaaggtagaaagaccaccatggccatccccctgacatttgacttccagctggagttcgaggaggctctcgccacctctgcgtccaaggctataagcaaaatcaaagaggacaagtcttgtagcatcacaaaaagcaagatcagcaactag

SEQ ID NO: 338001 - DNA, 370 bp, Artificial Sequence
  derived and/or modified sequence
gccagaagagggaggaaaggagatgagatttcatcatgttggccagcctggtctcaaactcctgacctcaagtgacccgcctgcctcagcctcccaaagtgctgggattacaggaatttagtgattgacaatggcagaaaaaatcctagagaagttggatgtccttgataagcaagcagagataatcttggccagaagaacaaagataaacaggcttcagagtgaaggaagaaaaacaactatggctatacccctgacatttgattttcagttggaatttgaagaagctcttgctacatccgcgtctaaggcaatatcaaagatcaaagaagacaagtcatgcagcattacaaaatcaaaaatttcagaa

SEQ ID NO: 338002 - protein, 753 aa, Artificial Sequence
  derived and/or modified sequence
MGEHSPDNNIIYFEAEEDELTPDDKMLRFVDKNGLVPSSSGTVYDRTTVLIEQDPGTLEDEDDDGQCGEHLPFLVGGEEGFHLIDHEAMSQGYVQHIISPDQIHLTINPGSTPMPRNIEGATLTLQSECPETKRKEVKRYQCTFEGCPRTYSTAGNLRTHQKTHRGEYTFVCNQEGCGKAFLTSYSLRIHVRVHTKEKPFECDVQGCEKAFNTLYRLKAHQRLHTGKTFNCESEGCSKYFTTLSDLRKHIRTHTGEKPFRCDHDGCGKAFAASHHLKTHVRTHTGERPFFCPSNGCEKTFSTQYSLKSHMKGHDNKGHSYNALPQHNGSEDTNHSLCLSDLSLLSTDSELRENSSTTQGQDLSTISPAIIFESMFQNSDDTAIQEDPQQTASLTESFNGDAESVSDVPPSTGNSASLSLPLVLQPGLSEPPQPLLPASAPSAPPPAPSLGPGSQQAAFGNPPALLQPPEVPVPHSTQFAANHQEFLPHPQAPQPIVPGLSVVAGASASAAAVASAVAAPAPPQSTTEPLPAMVQTLPLGANSVLTNNPTITITPTPNTAILQSSLVMGEQNLQWILNGATSSPQNQEQIQQASKVEKVFFTTAVPVASSPGSSVQQIGLSVPVIIIKQEEACQCQCACRDSAKERASSRRKGCSSPPPPEPSPQAPDGPSLQLPAQTFSSAPVPGSSSSTLPSSCEQSRQAETPSDPQTETLSAMDVSEFLSLQSLDTPSNLIPIEALLQGEEEMGLTSSFSK

SEQ ID NO: 338003 - protein, 200 aa, Artificial Sequence
  derived and/or modified sequence
KQSQVKRYQCTFEGCPRTYSTAGNLRTHQKTHRGEYTFVCNQEGCGKAFLTSYSLRIHVRVHTKEKPFECDVQGCEKAFNTLYRLKAHQRLHTGKTFNCESEGCSKYFTTLSDLRKHIRTHTGEKPFRCDHDGCGKAFAASHHLKTHVRTHTGERPFFCPSNGCEKTFSTQYSLKSHMKGHDNKGHSYNALPQHNGSEST

SEQ ID NO: 338004 - DNA, 7986 bp, Artificial Sequence
  derived and/or modified sequence
ggaagtgacgttaggggaaggtgggggcaatcatggtgccgctggggaggggagaagctgctgctgccgccgttgccgggagccgcggagacaagtcattacgttttcatttctcacaactgggctgagcacaactgaaccatgggggaacacagtccagacaacaacatcatctactttgaggcagaggaagatgagctgacccccgatgataaaatgctcaggtttgtggataaaaacggactggtgccttcctcatctggaactgtttatgataggaccactgttcttattgagcaggaccctggcactttggaggatgaagatgacgacggacagtgcggagaacacttgccttttctagtagggggtgaagagggctttcacctgatagatcatgaagcaatgtcccagggttatgtgcagcacattatctcaccagatcagattcatttgacaataaaccctggttccacacccatgccaagaaatattgaaggtgcaaccctcactctgcagtcggaatgtccggaaacaaaacgtaaagaagtaaagcggtaccaatgtacctttgagggctgtccccgcacctacagcacagcaggcaacctgcgaacccaccagaagactcaccgaggagagtacacctttgtctgtaatcaggagggctgtggcaaagccttccttacctcttacagcctcaggatccacgtgcgagtgcacacgaaggagaagccatttgagtgtgacgtgcagggctgtgagaaggcattcaacacactgtacaggctgaaagcacatcagaggcttcacacagggaaaacgtttaactgtgaatctgaaggctgcagcaaatacttcaccacactcagtgatctgaggaagcacattcgaactcatacaggggaaaagccatttcggtgcgatcacgatggctgtggaaaagcatttgcagcaagccaccaccttaaaactcacgttcgtacacatactggtgaaagacccttcttctgccccagtaatggctgtgagaaaacattcagcactcaatacagtctcaaaagtcacatgaaaggtcatgataacaaaggacactcatacaatgcacttccacaacacaatggatcagaggatacaaatcactcactttgtctaagtgacttgagccttctgtccacagattctgaattgcgagaaaattccagtacgacccagggccaggacctcagcacaatttcaccagcaatcatctttgaatcaatgttccagaattcagatgatacggcaattcaggaagatcctcaacagacagcttccttgactgaaagttttaatggtgatgcagagtcagtcagtgatgttccgccatccacaggaaattcagcatctttatctcttccacttgtactgcaacctggcctctccgagccaccccagcctctactacctgcctcagctccgtctgctcctccgcctgctccctccctaggacctggctcccagcaagctgcatttggcaacccccctgctctcttacaacctccagaagtgcctgttccccacagcacacagtttgctgctaatcatcaagagtttcttccgcacccccaggcaccgcagcccattgtaccaggactttctgttgttgctggggcttctgcatcagcagcggcagtggcatcagctgtggcagcaccagccccaccacaaagtactactgagcccctgccagccatggtccagactctgcccctgggtgccaactctgtcctaactaataatcccacaataaccatcaccccaactcccaacacagctatcctgcagtccagcctagtcatgggagaacagaacttacaatggatattaaatggtgccaccagttctccacaaaaccaagaacaaattcagcaagcatctaaagttgagaaggtgttttttaccactgcagtaccagtagccagtagcccagggagctctgtccagcagattggcctcagtgttcctgtgatcatcatcaaacaagaagaggcatgtcagtgtcagtgtgcatgccgggactctgcaaaggagcgggcatccagcaggagaaagggctgctcctccccaccccctccagagccgagcccccaggctcctgatgggcccagcctgcagctcccagcgcagactttctcttcagcccctgttcccgggtcatcatcctctaccttgccctcctcctgtgagcaaagccgacaagcagagactccttcagaccctcagacagaaacattaagtgccatggatgtgtcagagtttctatccctccagagcctggacaccccgtccaatctgattcccattgaagcactactgcagggggaggaggagatgggcctcaccagcagcttctccaagtgaagggcccatgtgtgctcacctctgggaaaagcgggtgagcaggaggcatgaggtacaatgcctgccatcatgggtcagaaatttgaaggatgaagaaatctactgtttgaaatcctcacctttcagacgtattttctttattcacatcccaggagcatccattttaaggaactattctttggaaaaaaacaaaaaacaaaaaaaacaacaaaaaaagctaagttataagtgaactgtttggctgcactgtatgtcacttttgcttgttgtcatgtgaacttggaaactaaggttactcgtgtgcataaaaattctaaatgaaagggtgtggtttccatcaatctgatgctgcccatcgcttgcactggggtctttgtggatcgggcaggagttttcagtgtgttgggtgttgctccttcctatgtgtcttttgaatctgaggctgacatttgcttggaaggccagacccttgctccatcagagagggcagtggcaaaggccagtgaggcagctgtgagttggacagggttcaggtgagatggtgttgtcatttgtgcttagtgttggtggtgctcagggtggataacacgggtcgttctgcagcccgcttcagcacaaataggcagcttaaggcctggctcacaggctgtggggttgatctggctctgcagaggccctaggcagcttgttgactgctgtctgttgatgacgtgtgtgcaaagcaggctctagcaacatgatcactgtccttgccttcctggttctttctctcggttggttgccagggcttgcagatcgcagtgaattttccttggggaacatcgctgttttgtcctagagtgaacttgtggcttatggccagtgctgtttggtggtctgccttctttttaatggtattttcttcctcagagcagaagggctgcattttgcttatcagaagaaggtgcagatttaagggaattcatatgaggtggcatgtaattggcaggccaggtgtcctggttccaggttccagccaggctttgggttgccccctccatctctgcccccctctggattttgcatacagcctcatacagtgcaaacaaggatgtgacttgctcagcttagtcatgtgatttatttaaaaaaaaaaaaaaaagaaacacaaaacgatgatcttctactcagggtatagcaaaacaaaaaaattccctttccaccaaaaagcctgaaatgttgcaataagttatctcatttggaatgtttcattaagttgtgttataggaaaaaattgtgtgtgtgtgttatagaattatatccatatgtctgcctttggctccaagtcattgcctcttaaaataaaagatacaatccatactagcatgaaaagtttccctcaacaggctatattaacatagtcatgagtgctgaccaaactcaccgagctcagaggccaggcatggcctgaggtgcagaataggcctctgcctcccaagagccctttccttgccctgagcaaggagtggtgttccacaaacaaggctgctcttctaagccaacagtgtcaggcaggaagcagccataattttgccttgcattttcattccctaatgtaaagggatctgcattggtcactctcctgttctctgagccattgctcagggccagccaagatattattgagaacagataatttaccttggagccagaggccctccctgcctttagcaaggatgttcagggacagacaaagagggcagtggtggtgaatgttgttactgccatgaggagaaatggcagtaagaaatcttaactacaagcagccaatttctcattccaggaccctagccagaataattgacttctttttttttttgagacagagttttgcttttgttgccctggctggagtgcagtggcgcaatcttggctcaccgcaacctccacttcccaggttcaagcaattctgcctcagcctcccgagtagctgggattacaggcatgcgccaccacgcctggctaattttgtatttttagtagagacggggtttctccatgttggtcaggctggtctcgaactcccaacgtcaggtgatcctcccgcctcagtctcccaaagtgctgggattacaggtgtgagccaccatgcctggtctagggaattgacttctttttgaccttctgcactcccttccccaaaaggattgtggcttctgttgaccattgacctcagcagaagttgataaggcaggaggtttccagtcctcctggaaaaccaactgctgagcatgagttgtccttggctgtctctgggcctcgcacccatgggaagttttgaggtagggcccttgctgtttacaacttctgagagagtagtgatgggaccccaaagtaagcttgtatcagagggcagtaatgaccttcccatatccccatcctgtggtcacctgggatttgggttccctggggcggaagtgggaaataggagcccagggaaggacatctgaagcacccacagtttaaatagcgactcttcttggttagccagggctgtgctcatgttgggccctacccaggtcagtggccttttcactctcaaagatcgggggtgacgaagcagcatcttaaacagtgtttaggctgacagatttttccagttgaagaagctgaagtatctgccttttgagggtgactctagattacaagagagactatcagatccaatcagcttttgaaaaatcaggaatgtgcttaaaatgccagtgagtggttgtgaagatcaggtttatttcccaggataggcagtctttctttccctccttttccagttctcttttcctacctgtccttccataagcctggtctctagtgccgaggaccttggagaagagagggcccctagctaagctggagccagaaagaaccttcatggtgagtgtggtttcccaaacttgggaaatgaacctagggtgaggttagggaggatttgtagaattctagcaggtaaaaatcaagcctttttcccctcccatagtaaacttaaccattttcaccctgtacgttatcttctagctcctactaacatctccaattagacaaccgcttcaaagggtgcttagcaccagggattggggttcatggacttaggaggtggtaaggaaactggctggcaccaccaaactgccttagtgaacttggcccttcccaggcaggtaggttgggcattgagggaaggtggcccagtctttgctggcagggtctggccagtctcatgggggcaccaccagtttggtgacagaagtggtgtcatttattgaattccacctccgtttagaaggagatcatggtacaaagcccaggaggggccttaagatgtgaagatctctctgagtaaaaggcaaggggcttctcttcttcacctctgggatagttggtagatcggagagttttattttcagggtcaaggctgtggactgatggggatattggagggtgggtgggttttcctgagagactttgtataatgctgaatgtgtccagagggacaagtttgcagaacctcatattggtatattaaagaaataataaaataaaaaagcactttaggttattttatctttaacccgattgctgcaatttcttttgtgtgtatatatacatatatatactttccacaaagttttattttttgctcagaataaaaagttaaattgaggtgtgaaaagaaaagcacttaccttggtgcaatatgtgtagcttgatggtcgttgtcccatgtggccctggcctggcagcgtttttccgctcaatcagccctgtgctgtgagactgtccatagggaaacactattatgcattctcagcaaccgctcaatctatgcaagccttccctgtgtgccccagggcgccccctcaggctctctgaagaactgctgtgggtcctgttttctgctgactgttgaggccctttttcatcacttcttggtctctcgccatcttttccctcttcaccattacaaaatgatgcctgaaaggaaggaacagattgttcctaggtagaaacctggcaccttctagacttttatatttgtaatcacatccattgtccttaaagacttttccagagtgattgaaaccattgatttgtggaactgcaacaatatttctcaagagtttacaattgtcttacaccaccaatcagaaatatgtttggggaggcatgggtggcagggggcaacatgagccatttccatactgctccccatactacctgtgttggttccttaagcaaaaaggcctccagccttcattaaatcctataaacaaacattacatcccatgaatcattatcaactttcttcctttactccacctcccccattttatcttcaattctcaggctatagaatagacaagttttagaatatacttcagccaaagcagaaggattttcatagatccaatatgcaaatagttctgctgtgacatagatcagaaattgtctgttccttaatatttgggggtggaggcaacaaaactgaagcatatttctgattggttagccattttggcctgtttcctcttgcatgttttttagggagagagggaaacagtcctgtatttcttctgatgccctttggggaagccgacgaccactgggcatttctcactgttactcctgttcaagagagggcttctcagtctgcactgaaaaatgcaaattaaactggatctttatgtcaatgtgtacatagtacaagcttttttactggaattgaggtttaaaaccacacactgcccttttggtggtgtgcctgttgggccaaaaattgggtgataatgtagtgtcactttctcagctcaatgcagtttctactttttcttatgggaaaatttttcataaaacctttttgcaccaaaacccaggggtgttttttgcaatatccttgttatcctcgtagtgtgccaagtcagaggctttctcttgcccttttcctgctgtgttctcaggcctcccaagggctatttgactcaacagtctacatccttcgttgtgttttggagaatgtgggggtgggggtcagagttcaaggtgtctgttcccttttcctgtgaactctttctagtccctatttggggagggtggctggaaacagatttttgctgaatttctggctcagatcttctagccaggaaaggcaagagcccccaagagcccttttttttgacatacactaatcattggccggggtcttggtgacaacttttaaaatcccaaatagttttatttggattatgtaaaagtaagtgtgaaacatgggaacaacggacttccactgagcgatgtgaaaacgttacaggttcagtacttccaaaggaagaaacctccaaacccaaaaaagaataaatatgaatttgtatttttgaagaatgtgaaataatggtgtttgcttaattgctcattttgtataaacttaatattgtactttaaaatatctgctaaaaagtgaaaatttaactttttggaattgaaaaagcaatattaaatactaatgaaatcctaattaaatgcttatttaaatctggtaaaaaaaaaaaaaaa

SEQ ID NO: 338005 - DNA, 2262 bp, Artificial Sequence
  derived and/or modified sequence
atgggcgaacactcacccgacaacaacatcatttacttcgaggcagaagaagacgaactaacacctgatgacaagatgctgaggttcgtcgacaagaacggcctggtcccttcatcttccgggacagtgtacgaccgaacaactgttttaatcgaacaggaccccggtacattggaggatgaagatgacgatggtcagtgtggcgagcacctgccttttctagtaggcggggaagaaggattccacctcatcgaccatgaagctatgtctcaaggttacgtccagcatatcatctctcccgatcagatccaccttaccattaacccaggctccacaccaatgccgcgtaatatcgagggcgccacactgacgctccagagcgagtgccctgagacaaagcggaaggaagttaagcgataccagtgcacattcgagggctgccctagaacatactccaccgccggaaacctgaggactcaccaaaaaactcaccgaggtgaatatacttttgtttgtaatcaggaaggatgcggcaaggcattcttgacttcctacagcctaagaatccacgtgcgagttcacacaaaggagaaaccctttgagtgtgacgtgcaggggtgtgagaaggcctttaatacactgtaccgactcaaggcacatcagcgactccatacaggtaaaacttttaactgtgagagtgagggttgctccaaatattttacaaccctgtcagatctgaggaagcatatcaggacccacacaggagaaaaaccgtttcgttgcgaccacgacggatgcggcaaggctttcgctgctagtcaccacctgaagactcacgtcagaacgcacacaggcgagagaccattcttttgcccttctaatggctgtgagaaaaccttctctactcagtatagccttaagtcccatatgaaggggcacgacaacaaaggtcacagttataacgctttgcctcagcataacggttccgaggacaccaaccactcactgtgtctgtctgatcttagtcttctgtcaacagacagcgagctgcgagagaattcatctacgacccaaggccaggacttgtccaccatctctccagctattattttcgagtcaatgtttcagaattctgacgatacagccatccaggaggatccacagcaaaccgcatccctaaccgagagctttaacggtgacgctgagtccgtatcagacgtgcccccaagcaccggcaactccgcctctctgtccttgccgctggtgttgcagcccgggctgtccgagcctccccagcctctcctgcccgcctcggccccttctgcaccacctcctgcaccaagcttgggtcccgggtcgcagcaggctgctttcggcaaccctccggctctgttacaaccccccgaagtaccagtaccccactccacccagttcgccgctaatcaccaggagtttttaccacacccccaagctccgcagcccatcgttcctgggttgagcgtagtggcaggggcatcagcatccgctgccgccgtggcatccgccgtggctgccccagcccctcctcagagcacaactgagccactgcctgcgatggttcaaacattgccactcggggctaattctgttctgacaaataatcctaccatcactatcactccaacgcctaataccgctatattacaatctagcctggtgatgggagaacagaacctgcaatggatactaaatggagctacctccagtccgcagaatcaagaacaaatccagcaagcttccaaggtggagaaagtgttcttcaccactgccgtgcctgtggctagctcccctggctccagcgtccagcagattggactgagcgtgccagtgataatcatcaaacaggaggaagcctgccagtgccagtgcgcctgtcgcgacagcgccaaagagcgggcaagctcaagacgcaaaggctgctccagcccccctccacctgaacctagccctcaagctcctgatggacctagcctgcagctccctgctcaaacattttcctccgctcccgtaccagggtcgagttcctccacacttccaagcagttgtgagcagtcaaggcaggccgagaccccaagcgacccgcagacagagacactgtcagccatggatgtctccgagttcctgtccctgcagagtctggacaccccctctaacttgataccaatcgaagcgctccttcagggagaggaagaaatgggcttgacatcatcatttagcaagtag

SEQ ID NO: 338006 - DNA, 2262 bp, Artificial Sequence
  derived and/or modified sequence
atgggagagcacagcccagacaacaacatcatctactttgaagcagaagaagatgagctgaccccagatgacaagatgctgcgctttgtggacaagaatggcctggtgcccagcagcagcggcaccgtgtatgacaggaccaccgtgctgattgagcaggaccccggcaccctggaggatgaagatgatgatggccagtgtggggagcacctgcccttcctggtgggcggggaggagggcttccacctgattgaccacgaggccatgagccagggctacgtgcagcacatcatcagcccagaccagatccacctgaccatcaaccctggcagcacccccatgcccaggaacatcgagggcgccaccctgaccctgcagagcgagtgcccagagaccaagaggaaggaggtgaagcgctaccagtgcacctttgagggctgccccaggacctacagcacagctggcaacctgcggacccaccagaagacccacagaggagagtacacctttgtgtgcaaccaggagggctgcggcaaggccttcctgaccagctacagcctgcgcatccacgtgcgggtgcacaccaaggagaagccctttgaatgtgatgtgcagggctgtgagaaggccttcaacaccctgtaccgcctgaaggcccaccagaggctgcacacaggcaagaccttcaactgtgagagcgagggctgcagcaagtacttcaccaccctgagtgacctgaggaagcacatccgcacccacactggagagaagcccttccgctgtgaccatgatggctgtgggaaggcctttgctgccagccaccacctgaagacccacgtgaggacccacactggagagcggcccttcttctgccccagcaatggctgtgagaagaccttcagcacccagtacagcctgaagagccacatgaagggccatgacaacaagggccacagctacaatgccctgccccagcacaatggaagtgaggacaccaaccacagcctgtgcctgagtgacctgagcctgctgagcacagacagcgagctgcgggagaacagcagcaccacccagggccaggacctgagcaccatcagccctgccatcatctttgagagcatgttccagaacagtgatgacacagccatccaggaggacccccagcagacagccagcctgacagagagcttcaatggagatgctgagagcgtgtctgatgtgccccccagcactggaaacagcgccagcctgagcctgcccctggtgctgcagcccggcctgtctgagcccccccagcccctgctgcctgccagcgcccccagcgcccctcctccagcccccagcctgggccctggcagccagcaggccgccttcggcaaccccccagccctgctgcagcccccagaggtgcctgtgccccacagcacccagtttgctgccaaccaccaggagttcctgccccacccccaggccccccagcccatcgtgcccggcctgtctgtggtggccggggccagcgccagcgctgctgctgtggccagcgctgtggccgccccagccccaccccagagcaccacagagcccctgcctgccatggtgcagaccctgcccctgggcgccaacagcgtgctgaccaacaaccccaccatcaccatcacccccacccccaacacagccatcctgcagagcagcctggtgatgggagagcagaacctgcagtggatcctgaatggagccaccagcagcccccagaaccaggagcagatccagcaggccagcaaggtggagaaggtgttcttcaccacagctgtgcctgtggccagcagccctggcagctctgtgcagcagatcggcctgtctgtgcctgtgatcatcatcaagcaggaggaggcctgccagtgccagtgtgcctgccgggacagcgccaaggagcgggccagcagcaggaggaagggctgcagcagccccccacctcctgagcccagcccccaggccccagatggccccagcctgcagctgcctgcccagaccttcagcagcgcccctgtgcccggcagcagcagcagcaccctgcccagcagctgtgagcagagccggcaggccgagacccccagcgacccccagacagagaccctgagcgccatggatgtgtctgagttcctgagcctgcagagcctggacacccccagcaacctgatccccatcgaggccctgctgcagggcgaggaggagatgggcctgaccagcagcttcagcaagtag

SEQ ID NO: 338007 - DNA, 3360 bp, Artificial Sequence
  derived and/or modified sequence
ggaagtgacgttaggggaaggtgggggcaatcatggtgccgctggggaggggagaagctgctgctgccgccgttgccgggagccgcggagacaagtcattacgttttcatttctcacaactgggctgagcacaactgaaccatgggggaacacagtccagacaacaacatcatctactttgaggcagaggaagatgagctgacccccgatgataaaatgctcaggtttgtggataaaaacggactggtgccttcctcatctggaactgtttatgataggaccactgttcttattgagcaggaccctggcactttggaggatgaagatgacgacggacagtgcggagaacacttgccttttctagtagggggtgaagagggctttcacctgatagatcatgaagcaatgtcccagggttatgtgcagcacattatctcaccagatcagattcatttgacaataaaccctggttccacacccatgccaagaaatattgaaggtgcaaccctcactctgcagtcggaatgtccggaaacaaaacgtaaagaagtaaagcggtaccaatgtacctttgagggctgtccccgcacctacagcacagcaggcaacctgcgaacccaccagaagactcaccgaggagagtacacctttgtctgtaatcaggagggctgtggcaaagccttccttacctcttacagcctcaggatccacgtgcgagtgcacacgaaggagaagccatttgagtgtgacgtgcagggctgtgagaaggcattcaacacactgtacaggctgaaagcacatcagaggcttcacacagggaaaacgtttaactgtgaatctgaaggctgcagcaaatacttcaccacactcagtgatctgaggaagcacattcgaactcatacaggggaaaagccatttcggtgcgatcacgatggctgtggaaaagcatttgcagcaagccaccaccttaaaactcacgttcgtacacatactggtgaaagacccttcttctgccccagtaatggctgtgagaaaacattcagcactcaatacagtctcaaaagtcacatgaaaggtcatgataacaaaggacactcatacaatgcacttccacaacacaatggatcagaggatacaaatcactcactttgtctaagtgacttgagccttctgtccacagattctgaattgcgagaaaattccagtacgacccagggccaggacctcagcacaatttcaccagcaatcatctttgaatcaatgttccagaattcagatgatacggcaattcaggaagatcctcaacagacagcttccttgactgaaagttttaatggtgatgcagagtcagtcagtgatgttccgccatccacaggaaattcagcatctttatctcttccacttgtactgcaacctggcctctccgagccaccccagcctctactacctgcctcagctccgtctgctcctccgcctgctccctccctaggacctggctcccagcaagctgcatttggcaacccccctgctctcttacaacctccagaagtgcctgttccccacagcacacagtttgctgctaatcatcaagagtttcttccgcacccccaggcaccgcagcccattgtaccaggactttctgttgttgctggggcttctgcatcagcagcggcagtggcatcagctgtggcagcaccagccccaccacaaagtactactgagcccctgccagccatggtccagactctgcccctgggtgccaactctgtcctaactaataatcccacaataaccatcaccccaactcccaacacagctatcctgcagtccagcctagtcatgggagaacagaacttacaatggatattaaatggtgccaccagttctccacaaaaccaagaacaaattcagcaagcatctaaagttgagaaggtgttttttaccactgcagtaccagtagccagtagcccagggagctctgtccagcagattggcctcagtgttcctgtgatcatcatcaaacaagaagaggcatgtcagtgtcagtgtgcatgccgggactctgcaaaggagcgggcatccagcaggagaaagggctgctcctccccaccccctccagagccgagcccccaggctcctgatgggcccagcctgcagctcccagcgcagactttctcttcagcccctgttcccgggtcatcatcctctaccttgccctcctcctgtgagcaaagccgacaagcagagactccttcagaccctcagacagaaacattaagtgccatggatgtgtcagagtttctatccctccagagcctggacaccccgtccaatctgattcccattgaagcactactgcagggggaggaggagatgggcctcaccagcagcttctccaagtgaagggcccatgtgtgctcacctctgggaaaagcgggtgagcaggaggcatgaggtacaatgcctgccatcatgggtcagaaatttgaaggatgaagaaatctactgtttgaaatcctcacctttcagacgtattttctttattcacatcccaggagcatccattttaaggaactattctttggaaaaaaacaaaaaacaaaaaaaacaacaaaaaaagctaagttataagtgaactgtttggctgcactgtatgtcacttttgcttgttgtcatgtgaacttggaaactaaggttactcgtgtgcataaaaattctaaatgaaagggtgtggtttccatcaatctgatgctgcccatcgcttgcactggggtctttgtggatcgggcaggagttttcagtgtgttgggtgttgctccttcctatgtgtcttttgaatctgaggctgacatttgcttggaaggccagacccttgctccatcagagagggcagtggcaaaggccagtgaggcagctgtgagttggacagggttcaggtgagatggtgttgtcatttgtgcttagtgttggtggtgctcagggtggataacacgggtcgttctgcagcccgcttcagcacaaataggcagcttaaggcctggctcacaggctgtggggttgatctggctctgcagaggccctaggcagcttgttgactgctgtctgttgatgacgtgtgtgcaaagcaggctctagcaacatgatcactgtccttgccttcctggttctttctctcggttggttgccagggcttgcagatcgcagtgaattttccttggggaacatcgctgttttgtcctagagtgaacttgtggcttatggccagtgctgtttggtggtctgccttctttttaatggtattttcttcctcagagcagaagggctgcattttgcttatcagaagaaggtgcagatttaagg

SEQ ID NO: 338008 - DNA, 2262 bp, Artificial Sequence
  derived and/or modified sequence
atgggcgagcacagccccgacaacaacatcatctacttcgaggccgaagaagacgagctgaccccagacgacaagatgctgcggttcgtggacaagaacggcctggtgccatcttcgtccggaaccgtttacgatcggaccacagtcttaatagagcaggaccccggaactttagaagacgaggatgacgatgggcagtgtggcgagcacctccccttcctggtgggcggggaggagggctttcatcttatcgatcacgaagccatgtctcagggttatgtccagcacataataagccccgaccagattcatttgactatcaatccgggttcaaccccaatgccaaggaatatcgagggtgcaaccctgacactgcagagcgagtgcccggaaaccaagagaaaagaggtcaagcggtatcagtgcaccttcgaaggatgtcccagaacatattccaccgccgggaacctccggacacatcagaagacgcacaggggggaatataccttcgtgtgcaatcaggagggctgcggcaaggccttcttgacaagctattccctgcgcatccatgttagggtgcataccaaggaaaaacccttcgagtgcgacgtgcagggatgtgagaaggcgtttaacacactgtacagattgaaagcacatcagaggctgcataccggcaagacctttaactgcgagagtgagggctgttctaaatactttaccaccctgtccgatttacgaaaacatattcgcactcatactggagagaagccttttcgatgcgatcacgacggatgcggaaaggccttcgctgcctcacatcatttaaaaactcacgtgcgcacacacacgggcgaacgtcctttcttctgccccagtaacgggtgcgagaagacatttagcacccagtattcactgaaaagtcacatgaaagggcatgataataagggccactcatataacgcccttccgcaacataacggatcagaggatactaatcatagtttatgcctgtctgatctaagtctgctttccaccgacagtgaactgagagagaacagttccaccacccagggacaggacctgtcgacaatcagcccggctattatcttcgaatcaatgtttcagaactcagacgatacggctatccaggaggatccacagcagacagcttccctgactgaatccttcaatggtgacgccgaatcggtctccgacgtgcctccatctacgggcaactcagccagcctgagtttgccgcttgtgctacagcccggactctccgagcccccccagccactgctccctgctagcgcaccatccgcgcccccacctgctccctctttagggcccggatcccagcaggctgcttttggaaacccaccggccctgctacaaccacctgaggtgcctgtcccccatagtacacagttcgctgctaaccaccaggagtttctgcctcacccacaggcgcctcaacccatcgtgcccgggttgagtgtggttgcaggggccagcgcctccgctgccgcagtcgcctcagccgtggcagcccctgcacccccccagtccacaaccgagccattaccagcgatggttcagacactccccctcggagcaaacagcgtgttgacaaacaaccctaccatcacaatcacacctacaccgaacactgctattctgcagtcctctctcgtcatgggagagcaaaatcttcagtggattttgaatggagctaccagcagtccccagaaccaagaacagatccagcaggcgagcaaggttgaaaaggttttctttactaccgccgtgcccgtggctagctcccctggcagcagcgtgcagcaaattggcctatctgtgcccgtgatcatcattaaacaagaagaggcgtgccagtgccagtgtgcctgcagggacagcgccaaagagagggccagcagccggaggaaaggctgctccagtccacctccacccgaaccctcgccccaggcgccagatggacctagtttacaactgcctgcgcaaacatttagttctgcacccgtacccggtagttcatctagtacactgccgtcgtcttgtgaacagtctcgccaggccgaaacaccttctgatccacagaccgaaaccctgtccgccatggatgtgagcgagttcctgtcgctacaaagtcttgacacaccatcaaatttaattcccatcgaagcactgctgcagggtgaagaggagatgggcttgacatctagtttcagtaagtag

SEQ ID NO: 338009 - DNA, 2262 bp, Artificial Sequence
  derived and/or modified sequence
atgggcgagcactctcccgacaacaacatcatctattttgaagctgaagaggacgaactgaccccagatgacaagatgcttcgatttgtcgataaaaacggactcgtgccctcttctagcggtacagtatatgatagaacaactgtactaatcgaacaagatcccggaacactagaggatgaggacgacgacggccagtgtggggagcacctcccatttctcgtcggcggagaggagggcttccacctcatcgatcacgaggctatgtctcaagggtacgtgcagcatattatatctcccgaccaaattcacctcacaataaatcccggaagcactcccatgccacgtaacatagaaggagccacgctaactctccagtccgagtgtccagagactaaacgtaaggaggttaagagataccagtgcacctttgaaggctgtccgcgaacctactctaccgccggaaacctcaggacccaccaaaaaacacatcgcggtgagtacacctttgtttgcaaccaggaggggtgtggtaaagcttttctcacatcatatagcctgcggatccatgtgagagtgcacactaaggagaagccatttgagtgcgatgtccaaggttgcgaaaaggcgttcaatactctttaccgcctgaaagctcaccagcgactgcacacaggaaaaacatttaattgcgagtccgaaggttgcagcaaatacttcaccacactgagcgatctacgtaaacacatccgcacccataccggagaaaagccatttaggtgcgaccatgatggctgtggaaaggcttttgcagcgtcgcaccaccttaaaacacacgtgaggacccacactggtgaaaggccgttcttttgccccagtaatggttgtgagaaaacattctctacccagtattctctaaagtcacatatgaagggccacgataacaagggccattcgtacaacgctctgccccagcataacgggtcagaggacaccaatcactccctgtgcctgtctgacttgagccttctcagcactgactcagagctgcgtgagaatagcagcacaacgcagggccaggacttgtctacaatctcacctgcaatcatattcgagagcatgttccagaattctgacgacaccgctatacaagaggatccgcagcaaactgccagcctgacagagtcatttaatggcgatgccgagtccgtctccgatgtcccaccatccacaggcaactcagcttctttatcgctgccccttgttctccagccgggactctccgagcctccgcagccgttactacctgccagcgccccttcagccccaccccctgccccatccctcggacctggcagccagcaggccgctttcggaaatccacctgccctcctgcagcccccagaggtccctgtcccccattccacgcagttcgccgctaatcaccaggagttcctgccccatcctcaagcaccgcagccaatagtcccgggtctgagcgtggtggcaggggcatctgctagcgccgctgctgttgcatccgcagtggccgcaccagcaccaccccagtccaccactgagcccttacccgctatggtgcaaaccctgccacttggcgctaatagtgtgctgactaataatcctaccatcacaatcacaccaacaccaaacaccgcaatcctccagagttccctcgttatgggggagcagaatcttcagtggatactgaacggtgctacttcttcccctcagaaccaggagcaaattcagcaggccagcaaagtggagaaagtgttttttactaccgctgtgccagtcgcttctagcccaggttccagcgtacagcagatcggattgtctgtcccggtgatcatcattaagcaggaggaagcttgtcaatgccagtgcgcgtgtcgggacagcgcgaaggaacgcgctagctcacgccgtaaaggctgcagttccccccctcccccagagccttcccctcaagctcccgatggcccttcacttcagctgcccgcacagactttttccagcgctccggtgcccggatcctcctctagtactcttcccagcagctgcgaacagagtcgccaggccgaaacaccaagtgacccacagactgagacactgtcagccatggatgtgtctgagtttctgtctctgcaatcactggatacacccagcaacctcatccctattgaggcattactgcagggggaagaagagatggggcttacttcaagtttctctaagtag

SEQ ID NO: 338010 - DNA, 2262 bp, Artificial Sequence
  derived and/or modified sequence
atgggcgagcacagccccgacaacaacatcatctacttcgaggccgaggaggacgagctgacccccgacgacaagatgctgagattcgtggacaagaacggcctggtgcccagcagcagcggcaccgtgtacgacagaaccaccgtgctgatcgagcaggaccccggcaccctggaggacgaggacgacgacggccagtgcggcgagcacctgcccttcctggtgggcggcgaggagggcttccacctgatcgaccacgaggccatgagccagggctacgtgcagcacatcatcagccccgaccagatccacctgaccatcaaccccggcagcacccccatgcccagaaacatcgagggcgccaccctgaccctgcagagcgagtgccccgagaccaagagaaaggaggtgaagagataccagtgcaccttcgagggctgccccagaacctacagcaccgccggcaacctgagaacccaccagaagacccacagaggcgagtacaccttcgtgtgcaaccaggagggctgcggcaaggccttcctgaccagctacagcctgagaatccacgtgagagtgcacaccaaggagaagcccttcgagtgcgacgtgcagggctgcgagaaggccttcaacaccctgtacagactgaaggcccaccagagactgcacaccggcaagaccttcaactgcgagagcgagggctgcagcaagtacttcaccaccctgagcgacctgagaaagcacatcagaacccacaccggcgagaagcccttcagatgcgaccacgacggctgcggcaaggccttcgccgccagccaccacctgaagacccacgtgagaacccacaccggcgagagacccttcttctgccccagcaacggctgcgagaagaccttcagcacccagtacagcctgaagagccacatgaagggccacgacaacaagggccacagctacaacgccctgccccagcacaacggcagcgaggacaccaaccacagcctgtgcctgagcgacctgagcctgctgagcaccgacagcgagctgagagagaacagcagcaccacccagggccaggacctgagcaccatcagccccgccatcatcttcgagagcatgttccagaacagcgacgacaccgccatccaggaggacccccagcagaccgccagcctgaccgagagcttcaacggcgacgccgagagcgtgagcgacgtgccccccagcaccggcaacagcgccagcctgagcctgcccctggtgctgcagcccggcctgagcgagcccccccagcccctgctgcccgccagcgcccccagcgcccccccccccgcccccagcctgggccccggcagccagcaggccgccttcggcaacccccccgccctgctgcagccccccgaggtgcccgtgccccacagcacccagttcgccgccaaccaccaggagttcctgccccacccccaggccccccagcccatcgtgcccggcctgagcgtggtggccggcgccagcgccagcgccgccgccgtggccagcgccgtggccgcccccgcccccccccagagcaccaccgagcccctgcccgccatggtgcagaccctgcccctgggcgccaacagcgtgctgaccaacaaccccaccatcaccatcacccccacccccaacaccgccatcctgcagagcagcctggtgatgggcgagcagaacctgcagtggatcctgaacggcgccaccagcagcccccagaaccaggagcagatccagcaggccagcaaggtggagaaggtgttcttcaccaccgccgtgcccgtggccagcagccccggcagcagcgtgcagcagatcggcctgagcgtgcccgtgatcatcatcaagcaggaggaggcctgccagtgccagtgcgcctgcagagacagcgccaaggagagagccagcagcagaagaaagggctgcagcagcccccccccccccgagcccagcccccaggcccccgacggccccagcctgcagctgcccgcccagaccttcagcagcgcccccgtgcccggcagcagcagcagcaccctgcccagcagctgcgagcagagcagacaggccgagacccccagcgacccccagaccgagaccctgagcgccatggacgtgagcgagttcctgagcctgcagagcctggacacccccagcaacctgatccccatcgaggccctgctgcagggcgaggaggagatgggcctgaccagcagcttcagcaagtag

SEQ ID NO: 338011 - DNA, 603 bp, Artificial Sequence
  derived and/or modified sequence
aaacagagccaggtcaagaggtaccagtgtacattcgaagggtgccctcgcacatactctacagctgggaacttgcggacacaccaaaaaacccaccgcggagaatacacgtttgtatgcaaccaggagggctgtggaaaggcgtttttaactagctactctctacgtattcatgtgagagtacataccaaggaaaagccatttgagtgcgacgtgcaggggtgtgaaaaggcatttaacacgctctacaggctgaaggcccaccagcgtttacatactggcaagacttttaattgcgagtccgagggctgttcaaagtatttcaccaccctgtcggatctgaggaagcatatccggacacatacgggcgagaaaccatttagatgcgaccatgatggctgcggaaaggcctttgcggcatcccaccatctgaaaactcacgtgagaactcatactggtgagcgaccttttttttgtccgtccaatgggtgtgagaaaacttttagcactcagtactctttgaaatcacacatgaagggccatgacaacaagggccatagctataacgcgctcccgcagcacaacggatccgagtccacctag

SEQ ID NO: 338012 - DNA, 603 bp, Artificial Sequence
  derived and/or modified sequence
aagcagagccaggtgaagcgctaccagtgcacctttgagggctgccccaggacctacagcacagctggcaacctgcggacccaccagaagacccacagaggagagtacacctttgtgtgcaaccaggagggctgcggcaaggccttcctgaccagctacagcctgcgcatccacgtgcgggtgcacaccaaggagaagccctttgaatgtgatgtgcagggctgtgagaaggccttcaacaccctgtaccgcctgaaggcccaccagaggctgcacacaggcaagaccttcaactgtgagagcgagggctgcagcaagtacttcaccaccctgagtgacctgaggaagcacatccgcacccacactggagagaagcccttccgctgtgaccatgatggctgtgggaaggcctttgctgccagccaccacctgaagacccacgtgaggacccacactggagagcggcccttcttctgccccagcaatggctgtgagaagaccttcagcacccagtacagcctgaagagccacatgaagggccatgacaacaagggccacagctacaatgccctgccccagcacaatggaagtgagagcacctag

SEQ ID NO: 338013 - DNA, 600 bp, Artificial Sequence
  derived and/or modified sequence
aaacaaagccaggtaaagcggtaccaatgtacctttgagggctgtccccgcacctacagcacagcaggcaacctgcgaacccaccagaagactcaccgaggagagtacacctttgtctgtaatcaggagggctgtggcaaagccttccttacctcttacagcctcaggatccacgtgcgagtgcacacgaaggagaagccatttgagtgtgacgtgcagggctgtgagaaggcattcaacacactgtacaggctgaaagcacatcagaggcttcacacagggaaaacgtttaactgtgaatctgaaggctgcagcaaatacttcaccacactcagtgatctgaggaagcacattcgaactcatacaggggaaaagccatttcggtgcgatcacgatggctgtggaaaagcatttgcagcaagccaccaccttaaaactcacgttcgtacacatactggtgaaagacccttcttctgccccagtaatggctgtgagaaaacattcagcactcaatacagtctcaaaagtcacatgaaaggtcatgataacaaaggacactcatacaatgcacttccacaacacaatggatcagagtctact

SEQ ID NO: 338014 - DNA, 603 bp, Artificial Sequence
  derived and/or modified sequence
aagcagagccaggtgaagcggtaccagtgcaccttcgagggctgcccacgcacctactccacagccggcaatctgcgcacacatcaaaagacccatcgaggcgaatacaccttcgtgtgtaatcaggagggatgcggaaaagcctttctgacgtcctatagcctgcgaatccacgtgcgagtgcacaccaaggaaaagccattcgagtgtgacgtgcagggttgtgagaaggcctttaacaccctgtatcgcctcaaggcacatcagcggctgcatacgggcaaaacattcaattgcgaaagcgagggatgtagcaaatactttacgacactgtctgacctgcggaaacatattcggacccacacaggcgagaagccatttcggtgtgatcatgacggatgtggaaaagctttcgcagcatcacaccacctgaaaactcacgtccggacacacaccggagagagaccattcttttgtccatccaacggatgtgagaagacattctcaacacagtatagtctcaaatctcatatgaaaggccatgataataagggtcacagctacaatgcactgccccagcacaatggaagtgaatccacttag

SEQ ID NO: 338015 - DNA, 603 bp, Artificial Sequence
  derived and/or modified sequence
aagcagtcccaggtgaagagataccagtgtacgttcgaggggtgcccccgaacgtacagcacagccggaaatctccgaactcaccagaagactcatcggggtgaatacacctttgtctgcaaccaggaaggttgtgggaaggcctttctgacctcctacagtctccggatccacgtgagggtccacacgaaggaaaagccctttgaatgcgacgtgcagggttgcgagaaagcatttaataccttataccgcctcaaggcccaccaacgcctccataccggtaaaacctttaactgcgagagcgaggggtgcagcaaatattttactacgctctcggatctgaggaagcatattagaacacatacaggcgaaaagccgtttcggtgcgaccacgacgggtgcggcaaggcctttgccgcatctcaccacctcaaaacccatgtccgtacccacacgggagagcgtccgttcttttgtccttccaatggttgcgaaaaaacgttcagtacacagtacagcctgaagagtcatatgaaaggccacgataacaaaggtcactcctataatgctctgccccagcacaacggtagcgaatctacatag

SEQ ID NO: 338016 - DNA, 603 bp, Artificial Sequence
  derived and/or modified sequence
aagcagagccaggtgaagagataccagtgcaccttcgagggctgccccagaacctacagcaccgccggcaacctgagaacccaccagaagacccacagaggcgagtacaccttcgtgtgcaaccaggagggctgcggcaaggccttcctgaccagctacagcctgagaatccacgtgagagtgcacaccaaggagaagcccttcgagtgcgacgtgcagggctgcgagaaggccttcaacaccctgtacagactgaaggcccaccagagactgcacaccggcaagaccttcaactgcgagagcgagggctgcagcaagtacttcaccaccctgagcgacctgagaaagcacatcagaacccacaccggcgagaagcccttcagatgcgaccacgacggctgcggcaaggccttcgccgccagccaccacctgaagacccacgtgagaacccacaccggcgagagacccttcttctgccccagcaacggctgcgagaagaccttcagcacccagtacagcctgaagagccacatgaagggccacgacaacaagggccacagctacaacgccctgccccagcacaacggcagcgagagcacctag

SEQ ID NO: 338017 - protein, 656 aa, Artificial Sequence [sequence omitted]

SEQ ID NO: 338018 - DNA, 162 bp, Artificial Sequence
  derived and/or modified sequence
atgtgcagaggctgcggctgcctgccccccgacgccccctgccccaccctgtgcagcagaaaccccgccatggtgaacgaggccagaggcaacagcagcctgaacccctgcctggagggcagcgccagcagcggcagcgagagcagcaaggacagcagctag

SEQ ID NO: 338019 - DNA, 162 bp, Artificial Sequence
  derived and/or modified sequence
atgtgtcgcggttgtgggtgtttgccaccggacgccccgtgcccaacactgtgtagtcggaatcctgctatggtaaacgaggccagaggtaattctagtcttaatccctgcttggagggttccgcttcttccgggtccgaatctagcaaggatagttcttag

SEQ ID NO: 338020 - DNA, 162 bp, Artificial Sequence
  derived and/or modified sequence
atgtgccggggctgcggctgcctgcccccagatgccccctgccccaccctgtgcagcaggaacccagccatggtgaatgaggcccggggcaacagcagcctgaacccctgcctggagggcagcgccagcagcggcagcgagagcagcaaggacagcagctag

SEQ ID NO: 338021 - DNA, 1135 bp, Artificial Sequence
  derived and/or modified sequence
ctccaaataaccaccctcctcttcaggacacctcaaagatgtccaacgccagctgaaaaggggggtaaaaatgcaggttccatttgacagtgtgacgtatctgaaatcagaaaggacttgtcaactctgggaacacaactcaagttttcccaggatgctttgcagggggaagctggactgtcagtgacccagaaagggtgagggatagagtgagaaaggactggagaagctaaaacagcagcatgataagcacaaagtcctgtgaggaagctcattctgaaaacgcttgtttcattccaaactcttttcagatggaaataaaaggaaacatgggtgggatttactggagctggcctggattctccctcagattccaggaggggttatgagaaaagaccccagacttaggcacgtgaagcagggtagacgcttcgagagccctggctgcggtccccaggccccacccgctgccacctgcgggcccagattggcccggccccacccccggcaacgcctctctcagtcccttagcaaccgccccctccccaggccgactccgccggcttcttaccagctcctcgggggtgcgggtctcacgctcaccgcagcagcagcaccacctgcagcagcagcacagagaccccctgcaccccgccatcttcctcctttactgccactctggacccctctaccaaccccctcccagccaggatctgcgcctcacgtgactggccccgggacggtcacgtggccctctcgagctctgggactgagaccaggagtggctgcagacgggtggggcgaggactcgcgtcacatgacgataaaggcacggcctccaacgagacctgtgggcacggccatgttgggggcggggcttccggtcacccgcgccggtggtttccgccctgtaggcccgcctctccagcaacctgacacctgcgccgcgccccttcactgcgttccccgcccctgcagcggccacagtggtgcggccggcggccgagcgttctgagtcacccgggactggaggtaggaacccagccatggtgaacgaagccagaggaaacagcagcctcaacccctgcttggagggcagtgccagcagtggcagtgagagctccaaagatagttc

SEQ ID NO: 338022 - DNA, 398 bp, Artificial Sequence
  derived and/or modified sequence
ctcagtgaatgttggctatcaccgtgtgccaaactctggggataccccaggcaggacaccggtcctgtctcagggaactggggaaagagaaaggagacaggccttttcacccacagttacaacccagggtgctatgggagtccagctgataacggataaatcgtgggagttggcttacaaatatggcacatgcgtggcatatactaggaatgcaataagtctttgaaaatcagagggtttacaggtggttcagcttcctcctactctaggttctgttccagcaagcaattaacgagtaggaacccagccatggtgaacgaagccagaggaaacagcagcctcaacccctgcttggagggcagtgccagcagtggcagtgagagctccaaagatagttc

SEQ ID NO: 338023 - DNA, 1034 bp, Artificial Sequence
  derived and/or modified sequence
cagtggtgcggccggcggccgagcgttctgagtcacccgggactggagggtgagtgacggcgaggccggggtcgccgggagggagatcctggagccggcaaacaacctcccgggggcaaggacgtgcttgtgggcggggagcgctggaggccggcctgcctctcttcttggggggggctgccgcctcccttgcgcacccttcgcgggattagtgtaactcccaatggctaccacttccagcgaccgccaaccctcaagcgaagactgactttggctccctgcctggacggaggggcccctgagccaggggtgacgatcccgcccctctgaccggcccaggcccgtgtcctcgcccccatcggtgactcagtgacctggtgactggattctcggccacctgggcgccgagacggcttccggctcctgccttttaaacctgcctccccggcgatcacctggagaagagcgctgggcccggggcactgcggtccctggcgcccactgcgtcccgctgcgcacgggggtccgccgggacctttctgggagtcgtaggcttagtatcccagtgcttggcgcagactagttgttcataggaacccagccatggtgaacgaagccagaggaaacagcagcctcaacccctgcttggagggcagtgccagcagtggcagtgagagctccaaagatagttcgagatgttccaccccgggcctggaccccgagcggcatgagagactccgggagaagatgaggcggcgattggaatctggtgacaagtggttctccctggaattcttccctcctcgaactgctgagggagctgtcaatctcatctcaaggtttgaccggatggcagcaggtggccccctctacatagacgtgacctggcacccagcaggtgaccctggctcagacaaggagacctcctccatgatgatcgccagcaccgccgtgaactactgtggcctggagaccatcctgcacatgacctgctgccgtcagcgcctggaggagatcacgggccatctgcacaa

SEQ ID NO: 338024 - DNA, 162 bp, Artificial Sequence
  derived and/or modified sequence
atgtgccggggctgcggctgcctgccccccgacgccccctgccccactctgtgtagccggaaccctgcaatggtgaatgaggcaaggggcaacagttccctgaacccttgtctagaaggaagtgcctcctccggtagcgagtcttcaaaagatagttcttag

SEQ ID NO: 338025 - DNA, 162 bp, Artificial Sequence
  derived and/or modified sequence
atgtgccggggatgtggctgtctgccacccgatgctccctgtcccactctgtgttcgcggaatccagctatggtgaacgaagcccgaggtaatagcagcctcaacccctgccttgagggtagcgcctcctccgggtcagagtcatccaaagacagctcctag

SEQ ID NO: 338026 - protein, 230 aa, Artificial Sequence
  derived and/or modified sequence
MTPLVSRLSRLWAIMRKPRAAVGSGHRKQAASQEGRQKHAKNNSQAKPSACDGGESTLGWPGLLFSWPAAAGGSSEGLLAGLWEFPSVTWEPSEQLQRKALLQELQRWAGPLPATHLRHLGEVVHTFSHIKLTYQVYGLALEGQTPVTTVPPGARWLTQEEFHTAAVSTAMKKVFRVYQGQQPGTCMGSKRSQVSSPCSRKKPRMGQQVLDNFFRSHISTDAHSLNSAAQ

SEQ ID NO: 338027 - DNA, 693 bp, Artificial Sequence
  derived and/or modified sequence
atgacccccctggtgagcagactgagcagactgtgggccatcatgagaaagcccagagccgccgtgggcagcggccacagaaagcaggccgccagccaggagggcagacagaagcacgccaagaacaacagccaggccaagcccagcgcctgcgacggcggcgagagcaccctgggctggcccggcctgctgttcagctggcccgccgccgccggcggcagcagcgagggcctgctggccggcctgtgggagttccccagcgtgacctgggagcccagcgagcagctgcagagaaaggccctgctgcaggagctgcagagatgggccggccccctgcccgccacccacctgagacacctgggcgaggtggtgcacaccttcagccacatcaagctgacctaccaggtgtacggcctggccctggagggccagacccccgtgaccaccgtgccccccggcgccagatggctgacccaggaggagttccacaccgccgccgtgagcaccgccatgaagaaggtgttcagagtgtaccagggccagcagcccggcacctgcatgggcagcaagagaagccaggtgagcagcccctgcagcagaaagaagcccagaatgggccagcaggtgctggacaacttcttcagaagccacatcagcaccgacgcccacagcctgaacagcgccgcccagtag

SEQ ID NO: 338028 - DNA, 693 bp, Artificial Sequence
  derived and/or modified sequence
atgacccccctggtatccagactgtctcgcctgtgggctatcatgcggaagcctcgggccgctgtggggtccggccaccgcaagcaggccgccagtcaggagggtcggcagaagcacgctaaaaataacagtcaagccaagccatccgcctgcgacggcggcgaatccacattgggttggcccggcctcctgtttagttggcctgctgctgctgggggcagctcagaaggtcttctggcaggcctttgggaattcccctccgtcacgtgggaacctagtgagcagctgcagaggaaggccctgctccaggaactccagcggtgggcaggacctctacccgcaacccacctgcgtcacctgggcgaagtagtgcataccttcagccacatcaaactaacctatcaggtttacggtctggccctggagggccagacgccagtaactacagtgcctccgggagccaggtggcttacccaggaagagttccatacagcagctgtgtcaacggcgatgaaaaaggtgtttagggtgtatcagggccagcagcccgggacatgtatggggagcaagcgctcccaggtctcctccccgtgcagtaggaaaaagccaaggatgggtcagcaggtcctcgacaacttctttcgttctcatataagtactgatgcacacagtttaaactctgctgctcaatag

SEQ ID NO: 338029 - DNA, 693 bp, Artificial Sequence
  derived and/or modified sequence
atgacccccctggtgtcccggctgagccggctgtgggccatcatgaggaagcccagggctgctgtgggcagcggccacaggaagcaggccgccagccaggagggccggcagaagcacgccaagaacaacagccaggccaagcccagcgcctgtgatggaggagagagcaccctgggctggccaggcctgctcttctcctggccagctgctgctgggggcagcagcgagggcctgctggccggcctgtgggagttccccagcgtgacctgggagcccagcgagcagctgcagaggaaggccctgctgcaggagctgcagcgctgggccggccccctgcctgccacccacctgcggcacctgggggaggtggtgcacaccttcagccacatcaagctgacctaccaggtgtatggcctggccctggagggccagacccctgtgaccaccgtgcccccaggggcccgctggctgacccaggaggagttccacacagctgctgtgtccacagccatgaagaaggtgttccgggtgtaccagggccagcagcccggcacctgcatgggcagcaagaggagccaggtgagcagcccctgcagcaggaagaagcccaggatgggccagcaggtgctggacaacttcttccgcagccacatcagcacagatgcccacagcctgaacagcgctgcccagtag

SEQ ID NO: 338030 - DNA, 693 bp, Artificial Sequence
  derived and/or modified sequence
atgacccccctggtgagccggctgagccggctgtgggccatcatgaggaaaccacgcgccgccgtgggctccgggcatcgcaagcaggccgccagccaggaaggaaggcagaagcatgcgaagaataacagccaggcgaagccatcggcctgcgacgggggggaaagcacgctgggttggcctggactgctctttagctggcccgcggccgccggaggaagtagcgaaggactcttggccggcctctgggaattccctagcgtgacgtgggaaccgtccgagcagcttcagcgcaaagccctgttgcaagaattgcagcgttgggcagggccgttacctgcgacccacttgcgccatttaggagaggttgtccataccttttctcatattaagctcacatatcaggtgtacgggttagccctggaaggccaaactcccgttactaccgtcccccctggggctcgttggctaacacaggaagagttccacacggctgccgtgtccacggctatgaagaaggtctttagggtgtatcaaggccagcagcccgggacttgtatgggctccaaaagaagccaagttagtagtccgtgtagccgtaagaaacccaggatgggccagcaagttctggataacttcttccggtctcatatttccaccgacgcccattccctgaacagcgccgcacagtag

SEQ ID NO: 338031 - DNA, 1029 bp, Artificial Sequence
  derived and/or modified sequence
ggaacttgtagtctcctcgtggctagttcaggcggaaggagcagtcctctgaagcttgaggagcctctagaactatgagcccgaggccttcccctctcccagagcgcagaggctttgaaggctacctctgggaagccgctcaccgtcggaagctgcgggagctgaaactgcgccatcgtcactgtcggcggccatgacaccgctcgtctcccgcctgagtcgtctgtgggccatcatgaggaagccacgagcagccgtgggaagtggtcacaggaagcaggcagccagccaggaagggaggcagaagcatgctaagaacaacagtcaggccaagccttctgcctgtgatggaggtgaatcaactctgggctggcctgggctactattctcgtggccggcggctgcaggagggagctcggaaggtctgctggcaggactgtgggagttcccgtccgtgacctgggagccctcagagcagcttcagcgcaaggccctgctgcaggaactacagcgttgggctgggcccctcccagccacgcacctccggcaccttggggaggttgtccacaccttctctcacatcaagctgacatatcaagtatatgggctggccttggaagggcagaccccagtgaccaccgtaccaccaggtgctcgctggctgacgcaggaggaatttcacaccgcagctgtttccaccgccatgaaaaaggttttccgtgtgtatcagggccaacagccagggacctgtatgggttccaaaaggtcccaggtgtcctctccgtgcagtcggaaaaagccccgcatgggccagcaagtcctggataatttctttcggtctcacatctccactgatgcacacagcctcaacagtgcagcccagtgacacctctgaaagcccccattccctgagaatcctgttgttagtaaagtgcttatttttgtagttattttatgttgtatttttttgagatgggggtctcgctatgttgctcagactggtttcgaactcaggtgattctggcctca

SEQ ID NO: 338032 - DNA, 693 bp, Artificial Sequence
  derived and/or modified sequence
atgaccccattggtgagccgcctgtctcgtctgtgggccataatgcggaagcccagagctgccgttggctcaggacaccggaaacaagcagccagtcaggagggacgacaaaagcacgcgaagaataatagtcaagccaaaccgtccgcctgcgatggcggtgaaagcactctggggtggccaggtcttctcttctcctggcctgcagccgcaggcggatcttcagagggtctgctcgcaggcctttgggagtttccctcagtcacatgggagccttctgagcagcttcagcgcaaagccctgcttcaggagttacaaagatgggccggaccactcccggctacccaccttagacatctgggggaggtggtgcacacgttctcccacataaagctgacgtatcaggtttacggcctggccctcgaggggcaaactcccgtaaccactgtccccccaggtgccagatggctgacgcaagaggagtttcatacagcggcagtgtctaccgccatgaagaaggtttttcgagtgtaccagggacagcagccaggtacctgtatgggaagcaagcgaagccaagtttcctcaccatgttcgaggaagaagcctcggatgggccaacaggtcttagataacttctttagatcgcatatcagcactgatgctcactcactgaattctgccgcacagtag

SEQ ID NO: 338033 - DNA, 648 bp, Artificial Sequence
  derived and/or modified sequence
atgacccccctggtgagcagactgagcagactgtgggaggtgaaccagctgtgggccggcctgggctactacagcagaggcagaagactgcaggagggcgccagaaaggtggtggaggagctgggcggccacatgcccagaaccgccgagaccctgcagcagctgctgcccggcgtgggcagatacaccgccggcgccatcgccagcatcgccttcggccaggccaccggcgtggtggacggcaacgtggccagagtgctgtgcagagtgagagccatcggcgccgaccccagcagcaccctggtgagccagcagctgtggggcctggcccagcagctggtggaccccgccagacccggcgacttcaaccaggccgccatggagctgggcgccaccgtgtgcaccccccagagacccctgtgcagccagtgccccgtggagagcctgtgcagagccagacagagagtggagcaggagcagctgctggccagcggcagcctgagcggcagccccgacgtggaggagtgcgcccccaacaccggccagtgccacctgtgcctgccccccagcgagccctgggaccagaccctgggcgtggtgaacttccccagaaaggccagcagaaagccccccagagaggagagctag

SEQ ID NO: 338034 - DNA, 648 bp, Artificial Sequence
  derived and/or modified sequence
atgacccccctggtgagtcgcttgtcgcggctgtgggaggtaaaccagctatgggccggcttgggctattatagtagaggacggcgtctgcaggaaggcgccaggaaagtcgtcgaagaattaggtggtcatatgcctcgcacagcggaaacactccaacagctgctccctggcgtggggcgctacacggctggcgcaatcgcttccattgcctttggtcaggctacaggcgtggttgacgggaatgtggctcgtgttctctgtagggtgagagctataggcgccgacccaagctcaacactggtcagccaacagctctggggactggcccagcaactagtcgatcccgctcggcccggagatttcaaccaagccgccatggaattgggcgctaccgtctgcacccctcagagacccctgtgtagccaatgccctgtggagagcctgtgtcgtgcacgacaaagagtagagcaagagcagctgctggccagtggctccctgtctggcagtccagacgtagaagaatgtgctccaaacacagggcagtgtcacttgtgcctccccccttccgagccttgggatcaaactctgggcgtggtgaacttcccacgcaaggcctctcgcaaaccccctagggaggagtcttag

SEQ ID NO: 338035 - DNA, 648 bp, Artificial Sequence
  derived and/or modified sequence
atgacccccctggtgtcccggctgagccggctgtgggaggtgaaccagctgtgggccggcctgggctactacagccggggccggcggctgcaggagggcgccaggaaggtggtggaggagctgggcggccacatgcccaggacagctgagaccctgcagcagctgctgcccggggtgggccgctacacagctggggccatcgccagcatcgccttcggccaggccaccggggtggtggatggaaatgtggcccgggtgctgtgccgggtgcgggccatcggggctgaccccagcagcaccctggtgtcccagcagctgtggggcctggcccagcagctggtggaccctgcccggcctggggacttcaaccaggccgccatggagctgggcgccaccgtgtgcaccccccagaggcccctgtgcagccagtgccctgtggagagcctgtgccgggcccggcagagggtggagcaggagcagctgctggccagcggcagcctgagcggcagcccagatgtggaggagtgtgcccccaacacaggccagtgccacctgtgcctgccccccagcgagccctgggaccagaccctgggcgtggtgaacttccccaggaaggccagcaggaagccaccccgggaggagagctag

SEQ ID NO: 338036 - DNA, 648 bp, Artificial Sequence
  derived and/or modified sequence
atgacccccctggtgagccggctgagccggctgtgggaggtgaaccaactctgggccggactgggatattacagcagagggagaagactgcaggaaggggcccgcaaagtggtggaggagttaggagggcatatgcctcggacggccgagaccctccagcagctgctgcccggagtcggtaggtatacggccggagccattgctagtatcgcattcgggcaggctaccggagtggtggatgggaacgtcgctcgagtgttatgccgagtccgcgctatcggtgcagacccatcatcaactctggtctcgcagcagctttggggactcgctcagcagctcgttgaccccgctcgccccggcgactttaaccaagcagccatggaattgggggccacagtgtgcaccccacagagacctctgtgctcccagtgtcctgtagaaagcctctgtagagcccgccagcgcgtggagcaagaacagctgctggccagcggctcactgagcgggtcccccgatgtggaagagtgtgccccaaacaccggacagtgccatctctgtttgcccccaagcgagccctgggaccagactctcggcgtggtgaattttccccggaaggctagcagaaagcctcctcgagaggagtcgtag

SEQ ID NO: 338037 - DNA, 1245 bp, Artificial Sequence
  derived and/or modified sequence
atgacaccgctcgtctcccgcctgagtcgtctgtgggaggtgaatcaactctgggctggcctgggctactattctcgtggccggcggctgcaggagggagctcggaaggtggtagaggagctagggggccacatgccacgtacagcagagaccctgcagcagctcctgcctggcgtggggcgctacacagctggggccattgcctctatcgcctttggccaggcaaccggtgtggtggatggcaacgtagcacgggtgctgtgccgtgtccgagccattggtgctgatcccagcagcacccttgtttcccagcagctctggggtctagcccagcagctggtggacccagcccggccaggagatttcaaccaagcagccatggagctaggggccacagtgtgtaccccacagcgcccactgtgcagccagtgccctgtggagagcctgtgccgggcacgccagagagtggagcaggaacagctcttagcctcagggagcctgtcgggcagtcctgacgtggaggagtgtgctcccaacactggacagtgccacctgtgcctgcctccctcggagccctgggaccagaccctgggagtggtcaacttccccagaaaggccagccgcaagccccccagggaggagagctctgccacctgtgttctggaacagcctggggcccttggggcccaaattctgctggtgcagaggcccaactcaggtctgctggcaggactgtgggagttcccgtccgtgacctgggagccctcagagcagcttcagcgcaaggccctgctgcaggaactacagcgttgggctgggcccctcccagccacgcacctccggcaccttggggaggttgtccacaccttctctcacatcaagctgacatatcaagtatatgggctggccttggaagggcagaccccagtgaccaccgtaccaccaggtgctcgctggctgacgcaggaggaatttcacaccgcagctgtttccaccgccatgaaaaaggttttccgtgtgtatcagggccaacagccagggacctgtatgggttccaaaaggtcccaggtgtcctctccgtgcagtcggaaaaagccccgcatgggccagcaagtcctggataatttctttcggtctcacatctccactgatgcacacagcctcaacagtgcagcccagtgacacctctgaaagcccccattccctgagaatcctgttgttagtaaagtgcttatttttgtagtt

SEQ ID NO: 338038 - DNA, 648 bp, Artificial Sequence
  derived and/or modified sequence
atgaccccactggtgagccggctgtctcggttatgggaagtaaatcagttgtgggcaggcctgggctactatagcaggggaagacggctgcaagagggcgctcgtaaggtggtggaggagttgggtgggcacatgcccaggaccgccgaaacactgcaacaactcctgcctggagttgggaggtatactgctggcgcaatagccagtattgcgtttggacaggccaccggggtggttgacggcaacgtggccagggtgttgtgtagggtccgggctattggcgcagacccttccagcactctggtctcccagcagctgtggggcctagcccaacaactagttgaccctgccaggcccggagacttcaaccaggccgctatggagctcggcgctaccgtgtgtactccacaaagaccactgtgtagccagtgccccgtggaatcactctgtcgagccagacagagagtcgagcaagaacagctgctcgcgtcaggctccctgtctggttcacccgatgtggaagagtgcgccccaaatacaggacagtgccacttatgtctaccaccaagtgagccttgggatcagactctgggcgtggtgaattttccacgtaaagcaagccggaagcctccaagagaagaatcatag

SEQ ID NO: 338039 - protein, 380 aa, Artificial Sequence
  derived and/or modified sequence
MYSPLCLTQDEFHPFIEALLPHVRAFAYTWFNLQARKRKYFKKHEKRMSKEEERAVKDELLSEKPEVKQKWASRLLAKLRKDIRPEYREDFVLTVTGKKPPCCVLSNPDQKGKMRRIDCLRQADKVWRLDLVMVILFKGIPLESTDGERLVKSPQCSNPGLCVQPHHIGVSVKELDLYLAYFVHAAGMPSPTTLKKSEKSGFSSPSPSQTSSLGTAFTQHHRPVITGPRASPHATPSTLHFPTSPIIQQPGPYFSHPAIRYHPQETLKEFVQLVCPDAGQQAGQVGFLNPNGSSQGKVHNPFLPTPMLPPPPPPPMARPVPLPVPDTKPPTTSTEGGAASPTSPTYSTPSTSPANRFVSVGPRDPSFVNIPQQTQSWYLG

SEQ ID NO: 338040 - protein, 95 aa, Artificial Sequence
  derived and/or modified sequence
MSTEGGFGGTSSSDAQQSLQSFWPRVMEEIRNLTVMISAEAPVLFAKAAQIFITELTLRAWIHTEDNKRRTLQRNDIAMAITKFDQFDFLIDIVP

SEQ ID NO: 338041 - protein, 241 aa, Artificial Sequence
  derived and/or modified sequence
MSMLFYTLITAFLIGIQAEPHSESNVPAGHTIPQAHWTKLQHSLDTALRRARSAPAAAIAARVAGQTRNITVDPRLFKKRRLRSPRVLFSTQPPREAADTQDLDFEVGGAAPFNRTHRSKRSSSHPIFHRGEFSVCDSVSVWVGDKTTATDIKGKEVMVLGEVNINNSVFKQYFFETKCRDPNPVDSGCRGIDSKHWNSYCTTTHTFVKALTMDGKQAAWRFIRIDTACVCVLSRKAVRRA

SEQ ID NO: 338042 - DNA, 1047 bp, Artificial Sequence
  derived and/or modified sequence
agagagcgctgggagccggaggggagcgcagcgagttttggccagtggtcgtgcagtccaaggggctggatggcatgctggacccaagctcagctcagcgtccggacccaataacagttttaccaagggagcagctttctatcctggccacactgaggtgcatagcgtaatgtccatgttgttctacactctgatcacagcttttctgatcggcatacaggcggaaccacactcagagagcaatgtccctgcaggacacaccatcccccaagcccactggactaaacttcagcattcccttgacactgcccttcgcagagcccgcagcgccccggcagcggcgatagctgcacgcgtggcggggcagacccgcaacattactgtggaccccaggctgtttaaaaagcggcgactccgttcaccccgtgtgctgtttagcacccagcctccccgtgaagctgcagacactcaggatctggacttcgaggtcggtggtgctgcccccttcaacaggactcacaggagcaagcggtcatcatcccatcccatcttccacaggggcgaattctcggtgtgtgacagtgtcagcgtgtgggttggggataagaccaccgccacagacatcaagggcaaggaggtgatggtgttgggagaggtgaacattaacaacagtgtattcaaacagtacttttttgagaccaagtgccgggacccaaatcccgttgacagcgggtgccggggcattgactcaaagcactggaactcatattgtaccacgactcacacctttgtcaaggcgctgaccatggatggcaagcaggctgcctggcggtttatccggatagatacggcctgtgtgtgtgtgctcagcaggaaggctgtgagaagagcctgacctgccgacacgctccctccccctgccccttctacactctcctgggcccctccctacctcaacctgtaaattattttaaattataaggactgcatggtaatttatagtttatacagttttaaagaatcattatttattaaatttttggaagc

SEQ ID NO: 338043 - DNA, 7416 bp, Artificial Sequence
  derived and/or modified sequence
atgccagctctaagaccggccctgctctgggcactgctcgccctgtggctctgttgcgccgcccctgcccatgctcttcagtgtcgcgacggctacgagccatgcgtgaacgaagggatgtgtgtgacttatcacaacggcaccggatattgcaagtgtcccgagggctttctgggggaatattgccagcacagggatccctgcgagaagaatcggtgtcaaaacggaggcacttgcgttgcccaggctatgctcggcaaggccacttgccggtgcgccagcggttttaccggggaggattgccagtattccacaagccatccttgcttcgtcagccgaccatgcctgaacggcggcacctgccatatgctgagtcgcgacacatatgagtgcacctgccaggtgggcttcacaggaaaagagtgccagtggacagatgcctgcctgtcacacccatgtgcgaacggcagcacatgtacaacagttgcaaatcagttttcctgtaagtgcctcacaggattcacggggcagaaatgcgagactgatgtaaacgaatgtgacatccccggtcactgtcagcacggaggaacgtgtctcaatctaccgggatcctaccaatgccagtgtccacaaggcttcacaggacagtactgtgactctctgtacgttccgtgcgcaccttcaccctgcgtgaacggggggacctgccggcagaccggagactttacctttgagtgcaactgtttgcctgggtttgagggctcaacctgtgaaaggaatatcgacgactgcccaaatcatcggtgccaaaatggaggcgtatgtgtggacggtgtaaacacttacaactgcagatgccctccacagtggaccgggcaattctgtactgaggacgtggacgaatgtctccttcagcctaatgcatgccagaacggcggtacgtgtgccaacagaaatgggggctacgggtgcgtttgcgtgaacggctggtccggggatgactgtagcgagaacatagacgactgtgcttttgcatcttgcactcccgggtcaacatgtattgatcgagtagcatctttcagttgcatgtgcccggaaggaaaggccggtctcctttgccaccttgacgatgcctgtatctccaatccctgccataaaggagctctttgtgatacaaaccctcttaatgggcaatacatatgtacctgccctcagggctacaagggggcagattgtactgaagatgttgatgaatgtgcaatggccaacagtaacccatgtgagcacgcaggaaagtgtgtcaataccgacggggcgttccactgtgaatgcttgaaggggtacgccggacctcggtgcgaaatggatatcaatgaatgccatagtgatccatgtcagaatgatgctacttgtcttgacaagataggtggcttcacctgtctctgcatgccaggttttaaaggggtccactgtgagctggagatcaatgagtgtcagtctaacccctgtgttaataatgggcaatgtgtagacaaagttaatcggtttcagtgtttatgcccacctggatttactggtccagtatgccaaatcgatattgatgactgttccagcactccctgtctcaatggggctaagtgtatcgaccatcccaacggctacgaatgccagtgtgctactggctttactggagtgttgtgcgaagagaacattgataactgcgatcccgacccttgtcaccacgggcaatgccaggatgggatcgactcatacacctgcatatgcaatcctgggtatatgggtgccatttgctcggaccaaattgacgaatgctactcctccccttgcctgaacgacgggcgatgcattgacctggttaatggttatcagtgtaattgccagcccggcacctcaggggtcaactgtgagatcaacttcgatgactgtgcctccaatccgtgcatccacggaatctgcatggatggcatcaacagatattcgtgcgtgtgttctcccggtttcacaggtcagcgctgtaacatagacatagacgagtgcgcttccaatccctgcaggaaaggagccacatgcatcaacggcgtgaacgggttccgatgcatctgcccagagggcccccaccacccatcctgctactcccaggtgaatgaatgtttgtcgaatccttgtattcatggaaattgcacggggggcctctcagggtataagtgtttgtgcgacgccggctgggttggcatcaattgtgaggtggacaaaaacgagtgtttaagcaacccttgccaaaatggcgggacgtgcgataatttggtcaacggttatcgatgcacatgtaagaaagggtttaagggatacaattgccaggtgaacattgatgagtgtgcttccaatccctgtctgaaccagggtacatgttttgacgacatcagtggatacacttgtcactgtgttctcccatacaccggcaagaattgccaaacggtcttagcaccatgttcccctaacccctgtgaaaacgcagctgtgtgcaaagagtcgccgaattttgagtcctatacttgcctgtgcgctcccggctggcaagggcagcggtgcactatcgacatcgatgagtgcatctcaaaaccatgcatgaatcacggtctttgtcataatactcagggtagctatatgtgtgagtgtccacccggctttagcggcatggattgtgaggaggatattgatgattgtcttgctaatccttgtcagaacggcggctcttgtatggacggggtcaacacatttagctgcttgtgtctacctggcttcacgggagacaaatgtcagaccgacatgaacgaatgtctgtctgagccttgcaaaaacgggggcacctgcagcgactatgtgaatagctacacgtgtaaatgccaggccgggttcgacggtgtacactgtgaaaacaatataaatgagtgtactgagtcctcatgtttcaacgggggaacttgtgtggacggaattaattctttcagctgtctgtgccccgtgggcttcaccgggagtttctgtctgcacgaaatcaacgaatgttcctctcacccctgtctgaacgagggaacctgcgttgacggccttgggacatataggtgtagctgtcctctcggttataccggcaagaactgccaaactctcgtgaacctgtgttctagaagtccctgtaaaaataaaggaacatgtgtccagaaaaaagcggaaagtcagtgcctctgtccctctggctgggcaggagcctattgtgacgtgccaaacgtgtcttgcgatatcgccgcctcgagaaggggggtccttgttgaacatttgtgccaacattctggggtgtgtatcaacgccggaaacactcattattgtcaatgccctttaggctatacaggatcttactgcgaagagcaactcgatgaatgcgcatcaaacccttgtcagcatggcgcaacgtgctccgacttcattggtggatacaggtgcgagtgcgttcccggctaccagggcgtgaactgcgagtatgaggtcgatgagtgccagaatcaaccgtgtcaaaatggggggacgtgtatagatctcgtgaaccattttaagtgcagctgcccccctgggacacgaggcctcctgtgtgaagagaatattgatgattgtgcacgcggtccacactgcctgaacggtgggcagtgcatggaccgcatcggtggatacagctgtcgctgtctacccggctttgcaggggagcggtgcgagggtgacattaatgaatgtctctccaatccctgcagcagcgagggcagcttggattgcatccagttaaccaacgactatctgtgtgtgtgtcgatcagcttttactggccggcattgcgagacgtttgtggacgtgtgtcctcaaatgccgtgcctcaacggcggcacctgtgccgtcgcctctaacatgcccgatggatttatctgtagatgcccaccaggcttctcaggcgccagatgtcaatcatcatgtggacaggttaaatgtaggaagggcgagcagtgcgtacatacagcatcaggccctaggtgtttctgcccgagtcctagagactgcgagtccggctgcgcatctagtccttgtcagcacggtgggtcatgtcacccacaaaggcagcccccctattactcctgccaatgcgcccctcctttctctggcagtagatgtgaactgtatacagcccccccctccactccccccgccacatgtctgtctcaatactgcgctgacaaggcccgagacggcgtttgtgacgaagcgtgtaactcccatgcctgtcagtgggacggaggagactgcagtctgactatggaaaacccatgggctaattgttcttcccccttaccatgttgggattatattaataaccagtgcgacgagctgtgcaatactgttgaatgcctattcgacaatttcgaatgccagggtaactctaaaacgtgcaagtacgataagtactgtgcggaccactttaaagacaatcactgtgaccagggctgcaattccgaggaatgcgggtgggacggtctcgactgcgcggctgatcagccagaaaacctagcggagggaacattggtgatcgtagtgctgatgccccccgagcagcttttgcaggacgcccgctccttcttgcgtgcacttggcacattgttgcacactaatctacggattaaaagagacagtcagggtgagctcatggtatacccctactatggcgagaagtcggcagctatgaaaaagcaacgaatgaccagaagaagtttgccgggcgaacaggaacaggaggtggcgggctcaaaagtcttcttggaaatagacaatagacagtgcgtccaggacagcgaccattgcttcaagaacacggatgcagccgcagctctcttggccagccacgcgatccagggaacactcagctaccctctcgtgtctgttgtttctgaatccctgactcccgaacgtacccagttgctgtacctcctagctgttgccgtcgtgatcattctatttatcatccttctgggggtgattatggcgaaacgtaagagaaaacacggatccctgtggctgcccgagggattcactctgaggcgcgatgcttccaaccataaacgccgtgaacccgttggacaggacgccgtcggcttaaagaacctgtcggttcaggtgtctgaggcaaacctgattggcacaggaacgtctgagcactgggttgatgacgagggcccccagccaaagaaagtgaaagctgaggatgaagctctgctgtcagaggaagacgaccccatcgatcgcagaccatggacccagcaacacctggaagctgctgacatccgccggactccaagcttggcgttgacccccccccaagctgagcaggaggtggatgtattggacgtgaatgtccggggaccagacggctgcactcctctgatgctggcatccctcaggggaggatcttccgatctttcagacgaggatgaggacgcagaggacagcagcgctaacatcatcaccgacctcgtctatcaaggcgcatccttgcaagcccagactgacagaactggcgagatggccctacacctcgcggcccgatactcacgggccgatgctgccaaacggctgcttgatgcaggagcagatgcaaacgcacaggataacatggggcggtgtcctcttcatgccgccgtggcagctgatgctcaaggggtcttccagatccttattcgcaatcgggtcaccgatttggacgctaggatgaacgatggaacaacccctctgatccttgcggctcggctcgccgtcgaaggcatggtcgctgagcttatcaactgtcaggcagatgttaacgctgttgacgatcatggcaagagtgctctgcactgggctgcagcggtgaacaatgtggaagcaactctgttgctgttaaagaatggggctaacagagacatgcaggataacaaagaggagactcccctgtttctggcggcgcgagaaggttcgtacgaggccgccaaaatactactcgaccacttcgcaaatcgagatataaccgaccacatggacagacttcctagagacgtcgctcgcgaccgaatgcaccacgacatcgtacgactgttagacgagtacaatgtaactcctagccctccaggcacagtgctgaccagtgctctgtctcctgtgatctgcggacccaataggagttttctttctttgaaacacacaccaatgggaaagaaaagcaggaggccttccgcaaagtcaacgatgccaacatctctaccgaacttggccaaggaggccaaggacgccaaagggtcaaggcggaagaagagcttgagcgagaaggtgcagctcagcgagtccagtgtcacactctcccctgtcgatagcttagagtcgccccatacttacgtgtccgacacaacctcatcacctatgatcaccagccctgggatcctccaggcttccccgaaccccatgctcgcaactgctgcgcctccggccccagtccacgctcagcacgctctgagtttcagcaatctgcatgaaatgcaacccctggcccatggcgcaagcaccgtgctgcctagcgtgtcacagttattatctcaccatcacatcgttagtccaggctcaggcagtgctggttctctttcccgccttcaccctgtccctgtgcccgctgactggatgaatcggatggaagtgaatgagacacaatacaacgagatgttcggtatggtgctggccccagcagagggcactcaccccgggatagccccgcaatcccgcccccccgaagggaagcatatcacaacccccagagaaccactgccccccatcgtcacctttcagctaatacccaaaggatcaatcgcccagcctgccggagcgccacagccacaatccacctgcccccccgccgttgcgggtccattaccaactatgtaccagatcccagaaatggctcgtcttcctagtgtggccttcccgaccgctatgatgccccaacaggatggccaggttgcccagactattttgcccgcatatcacccgttcccagcctccgtgggaaagtatcctacaccacctagccagcactcatacgcatctagtaacgccgcagagcgaacccctagccacagtgggcatctacagggggagcacccctacctaacacccagtcccgagagcccagatcagtggtcttccagcagtccccacagtgcttccgattggtccgacgtcaccacaagtcctacccccggcggggctgggggggggcaacgcggaccaggtactcacatgtcagaaccgccccacaataacatgcaggtttatgcatag

SEQ ID NO: 338044 - DNA, 7416 bp, Artificial Sequence
  derived and/or modified sequence
atgcctgccctgcggcctgccctgctgtgggccctgctggccctgtggctgtgctgtgccgccccagcccacgccctgcagtgcagagatggctatgagccctgtgtgaatgaaggcatgtgtgtgacctaccacaacggcaccggctactgcaagtgcccagagggcttcctgggggagtactgccagcaccgggacccctgtgagaagaaccgctgccagaatggaggcacctgtgtggcccaggccatgctgggcaaggccacctgccgctgtgccagcggcttcaccggggaggactgccagtacagcaccagccacccctgctttgtgtcccggccctgcctgaatggaggcacctgccacatgctgagccgggacacctatgagtgcacctgccaggtgggcttcaccgggaaggagtgccagtggacagatgcctgcctgagccacccctgtgccaacggcagcacctgcaccaccgtggccaaccagttcagctgcaagtgcctgaccggcttcaccggccagaagtgtgaaacagatgtgaatgaatgtgacatccctggccactgccagcacggcggcacctgcctgaacctgcccggcagctaccagtgccagtgcccccagggcttcaccggccagtactgtgacagcctgtatgtgccctgtgcccccagcccctgtgtgaatggaggcacctgccggcagacaggagacttcacctttgagtgcaactgcctgcccggctttgagggcagcacctgtgaaagaaatattgatgactgccccaaccaccgctgccagaatggaggagtgtgtgtggatggagtgaacacctacaactgccgctgccccccccagtggacaggccagttctgcacagaagatgtggatgaatgtctgctgcagcccaatgcctgccagaatggaggcacctgtgccaacagaaatggaggctacggctgtgtgtgtgtgaatggctggagcggagatgactgcagtgaaaatattgatgactgtgcctttgccagctgcaccccaggcagcacctgcatcgacagagtggccagcttcagctgcatgtgcccagagggcaaggccggcctgctgtgccacctggatgatgcctgcatcagcaacccctgccacaagggggccctgtgtgacaccaaccccctgaatggccagtacatctgcacctgcccccagggctacaagggagctgactgcacagaagatgtggatgaatgtgccatggccaacagcaacccctgtgaacatgctggaaaatgtgtgaacacagatggagccttccactgtgaatgtctgaagggctacgccggcccccgctgtgagatggacatcaatgaatgccacagcgacccctgccagaatgatgccacctgcctggacaagattggaggcttcacctgcctgtgcatgcctggcttcaagggcgtgcactgtgagctggagatcaatgaatgccagagcaacccctgtgtgaacaacggccagtgtgtggacaaggtgaaccgcttccagtgcctgtgccccccaggcttcaccggccctgtgtgccagattgatattgatgactgcagcagcaccccctgcctgaatggagccaagtgcatcgaccaccccaacggctatgagtgccagtgtgccaccggcttcaccggggtgctgtgtgaagaaaatattgacaactgtgaccctgacccctgccaccacggccagtgccaggacggcatcgacagctacacctgcatctgcaaccctggctacatgggcgccatctgcagcgaccagattgatgagtgctacagcagcccctgcctgaatgatggccgctgcatcgacctggtgaatggctaccagtgcaactgccagcccggcaccagcggcgtgaactgtgagatcaactttgatgactgtgccagcaacccctgcatccacggcatctgcatggatggcatcaaccgctacagctgtgtgtgcagccctggcttcaccggccagcgctgcaacattgatattgatgaatgtgccagcaacccctgcaggaaaggagccacctgcatcaatggagtgaatggcttccgctgcatctgcccagagggcccccaccaccccagctgctacagccaggtgaatgaatgtctgagcaacccctgcatccacggcaactgcacaggaggcctgagcggctacaagtgcctgtgtgatgctggctgggtgggcatcaactgtgaggtggacaagaatgaatgtctgagcaacccctgccagaatggaggcacctgtgacaacctggtgaatggctaccgctgcacctgcaagaagggcttcaagggctacaactgccaggtgaacattgatgaatgtgccagcaacccctgcctgaaccagggcacctgctttgatgacatcagcggctacacctgccactgtgtgctgccctacaccgggaagaactgccagacagtgctggccccctgcagccccaacccctgtgaaaatgctgctgtgtgcaaggagagccccaactttgagagctacacctgcctgtgtgcccctggctggcagggccagcgctgcaccatcgacattgatgagtgcatcagcaagccctgcatgaaccacggcctgtgccacaacacccagggcagctacatgtgtgagtgccccccaggcttcagcggcatggactgtgaggaggacattgatgactgcctggccaacccctgccagaatggaggcagctgcatggatggagtgaacaccttcagctgcctgtgcctgcccggcttcaccggggacaagtgccagacagacatgaatgaatgtctgtctgagccctgcaagaatggaggcacctgcagcgactatgtgaacagctacacctgcaagtgccaggccggctttgatggagtgcactgtgagaacaacatcaatgaatgtacagagagcagctgcttcaacggcggcacctgtgtggatggcatcaacagcttcagctgcctgtgccctgtgggcttcaccggcagcttctgcctgcacgagatcaatgaatgtagcagccacccctgcctgaatgaaggcacctgtgtggatggcctgggcacctaccgctgcagctgccccctgggctacaccgggaagaactgccagaccctggtgaacctgtgcagccgcagcccctgcaagaacaagggcacctgtgtgcagaagaaggccgagagccagtgcctgtgccccagcggctgggccggggcctactgtgatgtgcccaacgtgtcctgtgacattgctgccagcagaagaggagtgctggtggagcacctgtgccagcacagcggcgtgtgcatcaatgccggcaacacccactactgccagtgccccctgggctacacaggcagctactgtgaggagcagctggatgaatgtgccagcaacccctgccagcacggggccacctgcagcgacttcatcggcggctaccgctgtgaatgtgtgcccggctaccagggcgtgaactgtgaatatgaggtggatgagtgccagaaccagccctgccagaatggaggcacctgcatcgacctggtgaaccacttcaagtgcagctgccccccaggcacccggggcctgctgtgtgaggagaacattgatgactgtgcccggggcccccactgcctgaatggaggccagtgcatggacagaattggaggctacagctgccgctgcctgcccggctttgctggggagcgctgtgagggggacatcaatgaatgtctgagcaacccctgcagcagcgagggcagcctggactgcatccagctgaccaatgactacctgtgtgtgtgccgcagcgccttcaccggccgccactgtgagacctttgtggatgtgtgcccccagatgccctgcctgaatggaggcacctgtgctgtggccagcaacatgccagatggcttcatctgccgctgccccccaggcttcagcggggcccgctgccagagcagctgtggccaggtgaagtgcaggaaaggagagcagtgtgtgcacacagccagcggcccccgctgcttctgccccagcccccgggactgtgagagcggctgtgccagcagcccctgccagcacggcggcagctgccacccccagaggcagcccccctactacagctgccagtgtgccccacccttcagcggcagccgctgtgagctgtacacagccccacccagcaccccaccagccacctgcctgagccagtactgtgccgacaaggccagagatggagtgtgtgatgaggcctgcaacagccacgcctgccagtgggatggaggagactgcagcctgaccatggagaacccctgggccaactgcagcagccccctgccctgctgggactacatcaacaaccagtgtgatgagctgtgcaacacagtggagtgcctgtttgacaactttgagtgccagggcaacagcaagacctgcaagtatgacaagtactgtgccgaccacttcaaggacaaccactgtgaccagggctgcaacagcgaggagtgtggctgggatggcctggactgtgccgctgaccagcctgagaacctggccgagggcaccctggtgattgtggtgctgatgcctcctgagcagctgctgcaggatgcccggagcttcctgcgggccctgggcaccctgctgcacaccaacctgcgcatcaagagggacagccagggcgagctgatggtgtacccctactatggagagaagtctgctgccatgaagaagcagaggatgaccaggaggagcctgcctggagagcaggagcaggaggtggccggcagcaaggtgttcctggagattgacaaccggcagtgtgtgcaggacagcgaccactgcttcaagaacacagatgctgctgctgccctgctggccagccacgccatccagggcaccctgagctaccccctggtgtctgtggtgtctgagagcctgaccccagagaggacccagctgctgtacctgctggccgtggccgtggtgatcatcctcttcatcatcctgctgggcgtcatcatggccaagaggaagaggaagcacggcagcctgtggctgcctgagggcttcaccctgcggagagatgccagcaaccacaagaggcgggagcctgtgggccaggatgctgtgggcctgaagaacctgtctgtgcaggtgtctgaggccaacctgattggcaccggcaccagcgagcactgggtggatgatgagggcccccagcccaagaaggtgaaggccgaggatgaggccctgctgtctgaggaggatgaccccatcgaccggcggccctggacccagcagcacctggaggccgctgacatccggaggacccccagcctggccctgaccccaccccaggccgagcaggaggtggatgtgctggatgtgaatgtgcggggcccagatggctgcacccccctgatgctggccagcctgcggggcggcagcagtgacctgagtgatgaagatgaagatgctgaggacagcagcgccaacatcatcacagacctggtgtaccagggcgccagcctgcaggcccagacagacagaactggagagatggccctgcacctggccgcccgctacagcagagcagatgctgccaagaggctgctggatgctggagcagatgccaatgcccaggacaacatgggccgctgccccctgcacgccgctgtggccgcagatgcccagggcgtcttccagatcctgatccggaacagagtgacagacctggatgccaggatgaatgatggcaccacccccctcatcctggccgcccggctggccgtggagggcatggtggccgagctgatcaactgccaggctgatgtgaatgctgtggatgaccacggcaagagcgccctgcactgggccgctgctgtgaacaacgtggaggccaccctgctgctgctgaagaatggagccaacagagacatgcaggacaacaaggaggagacccccctcttcctggccgcccgggagggcagctatgaagctgccaagatcctgctggaccactttgccaacagagacatcacagaccacatggaccggctgcccagagatgtggcccgggacaggatgcaccacgacatcgtgcggctgctggatgagtacaacgtgacccccagccccccaggcaccgtgctgaccagcgccctgagccctgtgatctgtggccccaacagaagcttcctgagcctgaagcacacccccatgggcaagaagagccggcggcccagcgccaagagcaccatgcccaccagcctgcccaacctggccaaggaggccaaggatgccaagggcagcaggaggaagaagagcctgtctgagaaggtgcagctgtctgagagctctgtgaccctgagccctgtggacagcctggagagcccccacacctacgtgtctgacaccaccagcagccccatgatcaccagccctggcatcctgcaggccagccccaaccccatgctggccacagctgcccccccagcccctgtgcacgcccagcacgccctgtccttcagcaacctgcacgagatgcagcccctggcccacggggccagcacagtgctgcccagcgtgtcccagctgctgagccaccaccacatcgtgtccccaggcagcggcagcgctggcagcctgagccggctgcaccctgtgcctgtgcctgctgactggatgaacaggatggaggtgaatgagacccagtacaatgagatgtttggcatggtgctggccccagctgagggcacccaccctggcatcgccccccagagccggcccccagagggcaagcacatcaccaccccccgggagcccctgccccccatcgtgaccttccagctgatccccaagggcagcatcgcccagcctgctggggccccccagccccagagcacctgccccccagctgtggccggccccctgcccaccatgtaccagatccctgagatggcccggctgcccagcgtggccttccccacagccatgatgccccagcaggacggccaggtggcccagaccatcctgcctgcctaccaccccttccctgcctctgtgggcaagtaccccaccccacccagccagcacagctatgccagcagcaatgctgctgagaggacccccagccacagcggccacctgcagggcgagcacccctacctgacccccagccctgagagcccagaccagtggagcagcagcagcccccacagcgccagtgactggagcgatgtgaccaccagccccaccccaggaggagctgggggcggccagaggggccctggcacccacatgtctgagcccccccacaacaacatgcaggtgtatgcctag

SEQ ID NO: 338045 - DNA, 7416 bp, Artificial Sequence
  derived and/or modified sequence
atgcccgccctgcggcccgccctgctgtgggccctgctggccctgtggctctgttgcgcggccccagcccatgctctgcaatgtagagatggttacgaaccttgcgtgaacgagggtatgtgtgtaacttaccataatggcaccggatattgcaaatgtccagagggattcctgggcgagtactgtcagcatagagatccttgtgagaagaaccgatgtcagaacggcgggacatgcgtagcacaagccatgctgggcaaggccacatgcaggtgtgctagcggcttcacgggcgaagattgccagtactctacatcacacccttgctttgtgagtaggccttgtcttaacggtggcacctgtcatatgctctccagggacacctacgaatgcacgtgtcaggtcggtttcacgggaaaagagtgccagtggactgacgcttgtctgagtcatccctgtgctaatggatctacatgcaccaccgtcgcaaatcagttttcctgtaagtgcttgacaggtttcaccggccagaaatgcgaaaccgatgttaatgagtgtgacattccagggcactgtcagcatgggggcacatgtctcaatctaccagggagctatcagtgtcaatgtcctcagggattcacaggccagtattgtgatagcctgtacgtgccatgcgcaccctcaccttgtgtcaacggcggaacatgtcgccagacaggagacttcacatttgaatgcaattgcttacctggtttcgaaggtagcacatgcgagagaaatatagatgactgccctaaccaccggtgtcagaacggcggggtttgcgttgacggcgtgaacacttataactgtaggtgtcccccacagtggaccggccagttctgcactgaagacgtcgacgagtgcttgctgcagcccaatgcctgtcagaacgggggaacttgcgccaatagaaatggcggatacggatgtgtgtgcgtgaacggctggagcggagatgattgtagtgaaaatatcgatgactgcgcgtttgccagttgcacgcccggcagcacatgcattgatcgcgtagcctccttctcctgcatgtgtccagaggggaaggctggcctcctctgtcacctggatgacgcatgcatttcaaatccttgccataagggcgctctgtgtgatactaacccgcttaatgggcagtatatatgtacctgcccacaggggtacaagggagcagactgcacagaagacgtggatgaatgcgccatggccaactccaacccttgtgagcacgccggcaagtgcgtgaacacagacggggccttccattgtgaatgccttaaggggtacgcaggacccaggtgcgagatggacataaatgaatgccattctgatccttgccagaatgacgctacctgcctggacaagattggagggttcacatgtttgtgcatgccaggattcaaaggagtacactgtgagctcgaaatcaacgagtgccagagcaatccatgcgtcaacaacggacagtgtgttgataaagtgaacaggttccaatgtctgtgtccaccggggtttaccggtcctgtttgtcagatagacattgatgattgctcctctaccccatgcctcaatggtgctaagtgcatcgaccacccaaacgggtacgagtgccagtgtgcaaccggatttacaggcgtgctgtgcgaggaaaatatagataattgtgatcccgacccctgtcaccacgggcaatgccaggacggcattgattcctacacctgcatttgcaatcctgggtatatgggagccatatgcagtgatcagatcgacgagtgttatagctcgccatgtctcaacgatgggagatgcattgacttagttaatggttaccagtgcaactgccagcccggcacatccggagtgaactgcgaaattaatttcgacgattgcgctagtaacccttgcatacacggcatctgtatggatggcatcaaccgttactcgtgcgtgtgttctcccggatttacaggtcagcggtgcaatattgacatcgatgagtgtgcttctaacccatgtcgaaagggtgctacatgcatcaacggggtgaacggctttcgttgtatttgtccagaagggcctcatcatccgtcttgctactcacaggtgaatgagtgtttatccaacccctgtattcacggcaactgtacaggggggctgtctggatacaaatgcctgtgcgatgccggctgggtcggcatcaattgtgaggtcgataagaatgaatgtctgagtaatccctgtcagaacgggggtacatgtgataacctcgttaacggttaccgatgcacttgtaaaaaaggatttaaaggttacaattgtcaggtgaatatagacgagtgcgcgtctaatccatgccttaaccagggaacttgttttgacgatatttcagggtatacctgccactgtgtcctgccttatactgggaagaactgtcagaccgttcttgctccatgctcacccaatccatgcgaaaatgccgccgtttgtaaagagtctccaaattttgaaagttatacttgtctgtgtgctccagggtggcaaggacaacgctgcaccattgatattgacgagtgcatttcaaagccttgtatgaatcacgggctgtgtcataatacgcaggggtcttacatgtgtgagtgtcctccaggattttcgggcatggattgcgaggaagacattgatgattgcctggccaacccatgccaaaacggaggctcttgcatggacggcgtcaatacgttcagctgcctttgtttgcccggctttactggcgacaagtgccagaccgacatgaatgagtgtcttagcgagccttgtaaaaacgggggaacctgctctgattacgtcaactcttatacctgcaagtgccaggcaggtttcgatggggtacactgtgagaataacatcaatgagtgcacggagtctagttgttttaacggcggcacttgtgtggacggcatcaactccttctcatgtctctgccccgttggattcacaggatccttttgtttgcacgaaatcaatgaatgttcctcccacccttgtctaaacgagggcacctgcgtcgatggcctgggaacgtatcgttgttcttgcccactggggtacacgggcaagaattgtcagaccctggttaatctgtgctcccgctctccatgtaagaataaaggcacgtgcgtgcagaaaaaagcggaaagccagtgcctttgtccttcaggatgggcaggggcttattgtgacgtacccaacgtgtcctgcgatattgccgctagcagacgaggtgtcttggtggagcacctgtgtcagcattctggcgtctgcataaatgcaggaaacacccactactgccaatgcccactggggtataccggatcgtattgcgaagaacagctggacgaatgtgcaagcaatccttgccagcatggggctacatgtagtgatttcattggaggctaccggtgcgaatgtgttccaggataccagggcgtgaactgtgagtatgaagtagacgagtgccagaatcaaccatgtcagaacgggggcacttgcatcgacctcgtcaatcacttcaagtgtagctgtcctcctggaacacgcggtttgctttgcgaggagaatatagatgactgcgcgagggggcctcactgtttaaatggtggacaatgcatggatagaatcggtggctacagctgtcgctgtctccccggttttgccggggaaaggtgtgaaggcgatattaatgagtgtcttagcaatccatgctcatctgagggttctctggattgtatccagttgacgaacgattatctgtgcgtttgtagaagtgccttcacaggaaggcattgcgaaaccttcgtggacgtgtgcccacaaatgccctgtttgaacgggggcacctgcgcagttgccagcaacatgccagacggctttatctgtcgctgtccaccaggattttccggtgcgcgctgccagagcagctgcggacaggttaagtgcaggaagggagagcagtgcgtgcacactgccagcgggcctcgatgcttctgtccaagccccagggactgcgagtcaggttgtgcctcctctccttgtcagcacggcggtagctgccaccctcagcggcagccgccatactactcgtgccagtgcgcacctccattcagcggatcacgatgcgaactctataccgcgcctccctctacaccccccgctacctgtctgtcacaatactgcgctgataaagccagggacggagtttgtgatgaagcgtgtaactcgcatgcatgtcagtgggacggtggtgattgctcccttacgatggagaacccttgggcaaattgtagctcccccttaccctgctgggactacattaataaccagtgtgacgagctgtgcaacactgtggagtgtctctttgacaactttgaatgccagggtaattccaagacttgtaaatacgacaagtactgtgcagatcacttcaaagataaccactgtgatcagggatgcaatagtgaggagtgcgggtgggatgggcttgactgcgccgccgatcagccagagaatctggcggagggaaccctggtgattgtcgtattgatgcctccagaacaactgctccaagatgcccggtcatttttgagagccctgggtacactacttcacaccaacctgcgaatcaaaagggacagccaaggggagctgatggtatatccatactatggagagaaatctgctgcgatgaagaagcagaggatgacacggcggtccctgcctggcgagcaagagcaagaggtcgcaggttctaaagtgttcctggaaatcgacaatcgacaatgcgtccaagatagtgatcattgttttaaaaacacagacgctgccgccgcactgttggctagccatgccatccagggcacgctgagttacccattggtgagtgtggtctcggaatccttgactcccgagcggacccagttactgtacctgttagcagttgcagtggtgattatactcttcatcattcttctgggagtgatcatggctaagaggaagagaaagcatggctctctctggttgccggaaggattcacactccgccgcgacgctagcaatcacaaaaggagagagccagttgggcaggatgctgtcgggttaaagaacctgtccgttcaggtctctgaggccaatcttatcggaaccggtacttccgaacactgggtcgacgatgaaggtccacagccaaagaaagtgaaggccgaggatgaggccctactttctgaggaggacgatcccatagatagacggccatggacacaacagcacttggaggcagctgacatccgcaggacccctagcctagcactgacaccaccacaggcagagcaggaagtcgatgttctggatgtgaatgttaggggaccggacgggtgtacccctttaatgctggctagcctacgaggggggtcctctgatttatccgacgaagatgaagatgccgaggactcctctgctaatatcatcacagacctcgtgtatcagggggcctcactgcaggcccagacggatcggactggcgagatggcattgcatctggccgcccggtactcccgggcagacgccgcaaagagattgttggatgcgggcgctgacgcgaacgcgcaggataacatggggcgatgccccctgcacgccgccgttgctgccgacgctcagggagtatttcagatcctgatccggaaccgcgtaacagacctcgacgctaggatgaacgatggaaccacccctctgattctcgccgccagattagcagtagagggcatggtcgctgagctgatcaattgccaggcggatgtgaacgctgtcgacgaccacggcaaatccgcattgcattgggctgctgcagtcaacaatgttgaagctacgctcctgttactcaagaatggcgcaaatcgcgatatgcaggataacaaggaagaaactcctctcttcctcgctgctcgggagggttcctatgaggcagccaagattctgctggatcattttgccaatcgggacattaccgatcacatggacagacttccacgggacgttgctagagaccggatgcaccacgacatcgtgagattactagacgagtacaatgttacaccctctcctccaggtacagttctaacaagcgcccttagtccagtgatttgtgggcctaacaggtcatttttgtctttgaagcacacccccatgggtaagaagtctcgcagaccttcagctaaaagcacaatgcccacttcactgcctaatctagcaaaagaggctaaggacgcaaaagggtctcggaggaagaaaagtctgtcggaaaaagtgcagttgagcgaatccagcgtaacactctcccctgtagatagccttgaaagtccccatacctatgtgtcggatacaactagctcccccatgattacatcaccaggcatactgcaggcctcccccaatccaatgctagcaaccgccgctcccccggccccagtgcatgcccagcatgctctgtcctttagtaatttacacgagatgcagcctctggcacacggagcctctactgtgcttcctagcgtcagccagctattatcacatcaccacatcgttagtcccggctctggctctgctgggtctctatctaggctccatcctgtccccgttcctgcggattggatgaaccggatggaagtgaacgagacccagtataacgagatgtttggaatggtgttagcccctgcagagggtactcatcctggcatcgcgccacagtctaggccgcccgaaggcaagcacatcaccacccctagagaacctctcccacccatagtgacctttcaactcattccaaaggggtcgatcgcccaacctgccggagccccccagccccagtccacctgtccgcccgccgtggccgggccattgcctaccatgtaccagataccggagatggcccggctgccatccgtggctttccccactgccatgatgcctcaacaggacggacaggtggcccagacaattcttccagcttatcacccgtttccagcttctgttgggaaatacccaacccctccaagtcaacactcatatgcctccagtaacgccgcagaaagaacccctagccacagcgggcacctgcaaggtgaacatccatatcttacaccatcaccggagagcccggatcagtggtcttcttcatcaccacacagcgcatcggactggtcagacgttaccacatcaccaacaccagggggggctgggggcggccaacgcggacctggcacgcacatgtccgaacctccacacaacaacatgcaggtgtacgcctag

SEQ ID NO: 338046 - DNA, 11389 bp, Artificial Sequence
  derived and/or modified sequence
aaacttcgggcggcggctgaggcggcggccgaggagcggcggactcggggcgcggggagtcgaggcatttgcgcctgggcttcggagcgtagcgccagggcctgagcctttgaagcaggaggaggggaggagagagtggggctcctctatcgggaccccctccccatgtggatctgcccaggcggcggcggcggcggcggaggaggaggcgaccgagaagatgcccgccctgcgccccgctctgctgtgggcgctgctggcgctctggctgtgctgcgcggcccccgcgcatgcattgcagtgtcgagatggctatgaaccctgtgtaaatgaaggaatgtgtgttacctaccacaatggcacaggatactgcaaatgtccagaaggcttcttgggggaatattgtcaacatcgagacccctgtgagaagaaccgctgccagaatggtgggacttgtgtggcccaggccatgctggggaaagccacgtgccgatgtgcctcagggtttacaggagaggactgccagtactcaacatctcatccatgctttgtgtctcgaccctgcctgaatggcggcacatgccatatgctcagccgggatacctatgagtgcacctgtcaagtcgggtttacaggtaaggagtgccaatggacggatgcctgcctgtctcatccctgtgcaaatggaagtacctgtaccactgtggccaaccagttctcctgcaaatgcctcacaggcttcacagggcagaaatgtgagactgatgtcaatgagtgtgacattccaggacactgccagcatggtggcacctgcctcaacctgcctggttcctaccagtgccagtgccctcagggcttcacaggccagtactgtgacagcctgtatgtgccctgtgcaccctcaccttgtgtcaatggaggcacctgtcggcagactggtgacttcacttttgagtgcaactgccttccaggttttgaagggagcacctgtgagaggaatattgatgactgccctaaccacaggtgtcagaatggaggggtttgtgtggatggggtcaacacttacaactgccgctgtcccccacaatggacaggacagttctgcacagaggatgtggatgaatgcctgctgcagcccaatgcctgtcaaaatgggggcacctgtgccaaccgcaatggaggctatggctgtgtatgtgtcaacggctggagtggagatgactgcagtgagaacattgatgattgtgccttcgcctcctgtactccaggctccacctgcatcgaccgtgtggcctccttctcttgcatgtgcccagaggggaaggcaggtctcctgtgtcatctggatgatgcatgcatcagcaatccttgccacaagggggcactgtgtgacaccaaccccctaaatgggcaatatatttgcacctgcccacaaggctacaaaggggctgactgcacagaagatgtggatgaatgtgccatggccaatagcaatccttgtgagcatgcaggaaaatgtgtgaacacggatggcgccttccactgtgagtgtctgaagggttatgcaggacctcgttgtgagatggacatcaatgagtgccattcagacccctgccagaatgatgctacctgtctggataagattggaggcttcacatgtctgtgcatgccaggtttcaaaggtgtgcattgtgaattagaaataaatgaatgtcagagcaacccttgtgtgaacaatgggcagtgtgtggataaagtcaatcgtttccagtgcctgtgtcctcctggtttcactgggccagtttgccagattgatattgatgactgttccagtactccgtgtctgaatggggcaaagtgtatcgatcacccgaatggctatgaatgccagtgtgccacaggtttcactggtgtgttgtgtgaggagaacattgacaactgtgaccccgatccttgccaccatggtcagtgtcaggatggtattgattcctacacctgcatctgcaatcccgggtacatgggcgccatctgcagtgaccagattgatgaatgttacagcagcccttgcctgaacgatggtcgctgcattgacctggtcaatggctaccagtgcaactgccagccaggcacgtcaggggttaattgtgaaattaattttgatgactgtgcaagtaacccttgtatccatggaatctgtatggatggcattaatcgctacagttgtgtctgctcaccaggattcacagggcagagatgtaacattgacattgatgagtgtgcctccaatccctgtcgcaagggtgcaacatgtatcaacggtgtgaatggtttccgctgtatatgccccgagggaccccatcaccccagctgctactcacaggtgaacgaatgcctgagcaatccctgcatccatggaaactgtactggaggtctcagtggatataagtgtctctgtgatgcaggctgggttggcatcaactgtgaagtggacaaaaatgaatgcctttcgaatccatgccagaatggaggaacttgtgacaatctggtgaatggatacaggtgtacttgcaagaagggctttaaaggctataactgccaggtgaatattgatgaatgtgcctcaaatccatgcctgaaccaaggaacctgctttgatgacataagtggctacacttgccactgtgtgctgccatacacaggcaagaattgtcagacagtattggctccctgttccccaaacccttgtgagaatgctgctgtttgcaaagagtcaccaaattttgagagttatacttgcttgtgtgctcctggctggcaaggtcagcggtgtaccattgacattgacgagtgtatctccaagccctgcatgaaccatggtctctgccataacacccagggcagctacatgtgtgaatgtccaccaggcttcagtggtatggactgtgaggaggacattgatgactgccttgccaatccttgccagaatggaggttcctgtatggatggagtgaatactttctcctgcctctgccttccgggtttcactggggataagtgccagacagacatgaatgagtgtctgagtgaaccctgtaagaatggagggacctgctctgactacgtcaacagttacacttgcaagtgccaggcaggatttgatggagtccattgtgagaacaacatcaatgagtgcactgagagctcctgtttcaatggtggcacatgtgttgatgggattaactccttctcttgcttgtgccctgtgggtttcactggatccttctgcctccatgagatcaatgaatgcagctctcatccatgcctgaatgagggaacgtgtgttgatggcctgggtacctaccgctgcagctgccccctgggctacactgggaaaaactgtcagaccctggtgaatctctgcagtcggtctccatgtaaaaacaaaggtacttgcgttcagaaaaaagcagagtcccagtgcctatgtccatctggatgggctggtgcctattgtgacgtgcccaatgtctcttgtgacatagcagcctccaggagaggtgtgcttgttgaacacttgtgccagcactcaggtgtctgcatcaatgctggcaacacgcattactgtcagtgccccctgggctatactgggagctactgtgaggagcaactcgatgagtgtgcgtccaacccctgccagcacggggcaacatgcagtgacttcattggtggatacagatgcgagtgtgtcccaggctatcagggtgtcaactgtgagtatgaagtggatgagtgccagaatcagccctgccagaatggaggcacctgtattgaccttgtgaaccatttcaagtgctcttgcccaccaggcactcggggcctactctgtgaagagaacattgatgactgtgcccggggtccccattgccttaatggtggtcagtgcatggataggattggaggctacagttgtcgctgcttgcctggctttgctggggagcgttgtgagggagacatcaacgagtgcctctccaacccctgcagctctgagggcagcctggactgtatacagctcaccaatgactacctgtgtgtttgccgtagtgcctttactggccggcactgtgaaaccttcgtcgatgtgtgtccccagatgccctgcctgaatggagggacttgtgctgtggccagtaacatgcctgatggtttcatttgccgttgtcccccgggattttccggggcaaggtgccagagcagctgtggacaagtgaaatgtaggaagggggagcagtgtgtgcacaccgcctctggaccccgctgcttctgccccagtccccgggactgcgagtcaggctgtgccagtagcccctgccagcacgggggcagctgccaccctcagcgccagcctccttattactcctgccagtgtgccccaccattctcgggtagccgctgtgaactctacacggcaccccccagcacccctcctgccacctgtctgagccagtattgtgccgacaaagctcgggatggcgtctgtgatgaggcctgcaacagccatgcctgccagtgggatgggggtgactgttctctcaccatggagaacccctgggccaactgctcctccccacttccctgctgggattatatcaacaaccagtgtgatgagctgtgcaacacggtcgagtgcctgtttgacaactttgaatgccaggggaacagcaagacatgcaagtatgacaaatactgtgcagaccacttcaaagacaaccactgtgaccaggggtgcaacagtgaggagtgtggttgggatgggctggactgtgctgctgaccaacctgagaacctggcagaaggtaccctggttattgtggtattgatgccacctgaacaactgctccaggatgctcgcagcttcttgcgggcactgggtaccctgctccacaccaacctgcgcattaagcgggactcccagggggaactcatggtgtacccctattatggtgagaagtcagctgctatgaagaaacagaggatgacacgcagatcccttcctggtgaacaagaacaggaggtggctggctctaaagtctttctggaaattgacaaccgccagtgtgttcaagactcagaccactgcttcaagaacacggatgcagcagcagctctcctggcctctcacgccatacaggggaccctgtcataccctcttgtgtctgtcgtcagtgaatccctgactccagaacgcactcagctcctctatctccttgctgttgctgttgtcatcattctgtttattattctgctgggggtaatcatggcaaaacgaaagcgtaagcatggctctctctggctgcctgaaggtttcactcttcgccgagatgcaagcaatcacaagcgtcgtgagccagtgggacaggatgctgtggggctgaaaaatctctcagtgcaagtctcagaagctaacctaattggtactggaacaagtgaacactgggtcgatgatgaagggccccagccaaagaaagtaaaggctgaagatgaggccttactctcagaagaagatgaccccattgatcgacggccatggacacagcagcaccttgaagctgcagacatccgtaggacaccatcgctggctctcacccctcctcaggcagagcaggaggtggatgtgttagatgtgaatgtccgtggcccagatggctgcaccccattgatgttggcttctctccgaggaggcagctcagatttgagtgatgaagatgaagatgcagaggactcttctgctaacatcatcacagacttggtctaccagggtgccagcctccaggcccagacagaccggactggtgagatggccctgcaccttgcagcccgctactcacgggctgatgctgccaagcgtctcctggatgcaggtgcagatgccaatgcccaggacaacatgggccgctgtccactccatgctgcagtggcagctgatgcccaaggtgtcttccagattctgattcgcaaccgagtaactgatctagatgccaggatgaatgatggtactacacccctgatcctggctgcccgcctggctgtggagggaatggtggcagaactgatcaactgccaagcggatgtgaatgcagtggatgaccatggaaaatctgctcttcactgggcagctgctgtcaataatgtggaggcaactcttttgttgttgaaaaatggggccaaccgagacatgcaggacaacaaggaagagacacctctgtttcttgctgcccgggaggggagctatgaagcagccaagatcctgttagaccattttgccaatcgagacatcacagaccatatggatcgtcttccccgggatgtggctcgggatcgcatgcaccatgacattgtgcgccttctggatgaatacaatgtgaccccaagccctccaggcaccgtgttgacttctgctctctcacctgtcatctgtgggcccaacagatctttcctcagcctgaagcacaccccaatgggcaagaagtctagacggcccagtgccaagagtaccatgcctactagcctccctaaccttgccaaggaggcaaaggatgccaagggtagtaggaggaagaagtctctgagtgagaaggtccaactgtctgagagttcagtaactttatcccctgttgattccctagaatctcctcacacgtatgtttccgacaccacatcctctccaatgattacatcccctgggatcttacaggcctcacccaaccctatgttggccactgccgcccctcctgccccagtccatgcccagcatgcactatctttttctaaccttcatgaaatgcagcctttggcacatggggccagcactgtgcttccctcagtgagccagttgctatcccaccaccacattgtgtctccaggcagtggcagtgctggaagcttgagtaggctccatccagtcccagtcccagcagattggatgaaccgcatggaggtgaatgagacccagtacaatgagatgtttggtatggtcctggctccagctgagggcacccatcctggcatagctccccagagcaggccacctgaagggaagcacataaccacccctcgggagcccttgccccccattgtgactttccagctcatccctaaaggcagtattgcccaaccagcgggggctccccagcctcagtccacctgccctccagctgttgcgggccccctgcccaccatgtaccagattccagaaatggcccgtttgcccagtgtggctttccccactgccatgatgccccagcaggacgggcaggtagctcagaccattctcccagcctatcatcctttcccagcctctgtgggcaagtaccccacacccccttcacagcacagttatgcttcctcaaatgctgctgagcgaacacccagtcacagtggtcacctccagggtgagcatccctacctgacaccatccccagagtctcctgaccagtggtcaagttcatcaccccactctgcttctgactggtcagatgtgaccaccagccctacccctgggggtgctggaggaggtcagcggggacctgggacacacatgtctgagccaccacacaacaacatgcaggtttatgcgtgagagagtccacctccagtgtagagacataactgacttttgtaaatgctgctgaggaacaaatgaaggtcatccgggagagaaatgaagaaatctctggagccagcttctagaggtaggaaagagaagatgttcttattcagataatgcaagagaagcaattcgtcagtttcactgggtatctgcaaggcttattgattattctaatctaataagacaagtttgtggaaatgcaagatgaatacaagccttgggtccatgtttactctcttctatttggagaataagatggatgcttattgaagcccagacattcttgcagcttggactgcattttaagccctgcaggcttctgccatatccatgagaagattctacactagcgtcctgttgggaattatgccctggaattctgcctgaattgacctacgcatctcctcctccttggacattcttttgtcttcatttggtgcttttggttttgcacctctccgtgattgtagccctaccagcatgttatagggcaagacctttgtgcttttgatcattctggcccatgaaagcaactttggtctcctttcccctcctgtcttcccggtatcccttggagtctcacaaggtttactttggtatggttctcagcacaaacctttcaagtatgttgtttctttggaaaatggacatactgtattgtgttctcctgcatatatcattcctggagagagaaggggagaagaatacttttcttcaacaaattttgggggcaggagatcccttcaagaggctgcaccttaatttttcttgtctgtgtgcaggtcttcatataaactttaccaggaagaagggtgtgagtttgttgtttttctgtgtatgggcctggtcagtgtaaagttttatccttgatagtctagttactatgaccctccccacttttttaaaaccagaaaaaggtttggaatgttggaatgaccaagagacaagttaactcgtgcaagagccagttacccacccacaggtccccctacttcctgccaagcattccattgactgcctgtatggaacacatttgtcccagatctgagcattctaggcctgtttcactcactcacccagcatatgaaactagtcttaactgttgagcctttcctttcatatccacagaagacactgtctcaaatgttgtacccttgccatttaggactgaactttccttagcccaagggacccagtgacagttgtcttccgtttgtcagatgatcagtctctactgattatcttgctgcttaaaggcctgctcaccaatctttctttcacaccgtgtggtccgtgttactggtatacccagtatgttctcactgaagacatggactttatatgttcaagtgcaggaattggaaagttggacttgttttctatgatccaaaacagccctataagaaggttggaaaaggaggaactatatagcagcctttgctattttctgctaccatttcttttcctctgaagcggccatgacattccctttggcaactaacgtagaaactcaacagaacattttcctttcctagagtcaccttttagatgataatggacaactatagacttgctcattgttcagactgattgcccctcacctgaatccactctctgtattcatgctcttggcaatttctttgactttcttttaagggcagaagcattttagttaattgtagataaagaatagttttcttcctcttctccttgggccagttaataattggtccatggctacactgcaacttccgtccagtgctgtgatgcccatgacacctgcaaaataagttctgcctgggcattttgtagatattaacaggtgaattcccgactcttttggtttgaatgacagttctcattccttctatggctgcaagtatgcatcagtgcttcccacttacctgatttgtctgtcggtggccccatatggaaaccctgcgtgtctgttggcataatagtttacaaatggttttttcagtcctatccaaatttattgaaccaacaaaaataattacttctgccctgagataagcagattaagtttgttcattctctgctttattctctccatgtggcaacattctgtcagcctctttcatagtgtgcaaacattttatcattctaaatggtgactctctgcccttggacccatttattattcacagatggggagaacctatctgcatggacctctgtggaccacagcgtacctgcccctttctgccctcctgctccagccccacttctgaaagtatcagctactgatccagccactggatattttatatcctcccttttccttaagcacaatgtcagaccaaattgcttgtttctttttcttggactactttaatttggatcctttgggtttggagaaagggaatgtgaaagctgtcattacagacaacaggtttcagtgatgaggaggacaacactgcctttcaaactttttactgatctcttagattttaagaactcttgaattgtgtggtatctaataaaagggaaggtaagatggataatcactttctcatttgggttctgaattggagactcagtttttatgagacacatcttttatgccatgtatagatcctcccctgctatttttggtttatttttattgttataaatgctttctttctttgactcctcttctgcctgcctttggggataggtttttttgtttgtttatttgcttcctctgttttgttttaagcatcattttcttatgtgaggtggggaagggaaaggtatgagggaaagagagtctgagaattaaaatattttagtataagcaattggctgtgatgctcaaatccattgcatcctcttattgaatttgccaatttgtaatttttgcataataaagaaccaaaggtgtaatgttttgttgagaggtggtttagggattttggccctaaccaatacattgaatgtatgatgactatttgggaggacacatttatgtacccagaggcccccactaataagtggtactatggttacttccttgtgtacatttctcttaaaagtgatattatatctgtttgtatgagaaacccagtaaccaataaaatgaccgcatattcctgactaaacgtagtaaggaaaatgcacactttgtttttacttttccgtttcattctaaaggtagttaagatgaaatttatatgaaagcatttttatcacaaaataaaaaaggtttgccaagctcagtggtgttgtattttttattttccaatactgcatccatggcctggcagtgttacctcatgatgtcataatttgctgagagagcaaattttcttttctttctgaatcccacaaagcctagcaccaaacttctttttttcttcctttaattagatcataaataaatgatcctggggaaaaagcatctgtcaaataggaaacatcacaaaactgagcactcttctgtgcactagccatagctggtgacaaacagatggttgctcagggacaaggtgccttccaatggaaatgcgaagtagttgctatagcaagaattgggaactgggatataagtcataatattaattatgctgttatgtaaatgattggtttgtaacattccttaagtgaaatttgtgtagaacttaatatacaggattataaaataatattttgtgtataaatttgttataagttcacattcatacatttatttataaagtcagtgagatatttgaacatgaa

SEQ ID NO: 338047 - DNA, 7416 bp, Artificial Sequence
  derived and/or modified sequence
atgcccgctctgaggcccgcacttctgtgggccctgttggcactctggctttgctgtgctgccccagcgcacgccctgcagtgtcgagacggatatgaaccctgtgttaatgagggcatgtgcgtgacataccataacggcacagggtactgcaaatgcccggaaggattcctgggcgaatactgccaacatagggatccgtgcgaaaagaacaggtgccagaatggtgggacgtgtgtcgcacaagccatgttggggaaggccacatgccgctgcgcttccggttttaccggagaggactgccagtattctacttcccatccctgctttgtatctagaccctgtctgaacggtggtacttgtcacatgctctctagagacacgtatgaatgcacttgccaggtcggctttacaggaaaggaatgccaatggactgatgcatgtctgagtcacccctgcgcgaatggcagtacttgcacaactgtagcaaatcagtttagttgcaaatgtctcaccggttttacagggcagaaatgtgaaaccgacgtcaatgagtgcgatatcccaggtcattgccagcacggcggaacatgcttaaacctgccagggtcttaccagtgccaatgcccacagggtttcaccggacaatattgtgactcattgtatgttccttgtgcaccaagtccctgcgttaacgggggtacctgccggcaaaccggtgactttacctttgaatgtaactgcctgcccggatttgagggctctacatgtgagcggaatattgacgattgccccaatcaccgctgccaaaatggcggtgtgtgcgtagacggcgtcaacacttacaattgtcgatgtccccctcagtggaccggacagttttgcacggaggacgtcgacgagtgtttgttacaacctaacgcttgccagaatgggggaacttgcgctaataggaacggagggtacggctgtgtttgcgtcaatggttggtctggagacgactgttctgaaaatatcgatgattgcgcatttgccagctgcacacccggaagcacttgtatagatcgcgtagcttctttctcgtgtatgtgtccagagggcaaggcgggattactctgccatctcgacgatgcttgtatctccaacccgtgccacaaaggggctctttgtgataccaatcctttgaatgggcagtacatctgtacctgtccacagggctataaaggagccgactgcactgaagacgtggatgagtgtgcaatggccaactccaatccctgtgagcacgccggaaaatgcgtcaatacagatggagcattccactgcgagtgcctgaaaggttatgccggtccccgttgtgaaatggacataaacgaatgccactcagatccctgtcaaaacgatgcaacttgtctagataagatcggcggattcacttgcctctgcatgcctgggtttaaaggtgtccactgcgagcttgagataaatgaatgccagtctaacccttgcgttaataacgggcaatgcgtggacaaagttaatagattccagtgcctgtgtccgcctggcttcactggacctgtatgtcagatcgacattgatgactgttcatctacaccgtgcttaaatggagccaagtgtatagaccatcccaacggctacgagtgtcagtgcgcgacagggtttacaggggtgctctgcgaggagaacattgacaattgtgatcccgacccatgtcaccacgggcagtgtcaggacggtattgactcatacacatgcatctgtaaccctgggtacatgggtgcgatctgtagtgatcagatagacgagtgctacagcagcccctgtctaaacgacggcagatgcattgatctagtaaacggctatcaatgcaactgtcagcctggaacctcaggtgtcaattgcgaaatcaactttgacgattgtgcttcgaacccttgcatccatggcatttgtatggacggcataaatcgctactcatgcgtatgctctccagggtttacgggccaacgctgcaacattgacatagacgagtgtgcaagcaacccctgtcggaaaggtgcgacctgcattaatggcgtcaatggctttagatgtatatgccccgagggcccacaccatcccagttgctatagtcaggtgaatgaatgcctctctaacccatgtattcacggcaactgtactgggggtctgagcggctacaaatgtttatgcgacgctggatgggttgggatcaactgcgaagttgacaagaacgaatgcctgtccaacccctgtcagaacgggggtacttgcgacaatctcgttaatggatatcgctgcacctgcaagaaagggttcaaggggtacaactgtcaagtcaacatagatgagtgcgcatctaatccatgtctcaaccaggggacttgcttcgacgacatctccggctacacttgtcattgcgtcctgccttacacaggaaaaaattgccaaacggtcctggccccatgctctcctaacccatgtgaaaatgccgcagtctgcaaggaatctcctaactttgaaagttatacatgcttatgcgcacctggctggcagggacagcggtgtaccattgacatcgacgaatgtattagtaaaccatgcatgaatcatggcctgtgccacaatactcagggaagctacatgtgtgaatgcccccctggtttttctggcatggactgtgaagaggacatcgatgactgcctcgctaatccctgccagaatgggggatcctgcatggacggcgttaatactttctcttgtctgtgcctgcccggattcaccggcgacaaatgccagaccgatatgaatgagtgcctgagcgagccttgcaagaacggcggaacctgtagtgattacgtaaactcatacacctgcaaatgccaggctgggtttgacggcgtgcactgtgagaacaacattaatgagtgtactgaatcatcatgcttcaacggtggaacatgtgtggatggcattaactccttcagctgcctgtgtcctgtgggattcacaggatcattctgcctgcatgaaattaacgagtgctctagccacccctgtctgaatgagggcacctgtgtcgacgggctggggacttaccggtgttcttgtccattaggatatactgggaaaaattgccagacgctggttaacctctgtagcagatccccctgtaagaataaaggaacttgcgtccaaaagaaggccgagtcccagtgcctgtgcccgagcgggtgggcaggggcatattgcgatgtgccgaatgtgagctgcgacatagctgcctccaggaggggcgtcctggtcgagcacctgtgtcaacactcgggcgtttgtatcaacgctggaaatacccactattgccagtgtcctttgggatatacaggcagctattgcgaggaacagctcgacgagtgtgcttccaatccttgtcagcacggtgctacctgctcggatttcattgggggataccggtgcgagtgcgtgcccggttatcagggtgtcaactgcgagtacgaggtcgacgaatgccagaaccagccttgtcaaaatggcggtacctgcattgacctggtgaatcactttaagtgttcctgccccccaggtactagggggctcctatgcgaagaaaacatcgacgactgcgccaggggcccacactgtctgaatggaggccagtgcatggaccgcatcggcggatattcctgccggtgcctccctggcttcgccggagaacgttgcgaaggagatataaacgagtgcctgagcaacccctgctcatccgaaggcagcctcgattgtatccagttgactaatgactacctttgcgtgtgcagatccgcatttacagggagacattgcgaaacattcgtggatgtgtgccctcagatgccttgcctgaacggagggacttgcgctgtggcatccaatatgcctgatggtttcatctgcagatgccctccaggatttagcggcgcacgctgtcaaagctcatgtggccaggtgaagtgcaggaagggggaacaatgcgtgcataccgctagcggcccacgatgtttttgcccttcaccaagggattgtgagtcaggttgcgcctccagcccatgtcagcatggcggttcctgccatcctcaacggcagccgccttactattcttgtcagtgtgcccctccgttttcaggatccaggtgtgagctctatacagcgccaccaagtactcctccggctacatgcctgagccaatattgcgcagacaaggccagagacggagtctgtgatgaggcctgcaattcgcatgcatgccagtgggatggtggagattgtagtcttaccatggagaacccttgggcaaactgtagcagcccgctgccgtgctgggactatatcaacaatcagtgcgacgagctgtgtaacaccgtcgaatgcctgtttgacaattttgagtgtcaggggaatagcaagacctgcaaatatgacaaatactgtgccgaccatttcaaagacaaccattgtgaccagggttgtaatagcgaggaatgtggttgggatgggctggattgtgccgctgaccaaccagaaaacctggccgagggcactctggttattgttgttctgatgccgcctgaacagctcctgcaggacgctcggtcatttctgagggctctcggaacgttgcttcacaccaacttacgcatcaagagagactctcagggggaactgatggtgtatccatactacggagaaaagagtgctgccatgaagaagcagcgaatgaccaggaggtctctccctggagagcaggaacaggaggtagctggaagcaaagtatttctcgaaatcgacaacaggcaatgtgtccaggacagcgatcactgttttaagaatactgacgcagcagctgcacttctcgcgtctcatgctattcaagggacactgtcttaccctcttgtctcggtagtctcagaatccctaacacctgaaagaacccagctcctttacctgctcgcagtggcagttgtgattattctgttcattatcctgttgggggtcatcatggcaaaacgcaagcggaagcacggaagcttgtggctgcccgagggattcactctccgccgtgacgcctctaaccacaagcgcagggaacccgtcgggcaagacgccgtgggcctgaaaaacctgtccgtccaggtgtccgaggcaaaccttattgggactggcacttctgaacactgggtagatgacgaggggcctcagcccaaaaaagtgaaggctgaagacgaggccctgttgtctgaagaggatgaccccatcgaccgacgtccatggactcagcaacacctggaagcagccgacattaggcgaacgccctctttagctttgacccctccccaagccgaacaggaagtggacgtgctggatgtcaacgtgaggggccctgacggatgcacaccattgatgctggccagtctccgaggcggatccagtgatctgtccgacgaggatgaagacgccgaagactccagtgcaaatataataacagatctggtctaccagggtgccagcctgcaggcacaaaccgaccgcacaggagagatggccctgcaccttgccgctagatattcccgggcagacgccgctaaacggttgctcgacgctggggcagatgccaacgcacaagacaatatgggaagatgtccactacacgccgctgtggctgctgacgcccagggcgttttccagatcctcatccgtaatagagtgacggacctggacgcaagaatgaatgatggtaccacaccacttatcctcgccgctcggttagccgttgaaggaatggtcgcagagctgatcaactgccaggccgatgtcaacgccgtcgacgatcatggcaagtctgctctgcattgggccgctgccgtcaacaacgtggaagccaccttattgctgctcaagaatggggcaaatagggacatgcaagataataaggaagaaacacctctcttcctcgctgctcgtgagggatcctatgaagccgctaagatattgctggaccacttcgcgaaccgggatattacagaccacatggacaggctgcccagggatgtagccagagacaggatgcatcacgacatcgtgcgactgttggacgaatacaacgtcaccccgtctccccctggcaccgtgctgacgagcgccctgtctcctgtgatatgtggcccaaaccgtagcttcctgtcactcaaacacacccctatgggaaaaaagtctcggcgaccctcagcaaaatctactatgcccacctccttaccaaatctcgctaaggaagccaaagatgcaaaggggtctcgtagaaagaaatccctttccgaaaaggtccaactgtctgagtcctcggttaccttatcccccgttgatagcttagaaagcccccacacatacgtgagcgatactaccagctcacccatgatcactagcccaggaatattgcaggcttcacctaaccctatgttggctactgccgctcctccagccccagttcacgcgcagcatgcgctgagcttcagcaatcttcacgaaatgcaaccactcgctcatggggcaagcaccgtgctgcctagtgtgtcccaactgctgtcacaccaccatatcgtgtctcctgggtccggatctgctggtagtctgtcccgcctccacccagtgcccgtgccagccgattggatgaataggatggaagtcaacgaaactcagtacaacgaaatgttcggcatggtgctcgcccctgccgagggtacccacccaggcatcgcaccgcagtctaggcctcccgagggtaagcatattactacacctcgagagcctcttccacccattgtgaccttccaattgatccctaaaggttccattgcgcaacccgcaggcgctccccagccccaatctacgtgcccccctgccgttgcaggacctttacccaccatgtatcagattcctgaaatggccaggctcccttccgtagcctttcctactgctatgatgccccaacaggacggtcaggtcgcacaaaccattctacccgcataccaccccttcccagcctcagtggggaaatacccaactccaccatcccaacacagctacgcctcctccaatgcggctgagcggactcctagccacagtggacatctccagggtgagcacccttacttaactccttcccccgagtcaccagatcagtggagttccagctctccccattccgcatcggactggtctgacgtgacaaccagccctacccccggtggagccggaggtggccagcgaggtccgggaactcacatgagcgaaccccctcataataatatgcaggtttatgcatac

SEQ ID NO: 338048 - DNA, 7416 bp, Artificial Sequence
  derived and/or modified sequence
atgcccgccctgagacccgccctgctgtgggccctgctggccctgtggctgtgctgcgccgcccccgcccacgccctgcagtgcagagacggctacgagccctgcgtgaacgagggcatgtgcgtgacctaccacaacggcaccggctactgcaagtgccccgagggcttcctgggcgagtactgccagcacagagacccctgcgagaagaacagatgccagaacggcggcacctgcgtggcccaggccatgctgggcaaggccacctgcagatgcgccagcggcttcaccggcgaggactgccagtacagcaccagccacccctgcttcgtgagcagaccctgcctgaacggcggcacctgccacatgctgagcagagacacctacgagtgcacctgccaggtgggcttcaccggcaaggagtgccagtggaccgacgcctgcctgagccacccctgcgccaacggcagcacctgcaccaccgtggccaaccagttcagctgcaagtgcctgaccggcttcaccggccagaagtgcgagaccgacgtgaacgagtgcgacatccccggccactgccagcacggcggcacctgcctgaacctgcccggcagctaccagtgccagtgcccccagggcttcaccggccagtactgcgacagcctgtacgtgccctgcgcccccagcccctgcgtgaacggcggcacctgcagacagaccggcgacttcaccttcgagtgcaactgcctgcccggcttcgagggcagcacctgcgagagaaacatcgacgactgccccaaccacagatgccagaacggcggcgtgtgcgtggacggcgtgaacacctacaactgcagatgccccccccagtggaccggccagttctgcaccgaggacgtggacgagtgcctgctgcagcccaacgcctgccagaacggcggcacctgcgccaacagaaacggcggctacggctgcgtgtgcgtgaacggctggagcggcgacgactgcagcgagaacatcgacgactgcgccttcgccagctgcacccccggcagcacctgcatcgacagagtggccagcttcagctgcatgtgccccgagggcaaggccggcctgctgtgccacctggacgacgcctgcatcagcaacccctgccacaagggcgccctgtgcgacaccaaccccctgaacggccagtacatctgcacctgcccccagggctacaagggcgccgactgcaccgaggacgtggacgagtgcgccatggccaacagcaacccctgcgagcacgccggcaagtgcgtgaacaccgacggcgccttccactgcgagtgcctgaagggctacgccggccccagatgcgagatggacatcaacgagtgccacagcgacccctgccagaacgacgccacctgcctggacaagatcggcggcttcacctgcctgtgcatgcccggcttcaagggcgtgcactgcgagctggagatcaacgagtgccagagcaacccctgcgtgaacaacggccagtgcgtggacaaggtgaacagattccagtgcctgtgcccccccggcttcaccggccccgtgtgccagatcgacatcgacgactgcagcagcaccccctgcctgaacggcgccaagtgcatcgaccaccccaacggctacgagtgccagtgcgccaccggcttcaccggcgtgctgtgcgaggagaacatcgacaactgcgaccccgacccctgccaccacggccagtgccaggacggcatcgacagctacacctgcatctgcaaccccggctacatgggcgccatctgcagcgaccagatcgacgagtgctacagcagcccctgcctgaacgacggcagatgcatcgacctggtgaacggctaccagtgcaactgccagcccggcaccagcggcgtgaactgcgagatcaacttcgacgactgcgccagcaacccctgcatccacggcatctgcatggacggcatcaacagatacagctgcgtgtgcagccccggcttcaccggccagagatgcaacatcgacatcgacgagtgcgccagcaacccctgcagaaagggcgccacctgcatcaacggcgtgaacggcttcagatgcatctgccccgagggcccccaccaccccagctgctacagccaggtgaacgagtgcctgagcaacccctgcatccacggcaactgcaccggcggcctgagcggctacaagtgcctgtgcgacgccggctgggtgggcatcaactgcgaggtggacaagaacgagtgcctgagcaacccctgccagaacggcggcacctgcgacaacctggtgaacggctacagatgcacctgcaagaagggcttcaagggctacaactgccaggtgaacatcgacgagtgcgccagcaacccctgcctgaaccagggcacctgcttcgacgacatcagcggctacacctgccactgcgtgctgccctacaccggcaagaactgccagaccgtgctggccccctgcagccccaacccctgcgagaacgccgccgtgtgcaaggagagccccaacttcgagagctacacctgcctgtgcgcccccggctggcagggccagagatgcaccatcgacatcgacgagtgcatcagcaagccctgcatgaaccacggcctgtgccacaacacccagggcagctacatgtgcgagtgcccccccggcttcagcggcatggactgcgaggaggacatcgacgactgcctggccaacccctgccagaacggcggcagctgcatggacggcgtgaacaccttcagctgcctgtgcctgcccggcttcaccggcgacaagtgccagaccgacatgaacgagtgcctgagcgagccctgcaagaacggcggcacctgcagcgactacgtgaacagctacacctgcaagtgccaggccggcttcgacggcgtgcactgcgagaacaacatcaacgagtgcaccgagagcagctgcttcaacggcggcacctgcgtggacggcatcaacagcttcagctgcctgtgccccgtgggcttcaccggcagcttctgcctgcacgagatcaacgagtgcagcagccacccctgcctgaacgagggcacctgcgtggacggcctgggcacctacagatgcagctgccccctgggctacaccggcaagaactgccagaccctggtgaacctgtgcagcagaagcccctgcaagaacaagggcacctgcgtgcagaagaaggccgagagccagtgcctgtgccccagcggctgggccggcgcctactgcgacgtgcccaacgtgagctgcgacatcgccgccagcagaagaggcgtgctggtggagcacctgtgccagcacagcggcgtgtgcatcaacgccggcaacacccactactgccagtgccccctgggctacaccggcagctactgcgaggagcagctggacgagtgcgccagcaacccctgccagcacggcgccacctgcagcgacttcatcggcggctacagatgcgagtgcgtgcccggctaccagggcgtgaactgcgagtacgaggtggacgagtgccagaaccagccctgccagaacggcggcacctgcatcgacctggtgaaccacttcaagtgcagctgcccccccggcaccagaggcctgctgtgcgaggagaacatcgacgactgcgccagaggcccccactgcctgaacggcggccagtgcatggacagaatcggcggctacagctgcagatgcctgcccggcttcgccggcgagagatgcgagggcgacatcaacgagtgcctgagcaacccctgcagcagcgagggcagcctggactgcatccagctgaccaacgactacctgtgcgtgtgcagaagcgccttcaccggcagacactgcgagaccttcgtggacgtgtgcccccagatgccctgcctgaacggcggcacctgcgccgtggccagcaacatgcccgacggcttcatctgcagatgcccccccggcttcagcggcgccagatgccagagcagctgcggccaggtgaagtgcagaaagggcgagcagtgcgtgcacaccgccagcggccccagatgcttctgccccagccccagagactgcgagagcggctgcgccagcagcccctgccagcacggcggcagctgccacccccagagacagcccccctactacagctgccagtgcgccccccccttcagcggcagcagatgcgagctgtacaccgccccccccagcaccccccccgccacctgcctgagccagtactgcgccgacaaggccagagacggcgtgtgcgacgaggcctgcaacagccacgcctgccagtgggacggcggcgactgcagcctgaccatggagaacccctgggccaactgcagcagccccctgccctgctgggactacatcaacaaccagtgcgacgagctgtgcaacaccgtggagtgcctgttcgacaacttcgagtgccagggcaacagcaagacctgcaagtacgacaagtactgcgccgaccacttcaaggacaaccactgcgaccagggctgcaacagcgaggagtgcggctgggacggcctggactgcgccgccgaccagcccgagaacctggccgagggcaccctggtgatcgtggtgctgatgccccccgagcagctgctgcaggacgccagaagcttcctgagagccctgggcaccctgctgcacaccaacctgagaatcaagagagacagccagggcgagctgatggtgtacccctactacggcgagaagagcgccgccatgaagaagcagagaatgaccagaagaagcctgcccggcgagcaggagcaggaggtggccggcagcaaggtgttcctggagatcgacaacagacagtgcgtgcaggacagcgaccactgcttcaagaacaccgacgccgccgccgccctgctggccagccacgccatccagggcaccctgagctaccccctggtgagcgtggtgagcgagagcctgacccccgagagaacccagctgctgtacctgctggccgtggccgtggtgatcatcctgttcatcatcctgctgggcgtgatcatggccaagagaaagagaaagcacggcagcctgtggctgcccgagggcttcaccctgagaagagacgccagcaaccacaagagaagagagcccgtgggccaggacgccgtgggcctgaagaacctgagcgtgcaggtgagcgaggccaacctgatcggcaccggcaccagcgagcactgggtggacgacgagggcccccagcccaagaaggtgaaggccgaggacgaggccctgctgagcgaggaggacgaccccatcgacagaagaccctggacccagcagcacctggaggccgccgacatcagaagaacccccagcctggccctgacccccccccaggccgagcaggaggtggacgtgctggacgtgaacgtgagaggccccgacggctgcacccccctgatgctggccagcctgagaggcggcagcagcgacctgagcgacgaggacgaggacgccgaggacagcagcgccaacatcatcaccgacctggtgtaccagggcgccagcctgcaggcccagaccgacagaaccggcgagatggccctgcacctggccgccagatacagcagagccgacgccgccaagagactgctggacgccggcgccgacgccaacgcccaggacaacatgggcagatgccccctgcacgccgccgtggccgccgacgcccagggcgtgttccagatcctgatcagaaacagagtgaccgacctggacgccagaatgaacgacggcaccacccccctgatcctggccgccagactggccgtggagggcatggtggccgagctgatcaactgccaggccgacgtgaacgccgtggacgaccacggcaagagcgccctgcactgggccgccgccgtgaacaacgtggaggccaccctgctgctgctgaagaacggcgccaacagagacatgcaggacaacaaggaggagacccccctgttcctggccgccagagagggcagctacgaggccgccaagatcctgctggaccacttcgccaacagagacatcaccgaccacatggacagactgcccagagacgtggccagagacagaatgcaccacgacatcgtgagactgctggacgagtacaacgtgacccccagcccccccggcaccgtgctgaccagcgccctgagccccgtgatctgcggccccaacagaagcttcctgagcctgaagcacacccccatgggcaagaagagcagaagacccagcgccaagagcaccatgcccaccagcctgcccaacctggccaaggaggccaaggacgccaagggcagcagaagaaagaagagcctgagcgagaaggtgcagctgagcgagagcagcgtgaccctgagccccgtggacagcctggagagcccccacacctacgtgagcgacaccaccagcagccccatgatcaccagccccggcatcctgcaggccagccccaaccccatgctggccaccgccgccccccccgcccccgtgcacgcccagcacgccctgagcttcagcaacctgcacgagatgcagcccctggcccacggcgccagcaccgtgctgcccagcgtgagccagctgctgagccaccaccacatcgtgagccccggcagcggcagcgccggcagcctgagcagactgcaccccgtgcccgtgcccgccgactggatgaacagaatggaggtgaacgagacccagtacaacgagatgttcggcatggtgctggcccccgccgagggcacccaccccggcatcgccccccagagcagaccccccgagggcaagcacatcaccacccccagagagcccctgccccccatcgtgaccttccagctgatccccaagggcagcatcgcccagcccgccggcgccccccagccccagagcacctgcccccccgccgtggccggccccctgcccaccatgtaccagatccccgagatggccagactgcccagcgtggccttccccaccgccatgatgccccagcaggacggccaggtggcccagaccatcctgcccgcctaccaccccttccccgccagcgtgggcaagtaccccaccccccccagccagcacagctacgccagcagcaacgccgccgagagaacccccagccacagcggccacctgcagggcgagcacccctacctgacccccagccccgagagccccgaccagtggagcagcagcagcccccacagcgccagcgactggagcgacgtgaccaccagccccacccccggcggcgccggcggcggccagagaggccccggcacccacatgagcgagcccccccacaacaacatgcaggtgtacgcctag

SEQ ID NO: 338049 - DNA, 2592 bp, Artificial Sequence
  derived and/or modified sequence
atgtgcgtcacatatcacaacggcacaggatactgcaaatgtcctgagggcttcttaggcgagtattgtcagcatcgcgacccttgcgagaagaatagatgccagaatggggggacatgcgtggctcaggccatgctgggcaaagccacttgccgctgtgcgagtggctttacaggagaagactgccagtattcgaccagccacccgtgcttcgtttctcgaccctgcctgaatggagggacctgtcatatgctgtccagggatacctacgagtgcacttgtcaggttggtttcactggaaaggaatgccagtggaccgatgcctgtctgagccacccatgtgcaaatgggtccacgtgtactacagtggccaatcagttttcttgtaagtgtcttacaggcttcacaggccagaagtgcgagactgacgttaacgagtgcgacataccaggccactgccagcatggcggaacatgcctgaatctccccggttcctaccagtgccagtgcccccagggctttaccggtcaatactgcgactcactctacgtaccgtgtgcgccgagtccgtgcgttaacggtggaacctgtagacagactggcgacttcacattcgagtgtaattgtttgcccggtttcgaaggcagcacttgtgagcgtaacatagacgactgccccaaccacagatgtcagaacggaggcgtctgtgtcgatggagtcaatacctacaactgccggtgtcctccccagtggactggccaattttgtacagaggatgtggatgaatgcctgctgcagccaaatgcctgtcaaaatgggggtacttgcgcgaacagaaacggaggatatggatgcgtctgcgttaatggttggtccggtgatgactgctccgaaaacatagacgattgcgcctttgcatcctgtacccccggtagtacctgcatagacagagtggcgtcattttcctgtatgtgcccagagggcaaggcaggtctgctctgtcacctggacgacgcatgcatcagcaacccatgccacaaaggggctctgtgtgatactaatccccttaacgggcagtacatttgtacttgtccccagggctataagggggcagactgcacagaagacgtcgatgagtgcgcgatggctaactcgaatccctgcgaacacgcgggcaaatgtgtcaataccgacggcgccttccattgcgagtgcctgaaaggctatgctgggcctcggtgcgaaatggacattaatgagtgccacagcgacccgtgccagaatgacgccacttgtttagacaaaattggtggctttacatgtctgtgtatgccaggattcaaaggggtacactgcgaattagagataaacgagtgccagtcaaatccctgcgtaaataacggacagtgcgtcgacaaagtgaaccgattccagtgcctctgtccccctggtttcacaggtccggtgtgccagatagatatcgatgattgcagttcaactccatgtctgaacggcgcaaaatgtattgatcaccctaatggttacgaatgccagtgtgccacaggcttcaccggagttctttgcgaagaaaacatcgataactgcgacccagatccatgtcaccacgggcagtgtcaggatgggattgactcatacacctgcatttgtaatcctggctacatgggtgctatctgcagtgaccagatagatgaatgttattccagcccctgtttgaacgatggtcgctgcatagacttagtgaacgggtaccagtgcaactgtcagccaggcacctcaggggtgaactgcgagatcaattttgatgactgcgcctcgaacccatgtattcatggcatttgcatggatggcattaatcgatactcctgcgtgtgttcccctggcttcaccggacagcggtgcaatatcgatattgacgaatgcgcctccaatccatgtcgtaaaggcgccacatgcattaacggtgttaatggtttccggtgtatatgtcctgaaggacctcaccacccctcatgttacagccaggttaacgagtgtctgtcaaatccttgcatccacggcaactgcaccggggggttgtcaggttataagtgcctctgcgatgccgggtgggttgggatcaattgtgaagtggacaaaaacgaatgcctgagcaacccctgtcaaaacgggggaacctgcgataatctggttaatggataccggtgtacttgtaaaaaaggatttaagggctataactgtcaggtgaatattgacgaatgcgcttccaacccatgcctgaaccaggggacgtgcttcgacgacatctccggatacacgtgccactgcgtgctgccttacacagggggcagctggaggtaccagcaaggcccagagggcatcctggacttagcgcttagcgtgccggaaagccagtgccctggactttgggggtgcaatgcccccccaagggctcatagcagcgtggtcctgcccgcttttaccgactggatcctttccttcgaagaaactctctggcctcctaagatgcaggttgtggactcccaccttccaacattgtacttttctatctag

SEQ ID NO: 338050 - DNA, 2592 bp, Artificial Sequence
  derived and/or modified sequence
atgtgtgtgacctaccacaatggaacaggctactgcaagtgcccagagggcttcctgggggagtactgccagcaccgggacccctgtgagaagaaccgctgccagaatggaggcacctgtgtggcccaggccatgctgggcaaggccacctgccgctgtgccagcggcttcaccggggaggactgccagtacagcaccagccacccctgctttgtgtcccggccctgcctgaatggaggcacctgccacatgctgagccgggacacctatgaatgtacctgccaggtgggcttcaccgggaaggagtgccagtggacagatgcctgcctgagccacccctgtgccaacggcagcacctgcaccaccgtggccaaccagttcagctgcaagtgcctgaccggcttcaccggccagaagtgtgaaacagatgtgaatgaatgtgacatccctggccactgccagcacggcggcacctgcctgaacctgcccggcagctaccagtgccagtgcccccagggcttcaccggccagtactgtgacagcctgtatgtgccctgtgcccccagcccctgtgtgaatggaggcacctgccggcagacaggagacttcacctttgagtgcaactgcctgcccggctttgagggcagcacctgtgagaggaacattgatgactgccccaaccaccgctgccagaatggaggagtgtgtgtggatggagtgaacacctacaactgccgctgccccccccagtggacaggccagttctgcacagaagatgtggatgagtgcctgctgcagcccaatgcctgccagaatggaggcacctgtgccaacagaaatggaggctacggctgtgtgtgtgtgaatggctggagcggagatgactgcagcgagaacattgatgactgtgcctttgccagctgcaccccaggcagcacctgcatcgacagagtggccagcttcagctgcatgtgcccagagggcaaggccggcctgctgtgccacctggatgatgcctgcatcagcaacccctgccacaagggggccctgtgtgacaccaaccccctgaatggccagtacatctgcacctgcccccagggctacaagggagctgactgcacagaagatgtggatgaatgtgccatggccaacagcaacccctgtgagcacgccgggaaatgtgtgaacacagatggagccttccactgtgagtgcctgaagggctacgccggcccccgctgtgagatggacatcaatgaatgccacagcgacccctgccagaatgatgccacctgcctggacaagattggaggcttcacctgcctgtgcatgcctggcttcaagggcgtgcactgtgagctggagatcaatgaatgccagagcaacccctgtgtgaacaacggccagtgtgtggacaaggtgaaccgcttccagtgcctgtgccccccaggcttcaccggccctgtgtgccagattgatattgatgactgcagcagcaccccctgcctgaatggagccaagtgcatcgaccaccccaacggctatgagtgccagtgtgccaccggcttcaccggggtgctgtgtgaggagaacatcgacaactgtgaccctgacccctgccaccacggccagtgccaggacggcatcgacagctacacctgcatctgcaaccctggctacatgggcgccatctgcagcgaccagattgatgagtgctacagcagcccctgcctgaatgatggccgctgcatcgacctggtgaatggctaccagtgcaactgccagcccggcaccagcggcgtgaactgtgagatcaactttgatgactgtgccagcaacccctgcatccacggcatctgcatggatggcatcaaccgctacagctgtgtgtgcagccctggcttcaccggccagcgctgcaacatcgacattgatgaatgtgccagcaacccctgcaggaagggggccacctgcatcaacggggtgaatggcttccgctgcatctgcccagagggcccccaccaccccagctgctacagccaggtgaatgaatgtctgagcaacccctgcatccacggcaactgcaccggcggcctgagcggctacaagtgcctgtgtgatgctggctgggtgggcatcaactgtgaggtggacaagaatgaatgtctgagcaacccctgccagaatggaggcacctgtgacaacctggtgaatggctaccgctgcacctgcaagaagggcttcaagggctacaactgccaggtgaacattgatgaatgtgccagcaacccctgcctgaaccagggcacctgctttgatgacatcagcggctacacctgccactgtgtgctgccctacacaggaggctcctggagataccagcagggccctgagggcatcctggacctggccctgtctgtgcctgagagccagtgccccggcctgtggggctgcaatgccccaccccgggcccacagctctgtggtgctgcctgccttcacagactggatcctgagctttgaggagaccctgtggccacccaagatgcaggtggtggacagccacctgcccaccctgtacttcagcatctag

SEQ ID NO: 338051 - DNA, 2592 bp, Artificial Sequence
  derived and/or modified sequence
atgtgcgtgacctaccacaacggcaccggctactgcaagtgccccgaagggttcctaggagagtactgccagcatcgggatccatgtgaaaagaatcgttgccagaacggagggacatgcgtcgctcaagccatgctggggaaggctacgtgtcggtgtgcctctgggttcactggggaagactgtcagtacagcacaagccacccgtgctttgtgtcccgcccttgtctgaatggtggaacttgtcacatgttgtcacgtgatacatatgagtgcacctgtcaagtgggatttacaggcaaggagtgtcaatggacggacgcctgcctttcacacccctgtgccaacggctcaacttgcaccacggtcgcaaaccagttttcatgcaaatgcctgaccggatttaccgggcagaagtgtgaaactgatgtcaacgagtgcgacattccgggccactgccagcatggcggcacatgtctaaatcttcccggctcatatcagtgccagtgtccgcaaggattcacaggtcagtattgcgactctttatacgtcccctgcgcaccttccccatgcgtgaacggcggcacatgcaggcagactggcgactttacatttgagtgtaattgtctgcccggcttcgaggggagtacctgcgaacgcaatatcgatgattgccccaatcataggtgccagaacgggggagtctgtgtggatggagtaaatacctacaattgcaggtgccccccacagtggacaggtcaattctgtaccgaagacgtcgacgagtgcctgttgcagcctaatgcatgccagaacggtggcacatgcgccaacaggaatggagggtacggttgcgtgtgtgtgaacgggtggtcaggagacgattgcagtgaaaacatcgatgattgtgcttttgctagctgcacccccgggagcacctgtatcgatcgggtcgcaagtttcagttgtatgtgccccgagggaaaggccggtctcctttgtcatcttgacgatgcatgcatctccaatccttgccacaagggggcgctgtgcgataccaatccactgaacggccagtatatttgcacttgcccccaaggatacaagggcgctgattgcaccgaagacgtggatgaatgcgctatggccaattctaacccttgcgagcacgccgggaagtgcgtgaacactgacggggctttccattgcgaatgtctgaaaggttatgcgggcccccggtgtgaaatggacatcaatgagtgccatagcgatccatgccagaacgacgcaacttgtctggataagataggcgggttcacctgcctgtgcatgcctggttttaagggcgtacattgcgaactggagatcaacgaatgccagtccaatccgtgtgtaaacaacggacagtgcgtcgacaaagtgaaccggtttcagtgcctctgcccacctggttttacaggtccggtgtgtcaaattgatattgacgactgcagctctaccccatgtctgaatggcgctaagtgcattgatcaccctaacggctacgagtgtcaatgcgcaaccggcttcacgggtgtgttgtgcgaagagaacatcgacaactgtgatccggatccctgccaccatggccagtgccaggatggaattgattcctacacctgcatctgcaaccctgggtacatgggtgctatttgtagtgaccagatcgatgagtgttatagctctccctgtctcaacgatggtaggtgcatcgatctggtcaacggctaccagtgcaactgccagccaggaacctcaggggtcaactgtgaaataaattttgatgactgcgcgtctaatccttgcatccacggcatttgtatggatgggatcaaccgttatagttgcgtgtgcagcccaggattcaccggtcagcgatgtaatatagacattgatgagtgcgcatctaatccgtgccggaaaggcgctacttgcattaatggagtcaatggctttagatgtatatgtccggaaggccctcatcatccatcctgctacagtcaggtcaacgagtgtctgtccaacccctgcatccatgggaactgtactggcgggctgtcgggttataagtgcctttgtgacgcggggtgggtaggcattaactgtgaagtcgataaaaatgaatgcctgtcgaacccctgccagaatggcggaacatgtgacaatctggtaaatggctacaggtgtacttgcaaaaaaggcttcaaagggtacaattgccaggttaacattgatgagtgcgccagcaacccttgtctgaatcagggaacctgctttgacgacattagcggctatacttgccactgcgttctaccttataccggagggtcgtggaggtatcagcagggacctgagggaattttggatctagcgttatccgtcccagagagccagtgccccggcttgtgggggtgtaacgctcccccacgagcccattcaagtgttgtcctccctgcttttaccgattggattctctcttttgaggagactctctggccacccaagatgcaggtggtggatagccatctcccaaccctgtacttttcaatctag

SEQ ID NO: 338052 - DNA, 2592 bp, Artificial Sequence
  derived and/or modified sequence
atgtgcgtcacttaccataatggcacaggttactgcaaatgtccagagggatttctaggggaatattgccagcacagggacccttgtgaaaaaaataggtgtcaaaatggcggtacttgtgttgcccaggccatgctggggaaagccacctgccgatgcgctagcggcttcaccggtgaagattgccagtactccacgtctcatccctgctttgtgtctagaccatgcctgaacggcggtacatgccacatgctgtctagggacacttatgagtgtacctgccaagtggggtttactgggaaggaatgccagtggacagacgcttgtcttagccatccttgcgcaaatgggagcacatgtacgacagtggcaaaccagtttagctgcaaatgcttgaccggcttcaccgggcaaaagtgcgagactgatgtgaacgagtgtgacattcccggacattgccagcacggaggcacctgtcttaatctcccgggatcgtaccagtgtcagtgtccacaaggctttacgggacagtactgtgactccctctacgtgccatgtgcccctagcccatgcgtcaatggcggtacatgccgccagaccggagatttcacattcgaatgtaattgtctacccggatttgaggggagtacgtgcgagcggaatatagacgactgtccgaatcacagatgccagaacgggggtgtttgtgtcgatggtgtcaacacttacaactgccggtgtcctcctcagtggaccggtcagttttgcacggaagacgtggacgagtgcctcctccagcccaacgcctgccagaatggcggaacttgcgccaacaggaacgggggttatgggtgcgtgtgcgtgaacgggtggtcgggcgacgattgctcagaaaatattgatgattgcgcttttgcatcatgtacaccaggcagcacttgcatcgacagagtagcgtcgttctcttgtatgtgtccagagggaaaagctgggctgctgtgtcacctggacgatgcatgcatcagtaatccctgtcataagggagccctctgtgacacaaatccactgaacggccagtatatctgtacatgccctcaggggtataagggcgcagattgcaccgaggacgtggacgagtgcgccatggctaacagtaatccatgtgaacacgctggcaagtgcgtgaataccgatggggcatttcactgcgagtgcctgaagggatacgccggtcccagatgcgagatggacattaatgaatgccattcagatccctgtcaaaacgacgctacctgtctggataagattgggggattcacgtgcctgtgtatgcccggtttcaaaggagtacattgcgaactggaaattaacgaatgtcagtctaatccttgcgttaataatggccaatgtgtggacaaagttaaccgattccaatgcctctgtcctccaggatttactgggccagtttgtcagatcgatatcgatgactgcagtagcacaccatgcctgaacggcgctaagtgcattgatcatccgaacggttatgagtgtcagtgcgctactggcttcaccggcgtgttgtgtgaggaaaacatagacaattgcgacccggatccttgtcaccacggccagtgtcaggacggcatcgactcctatacttgtatttgtaatcctggttacatgggcgctatctgctcagatcaaattgacgaatgctattcatccccttgtctgaacgatggtcggtgtattgatctggtgaacggatatcagtgcaattgccagcccggtacctcaggtgttaattgtgaaattaattttgatgattgcgcaagtaatccatgcatccatggtatttgtatggacggaatcaaccggtacagctgcgtgtgttcccccggtttcaccgggcagagatgcaatattgatatcgatgagtgcgcctccaacccatgtagaaagggggcaacatgtatcaacggagttaacgggttccggtgtatttgccccgaggggcctcatcaccccagctgttattcacaggtgaatgagtgcttgagcaatccatgtatccacggtaactgcaccggtggactctcgggatacaaatgtctgtgtgacgccggttgggttgggatcaactgcgaggtggacaaaaacgagtgtctatctaatccctgccagaatggcggtacctgcgataatttggtaaacgggtatcgctgcacctgcaagaaggggttcaaagggtataactgtcaggtgaacattgacgagtgtgcctctaacccctgtctgaaccagggcacgtgtttcgacgacatttccggttatacttgtcactgtgtcttgccatatactggcggttcttggcgatatcagcaaggacctgaaggcatcctggaccttgctctgagcgtcccagaaagtcagtgtcctgggctgtgggggtgtaatgcccctccacgggctcattcgagtgtagtgttgccagcattcaccgattggattctttcattcgaagagactttgtggcctcccaaaatgcaggtcgtcgatagtcatctgcccaccctgtacttcagcatatag

SEQ ID NO: 338053 - DNA, 2592 bp, Artificial Sequence
  derived and/or modified sequence
atgtgcgtgacctaccacaacggcaccggctactgcaagtgccccgagggcttcctgggcgagtactgccagcacagagacccctgcgagaagaacagatgccagaacggcggcacctgcgtggcccaggccatgctgggcaaggccacctgcagatgcgccagcggcttcaccggcgaggactgccagtacagcaccagccacccctgcttcgtgagcagaccctgcctgaacggcggcacctgccacatgctgagcagagacacctacgagtgcacctgccaggtgggcttcaccggcaaggagtgccagtggaccgacgcctgcctgagccacccctgcgccaacggcagcacctgcaccaccgtggccaaccagttcagctgcaagtgcctgaccggcttcaccggccagaagtgcgagaccgacgtgaacgagtgcgacatccccggccactgccagcacggcggcacctgcctgaacctgcccggcagctaccagtgccagtgcccccagggcttcaccggccagtactgcgacagcctgtacgtgccctgcgcccccagcccctgcgtgaacggcggcacctgcagacagaccggcgacttcaccttcgagtgcaactgcctgcccggcttcgagggcagcacctgcgagagaaacatcgacgactgccccaaccacagatgccagaacggcggcgtgtgcgtggacggcgtgaacacctacaactgcagatgccccccccagtggaccggccagttctgcaccgaggacgtggacgagtgcctgctgcagcccaacgcctgccagaacggcggcacctgcgccaacagaaacggcggctacggctgcgtgtgcgtgaacggctggagcggcgacgactgcagcgagaacatcgacgactgcgccttcgccagctgcacccccggcagcacctgcatcgacagagtggccagcttcagctgcatgtgccccgagggcaaggccggcctgctgtgccacctggacgacgcctgcatcagcaacccctgccacaagggcgccctgtgcgacaccaaccccctgaacggccagtacatctgcacctgcccccagggctacaagggcgccgactgcaccgaggacgtggacgagtgcgccatggccaacagcaacccctgcgagcacgccggcaagtgcgtgaacaccgacggcgccttccactgcgagtgcctgaagggctacgccggccccagatgcgagatggacatcaacgagtgccacagcgacccctgccagaacgacgccacctgcctggacaagatcggcggcttcacctgcctgtgcatgcccggcttcaagggcgtgcactgcgagctggagatcaacgagtgccagagcaacccctgcgtgaacaacggccagtgcgtggacaaggtgaacagattccagtgcctgtgcccccccggcttcaccggccccgtgtgccagatcgacatcgacgactgcagcagcaccccctgcctgaacggcgccaagtgcatcgaccaccccaacggctacgagtgccagtgcgccaccggcttcaccggcgtgctgtgcgaggagaacatcgacaactgcgaccccgacccctgccaccacggccagtgccaggacggcatcgacagctacacctgcatctgcaaccccggctacatgggcgccatctgcagcgaccagatcgacgagtgctacagcagcccctgcctgaacgacggcagatgcatcgacctggtgaacggctaccagtgcaactgccagcccggcaccagcggcgtgaactgcgagatcaacttcgacgactgcgccagcaacccctgcatccacggcatctgcatggacggcatcaacagatacagctgcgtgtgcagccccggcttcaccggccagagatgcaacatcgacatcgacgagtgcgccagcaacccctgcagaaagggcgccacctgcatcaacggcgtgaacggcttcagatgcatctgccccgagggcccccaccaccccagctgctacagccaggtgaacgagtgcctgagcaacccctgcatccacggcaactgcaccggcggcctgagcggctacaagtgcctgtgcgacgccggctgggtgggcatcaactgcgaggtggacaagaacgagtgcctgagcaacccctgccagaacggcggcacctgcgacaacctggtgaacggctacagatgcacctgcaagaagggcttcaagggctacaactgccaggtgaacatcgacgagtgcgccagcaacccctgcctgaaccagggcacctgcttcgacgacatcagcggctacacctgccactgcgtgctgccctacaccggcggcagctggagataccagcagggccccgagggcatcctggacctggccctgagcgtgcccgagagccagtgccccggcctgtggggctgcaacgccccccccagagcccacagcagcgtggtgctgcccgccttcaccgactggatcctgagcttcgaggagaccctgtggccccccaagatgcaggtggtggacagccacctgcccaccctgtacttcagcatctag

SEQ ID NO: 338054 - protein, 553 aa, Artificial Sequence
  derived and/or modified sequence
MLQKLGPEKRIFEEIRKIEDNEFHYQEQTDPVEYVENMCENMQLYPLQDILTGDQLLFEYKPEVIGEALNQLVPQKANLVLLSGANEGKCDLKEKWFGTQYSIEDIENSWAELWNSNFELNPDLHLPAENKYIAYIRFHLISPLIQKSAANVVLFDIFVNILTHNLAEPAYEADVAQLEYKLVAGEHGLIIRVKGFNHKLPLLFQLIIDYLAEFNSTPAVFTMITEQLKKTYFNILIKPETLAKDVRLLILEYARWSMIDKYQALMDGLSLESLLSFVKEFKSQLFVEGLVQGNVTSTESMDFLKYVVDKLNFKPLEQEMPVQFQVVELPSGHHLCKVKALNKGDANSEVTVYYQSGTRSLREYTLMELLVMHMEEPCFDFLRTKQTLGSEVVDKKIEEFLSSFEEKIENLTEEAFNTQVTALIKLKECEDTHLGEEVDRNWNEVVTQQYLFDRLAHEIEALKSFSKSDLVNWFKAHRGPGSKMLSVHVVGYGKYELEEDGTPSSEDSNSSCEVMQLTYLPTSPLLADCIIPITDIRAFTTTLNLLPYHKIVK

SEQ ID NO: 338055 - protein, 538 aa, Artificial Sequence
  derived and/or modified sequence
  misc_feature (1)..(1): Xaa can be any naturally occurring amino acid
XKIEDNEFHYQEQTDPVEYVENMCENMQLYPLQDILTGDQLLFEYKPEVIGEALNQLVPQKANLVLLSGANEGKCDLKEKWFGTQYSIEDIENSWAELWNSNFELNPDLHLPAENKYIAYIRFHLISPLIQKSAANVVLFDIFVNILTHNLAEPAYEADVAQLEYKLVAGEHGLIIRVKGFNHKLPLLFQLIIDYLAEFNSTPAVFTMITEQLKKTYFNILIKPETLAKDVRLLILEYARWSMIDKYQALMDGLSLESLLSFVKEFKSQLFVEGLVQGNVTSTESMDFLKYVVDKLNFKPLEQEMPVQFQVVELPSGHHLCKVKALNKGDANSEVTVYYQSGTRSLREYTLMELLVMHMEEPCFDFLRTKQTLGSEVVDKKIEEFLSSFEEKIENLTEEAFNTQVTALIKLKECEDTHLGEEVDRNWNEVVTQQYLFDRLAHEIEALKSFSKSDLVNWFKAHRGPGSKMLSVHVVGYGKYELEEDGTPSSEDSNSSCEVMQLTYLPTSPLLADCIIPITDIRAFTTTLNLLPYHKIVK

SEQ ID NO: 338056 - protein, 1087 aa, Artificial Sequence
  derived and/or modified sequence
MEGKTGNTTDDEEEEEVEEEEEDDDEDSGAEIEDDDEEGFDDEDEFDDEHDDDLDTEDNELEELEERAEARKKTTEKQQLQSLFLLWSKLTDRLWFKSTYSKMSSTLLVETRNLYGVVGAESRSAPVQHLAGWQAEEQQGETDTVLSAAALCVGVGSFADPDDLPGLAHFLEHMVFMGSLKYPDENGFDAFLKKHGGSDNASTDCERTVFQFDVQRKYFKEALDRWAQFFIHPLMIRDAIDREVEAVDSEYQLARPSDANRKEMLFGSLARPGHPMGKFFWGNAETLKHEPRKNNIDTHARLREFWMRYYSSHYMTLVVQSKETLDTLEKWVTEIFSQIPNNGLPRPNFGHLTDPFDTPAFNKLYRVVPIRKIHALTITWALPPQQQHYRVKPLHYISWLVGHEGKGSILSFLRKKCWALALFGGNGETGFEQNSTYSVFSISITLTDEGYEHFYEVAYTVFQYLKMLQKLGPEKRIFEEIRKIEDNEFHYQEQTDPVEYVENMCENMQLYPLQDILTGDQLLFEYKPEVIGEALNQLVPQKANLVLLSGANEGKCDLKEKWFGTQYSIEDIENSWAELWNSNFELNPDLHLPAENKYIATDFTLKAFDCPETEYPVKIVNTPQGCLWYKKDNKFKIPKAYIRFHLISPLIQKSAANVVLFDIFVNILTHNLAEPAYEADVAQLEYKLVAGEHGLIIRVKGFNHKLPLLFQLIIDYLAEFNSTPAVFTMITEQLKKTYFNILIKPETLAKDVRLLILEYARWSMIDKYQALMDGLSLESLLSFVKEFKSQLFVEGLVQGNVTSTESMDFLKYVVDKLNFKPLEQEMPVQFQVVELPSGHHLCKVKALNKGDANSEVTVYYQSGTRSLREYTLMELLVMHMEEPCFDFLRTKQTLGYHVYPTCRNTSGILGFSVTVGTQATKYNSEVVDKKIEEFLSSFEEKIENLTEEAFNTQVTALIKLKECEDTHLGEEVDRNWNEVVTQQYLFDRLAHEIEALKSFSKSDLVNWFKAHRGPGSKMLSVHVVGYGKYELEEDGTPSSEDSNSSCEVMQLTYLPTSPLLADCIIPITDIRAFTTTLNLLPYHKIVK

SEQ ID NO: 338057 - DNA, 2244 bp, Artificial Sequence
  derived and/or modified sequence
atggaaggaaaaaccggaaacaccactgatgacgaggaagaggaggaggtagaagaagaggaggaggatgacgatgaggacagcggggcagagatagaggatgatgatgaagaaggctttgatgacgaagatgagtttgacgacgagcatgacgacgacttggacacagaggataacgaattggaagagctagaggagcgggccgaggcaaggaaaaagacaaccgagaaacagagtgccgctgccttgtgcgtcggcgtaggctcgttcgcagacccagacgacctgcccggcctagcccacttcctggagcacatggtgtttatgggcagcttaaaatacccagacgagaatgggttcgatgcgttcctgaaaaagcatggcggcagtgacaacgcaagtaccgactgtgaacgtacggtcttccaatttgacgtgcagcgcaaatattttaaggaagctctagacagatgggcacaatttttcattcaccccttgatgattagagatgccattgatagagaggtcgaagcggtggattccgagtaccagctagcgagacctagcgatgccaacagaaaggagatgctgttcggatcactggcaagaccagggcatcccatgggaaagttcttttgggggaacgccgagactttgaagcacgaaccccgaaagaacaatatcgatacgcacgcacgtctgcgcgagttttggatgagatattatagctcacactacatgaccctggtggtacagagtaaagagacactggacacgcttgagaagtgggtgaccgaaatattctcacagatccctaacaacgggcttccaaggccaaacttcggtcacctgactgacccgtttgatacaccagcgtttaacaagctgtatcgagtagtaccaatccggaaaattcatgctttaaccatcacctgggcgttgcctcctcagcagcagcactacagagtgaaacccctgcactacatttcgtggttagtgggacacgaaggtaaaggcagcattctgtccttcctacgaaaaaaatgctgggctcttgccttattcggaggcaacggagagaccggcttcgagcaaaattccacctacagcgtattttctatatccattacgctaactgacgaggggtatgagcatttctatgaagtagcctacactgtgtttcagtacttaaagatgcttcaaaagttggggccagagaaaagaatctttgaagaaatacgcaagattgaggacaatgagtttcattatcaggagcagacagatcccgtggagtacgtggaaaatatgtgtgaaaacatgcagctttaccccttgcaggatatattaaccggcgaccaactgctgtttgagtataaaccagaggttataggcgaggctctgaatcagctggtgcctcaaaaggccaatctggtgctactgtccggagcaaacgaagggaaatgtgatctgaaggagaagtggtttgggactcaatacagtatcgaggacattgagaactcttgggcagaactttggaatagcaacttcgagctgaatccagacctgcatctgccagctgagaataaatacatcgccaccgattttacacttaaagcgttcgactgtcctgaaaccgaatacccagtgaaaattgtcaacacaccgcaaggttgcctctggtacaagaaagacaataaattcaagatccctaaagcatacatcaggttccatctgattagcccactgattcagaaatccgcagccaatgtagtgctgtttgatatttttgtgaatattctcacccacaatttggctgagccagcttacgaggccgatgtcgcacagctggaatataaactggttgccggtgagcatggcctcatcattagagtgaaggggtttaatcacaaactccccctcctgtttcagctcatcatcgattacctggcagagtttaattccaccccggccgtgtttacaatgatcacagagcagctgaagaaaacatacttcaacatattgatcaagccggagactctagcaaaggacgtgagactcctgatcttagagtatgcccgctggtccatgatcgataagtatcaagccttaatggacggcctgtcactagagagtctgttgtctttcgtcaaggagttcaaatcacagcttttcgtggaaggtctcgtgcaaggaaacgtgacaagtacggtgctgtgtcaatgggctcaagactccgaaacatag

SEQ ID NO: 338058 - DNA, 2244 bp, Artificial Sequence
  derived and/or modified sequence
atggagggcaagacaggcaacaccacagatgatgaggaggaggaggaggtggaggaggaggaggaggatgatgatgaggacagcggggctgagattgaagatgatgatgaggagggctttgatgatgaagatgaatttgatgatgaacatgatgatgacctggacacagaagataatgagctggaggagctggaggagcgggcagaggccaggaagaagaccacagagaagcagagcgctgctgccctgtgtgtgggcgtgggcagctttgctgaccctgatgacctgcccggcctggcccacttcctggagcacatggtgttcatgggcagcctgaagtacccagatgaaaatggatttgatgccttcctgaagaagcatggaggcagtgacaatgccagcacagactgtgagaggacagtgttccagtttgatgtgcagaggaagtacttcaaggaggccctggaccgctgggcccagttcttcatccaccccctgatgatcagagatgccatcgaccgggaggtggaggccgtggacagcgagtaccagctggcccggcccagtgatgccaacaggaaggagatgctgtttggcagcctggcccggcccggccaccccatgggcaagttcttctggggcaatgctgagaccctgaagcatgagcccaggaagaacaacatcgacacccacgcccggctgcgggagttctggatgagatactacagcagccactacatgaccctggtggtgcagagcaaggagaccctggacaccctggagaagtgggtgacagagatcttcagccagatccccaacaacggcctgccccggcccaactttggccacctgacagacccctttgacaccccagccttcaacaagctgtacagagtggtgcccatcaggaagatccacgccctgaccatcacctgggccctgcccccccagcagcagcactacagagtgaagcccctgcactacatctcctggctggtgggccacgagggcaagggcagcatcctgtccttcctgaggaagaagtgctgggccctggccctgtttggaggaaatggagaaacaggctttgagcagaacagcacctacagcgtcttcagcatcagcatcaccctgacagatgagggctatgagcacttctatgaggtggcctacaccgtcttccagtacctgaagatgctgcagaagctgggccctgagaagaggatctttgaggagatcaggaagattgaagataatgagttccactaccaggagcagacagatcctgtggagtatgtggagaacatgtgtgagaacatgcagctgtaccccctgcaggacatcctgaccggggaccagctgctgtttgagtacaagccagaggtgattggagaggccctgaaccagctggtgccccagaaggccaacctggtgctgctgagcggggccaatgaaggaaaatgtgacctgaaggagaagtggtttggcacccagtacagcattgaggacattgaaaattcctgggccgagctgtggaacagcaactttgagctgaacccagacctgcacctgcctgctgagaacaagtacatcgccacagacttcaccctgaaggcctttgactgcccagagacagagtaccctgtgaagatcgtgaacaccccccagggctgcctgtggtacaagaaggacaacaagttcaagatccccaaggcctacatccgcttccacctgatcagccccctcatccagaagtctgctgccaacgtggtgctgtttgacatctttgtgaacatcctgacccacaacctggccgagcccgcctatgaagcagatgtggcccagctggagtacaagctggtggccggggagcacggcctcatcatccgggtgaagggcttcaaccacaagctgcccctgctcttccagctgatcatcgactacctggccgagttcaacagcaccccagctgtgttcaccatgatcacagagcagctgaagaagacctacttcaacatcctgatcaagccagagaccctggccaaggatgtgcggctgctgatcctggagtatgcccgctggagcatgattgacaagtaccaggccctgatggatggcctgagcctggagagcctgctgagctttgtgaaggagttcaagagccagctgtttgtggagggcctggtgcagggcaatgtgaccagcacagtgctgtgccagtgggcccaggacagcgagacctag

SEQ ID NO: 338059 - DNA, 2244 bp, Artificial Sequence
  derived and/or modified sequence
atggagggcaagaccggcaacaccaccgacgacgaggaggaggaggaagtagaagaagaggaggaggatgacgatgaagatagcggtgcggaaattgaagatgacgacgaagagggattcgacgatgaggacgagttcgatgacgagcacgacgacgacctcgatactgaagataacgagcttgaggagctcgaagagcgcgccgaagcccgcaaaaagaccaccgaaaagcagtccgccgccgccctttgtgtcggggtcggctctttcgctgatcccgatgatctcccaggactggcccattttctggaacatatggtgtttatgggatccctaaaatatcccgacgaaaacgggtttgacgcgtttctgaaaaaacatggcgggtcagacaacgcctctacagattgcgagagaactgttttccagtttgatgtacagcggaagtactttaaagaagcattggaccggtgggcccagttttttatccatccactaatgatcagagatgctattgaccgtgaagtggaagcagtggactccgaataccagctcgcacgcccaagcgacgcaaatagaaaggagatgctctttgggtccctagctcgacccgggcacccgatgggcaagttcttttgggggaacgccgagacactgaagcatgagccccgaaaaaataatatagatacacatgcgcggctgcgagagttctggatgagatattactccagccactatatgacactggtagttcagtcaaaagaaaccctggacactttggagaagtgggttaccgaaatcttttctcagattccaaacaatggactccctcgtcccaattttggtcatctgaccgaccccttcgatactcccgcattcaacaagctatatagggtggtccctattcgtaagattcacgctctgacgataacctgggctctaccccctcagcagcagcactaccgagtgaagccactccattatatttcctggctcgtggggcatgaggggaaggggtcaatcttgagctttttaaggaagaagtgctgggctctcgctttgttcggcgggaacggagaaaccggctttgaacagaatagcacctattctgttttttccatttccataaccctcacagatgaaggatatgaacatttctacgaggtggcttacacggtctttcagtatttgaagatgctacagaagctcggcccagagaagagaattttcgaagagattcgcaaaattgaggacaatgaattccattaccaggagcagaccgaccccgtggaatacgtagaaaacatgtgcgaaaacatgcaactataccctctgcaggacatcttaactggcgaccagctccttttcgagtataagcccgaagttattggtgaggccctcaaccagctggtgcctcaaaaggccaatctggttttgctcagtggagccaatgaggggaagtgtgatctcaaggagaagtggttcggaacacaatactccatcgaggatatcgaaaacagctgggcagagctctggaactcaaacttcgaactgaacccagatctgcacctgcccgctgagaataagtatattgcaacagacttcaccctgaaggccttcgattgcccagagaccgaatatcccgttaagattgttaataccccacagggctgtctgtggtacaagaaagataacaagtttaaaatacccaaagcctatattagattccaccttatctccccgttaattcagaaatccgcagccaatgtggttttatttgacatcttcgtgaacatactcacacataatttagccgaacctgcctacgaagccgacgtcgcccagttggaatataagttagtcgcgggagaacacggccttattatacgagtgaaaggcttcaaccataagctgccactactcttccagttaatcatcgattacttggctgaattcaactcaacgccagctgtcttcactatgatcacggaacagctgaaaaagacctatttcaacatcctaataaagccggagaccttggccaaggacgtccgtttgttgatcttggagtacgcccgatggtccatgattgataagtaccaggcacttatggatggtctcagccttgaaagtctgctctcattcgtgaaggagttcaagtcacagctgttcgtagagggtctggttcagggcaatgtaacctcaaccgtgctgtgtcagtgggcccaagattctgaaacctag

SEQ ID NO: 338060 - DNA, 2244 bp, Artificial Sequence
  derived and/or modified sequence
atggagggtaagaccggtaataccaccgatgatgaagaggaagaggaggttgaagaggaggaagaggacgacgatgaggacagcggtgctgaaatagaggacgatgatgaggaagggttcgacgatgaagatgagttcgatgatgagcacgacgatgatcttgatactgaggacaatgagctcgaagagttagaagagagggcggaagccagaaagaaaactacagagaagcagagtgccgcagccttatgcgtgggggtggggagctttgcagaccccgatgacctgcctggcctcgcgcatttcttggagcacatggtgtttatgggatctttgaaatacccggatgagaacggttttgatgcgttcctcaagaaacatggtggatctgataacgctagtacggattgcgaacgcacagttttccagttcgatgtgcaaagaaagtactttaaagaagccctggacaggtgggcacagtttttcatccaccctctgatgattcgggacgccattgacagagaggttgaagccgtagatagcgagtatcagctggctagaccgagcgacgcaaaccgaaaggaaatgttgtttgggtcattggctaggcccggacacccaatggggaaattcttctggggtaatgccgagaccctgaaacacgaacctcgcaaaaacaatatcgatacccacgcgagactccgtgagttttggatgcgatactactctagccattatatgacactggtggttcaaagtaaggagaccttagatactctggaaaagtgggtgacagagattttcagccagattccaaacaatggcctgccacgccctaattttggtcatctgaccgacccttttgatacaccggcttttaacaaactgtacagggtggtccccatcaggaagattcacgccctgaccattacatgggccctgcccccacagcagcagcactatagagtgaagccactccactacatctcttggttggttggccacgagggtaagggttcaatcctttctttccttagaaagaaatgctgggccctggctctgttcgggggtaatggagaaaccggatttgaacaaaattctacgtattcagttttttccattagcataactctgaccgacgagggctacgaacatttttacgaagtggcttacaccgtgtttcaatacctgaaaatgctccagaaattagggcctgagaagagaatatttgaggagattcgcaaaattgaggataatgaattccattaccaggaacagaccgaccctgtggaatatgtggaaaatatgtgtgagaatatgcagttgtaccctctgcaggacatactaaccggtgaccagctgttgtttgaatataaacccgaggtgatcggggaggccctgaaccagttagtgccgcagaaagccaatctcgtgctgctttctggtgcgaacgaaggcaaatgtgatctgaaagagaaatggtttgggacgcagtattcgatcgaagatattgaaaactcttgggccgaattgtggaattcaaatttcgaactcaaccctgacctgcacctgcctgccgaaaataaatatatcgccacagattttaccttgaaagccttcgactgccctgaaaccgaatatcccgtgaagatcgtgaataccccccagggttgcctgtggtataaaaaagacaataaatttaaaattcccaaggcttacatccgttttcacctcatctcccctttgattcagaaatccgctgccaatgtggttctgtttgatatattcgttaacattctcacgcacaaccttgctgagcctgcatacgaggcggatgtggctcagttagagtataaactcgtggctggggaacatggactcattatcagggtgaagggttttaatcacaaactgccactgttgtttcagcttattatagactatttggcagaatttaacagtacccctgcggtgttcacaatgattaccgagcagctgaagaagacctactttaatatcctaattaaacccgaaaccttggcaaaggacgtgcgattgttgatcctggagtacgccagatggtccatgattgacaaatatcaggcactcatggacggtttgagtttggaaagtctcctctcattcgtgaaggaattcaagtcacaattgtttgttgagggcctggtccaaggtaatgtcaccagcacagtactttgtcagtgggctcaggactcggagacttag

SEQ ID NO: 338061 - DNA, 2244 bp, Artificial Sequence
  derived and/or modified sequence
atggagggcaagaccggcaacaccaccgacgacgaggaggaggaggaggtggaggaggaggaggaggacgacgacgaggacagcggcgccgagatcgaggacgacgacgaggagggcttcgacgacgaggacgagttcgacgacgagcacgacgacgacctggacaccgaggacaacgagctggaggagctggaggagagagccgaggccagaaagaagaccaccgagaagcagagcgccgccgccctgtgcgtgggcgtgggcagcttcgccgaccccgacgacctgcccggcctggcccacttcctggagcacatggtgttcatgggcagcctgaagtaccccgacgagaacggcttcgacgccttcctgaagaagcacggcggcagcgacaacgccagcaccgactgcgagagaaccgtgttccagttcgacgtgcagagaaagtacttcaaggaggccctggacagatgggcccagttcttcatccaccccctgatgatcagagacgccatcgacagagaggtggaggccgtggacagcgagtaccagctggccagacccagcgacgccaacagaaaggagatgctgttcggcagcctggccagacccggccaccccatgggcaagttcttctggggcaacgccgagaccctgaagcacgagcccagaaagaacaacatcgacacccacgccagactgagagagttctggatgagatactacagcagccactacatgaccctggtggtgcagagcaaggagaccctggacaccctggagaagtgggtgaccgagatcttcagccagatccccaacaacggcctgcccagacccaacttcggccacctgaccgaccccttcgacacccccgccttcaacaagctgtacagagtggtgcccatcagaaagatccacgccctgaccatcacctgggccctgcccccccagcagcagcactacagagtgaagcccctgcactacatcagctggctggtgggccacgagggcaagggcagcatcctgagcttcctgagaaagaagtgctgggccctggccctgttcggcggcaacggcgagaccggcttcgagcagaacagcacctacagcgtgttcagcatcagcatcaccctgaccgacgagggctacgagcacttctacgaggtggcctacaccgtgttccagtacctgaagatgctgcagaagctgggccccgagaagagaatcttcgaggagatcagaaagatcgaggacaacgagttccactaccaggagcagaccgaccccgtggagtacgtggagaacatgtgcgagaacatgcagctgtaccccctgcaggacatcctgaccggcgaccagctgctgttcgagtacaagcccgaggtgatcggcgaggccctgaaccagctggtgccccagaaggccaacctggtgctgctgagcggcgccaacgagggcaagtgcgacctgaaggagaagtggttcggcacccagtacagcatcgaggacatcgagaacagctgggccgagctgtggaacagcaacttcgagctgaaccccgacctgcacctgcccgccgagaacaagtacatcgccaccgacttcaccctgaaggccttcgactgccccgagaccgagtaccccgtgaagatcgtgaacaccccccagggctgcctgtggtacaagaaggacaacaagttcaagatccccaaggcctacatcagattccacctgatcagccccctgatccagaagagcgccgccaacgtggtgctgttcgacatcttcgtgaacatcctgacccacaacctggccgagcccgcctacgaggccgacgtggcccagctggagtacaagctggtggccggcgagcacggcctgatcatcagagtgaagggcttcaaccacaagctgcccctgctgttccagctgatcatcgactacctggccgagttcaacagcacccccgccgtgttcaccatgatcaccgagcagctgaagaagacctacttcaacatcctgatcaagcccgagaccctggccaaggacgtgagactgctgatcctggagtacgccagatggagcatgatcgacaagtaccaggccctgatggacggcctgagcctggagagcctgctgagcttcgtgaaggagttcaagagccagctgttcgtggagggcctggtgcagggcaacgtgaccagcaccgtgctgtgccagtgggcccaggacagcgagacctag

SEQ ID NO: 338062 - DNA, 1167 bp, Artificial Sequence
  derived and/or modified sequence
atgctgtttgaatatataaaccagggagaccttcatgagttcctcatcatgcggtctccgcattccgacgtgggctgctcttcagatgaagatggcactgttaaaagtagcctcgatcacggagacttcctgcatatcgcaatccagattgcggccggtatggagtatctctccagccattttttcgtgcataaggatctggccgcacgaaacatcctcataggggagcagctacacgtgaaaatcagcgacctcgggcttagcagagaaatttatagcgcagattactaccgcgtgcagtctaagagcctcctgccaatcaggtggatgcccccggaggccataatgtacgggaagtttagctctgatagcgacatttggagctttggtgttgtgctttgggagattttctccttcgggttacagccgtactatggcttcagcaaccaggaagtgatagagatggtgcgcaaacggcaactgcttccttgcagcgaggattgtccgccccgcatgtattccctgatgaccgagtgctggaatgagattcctagtcggcggcctcggtttaaagacatccatgtaaggttacgatcctgggaaggattgagcagccacacgtcttcgacaacacccagcggcgggaacgctaccacccagacaacctctctttctgcctcacccgtgtccaacctctcaaatcccagatatcctaactatatgttcccttcgcagggcatcaccccccagggacagatcgcgggctttatcggcccacccatccctcagaaccagcggttcatacccatcaacgggtacccgatccctcccggctatgccgcattcccggccgcgcactatcagcctacaggccccccgcgggtcatccagcattgccccccccccaagagtaggtcgccatcttcagcttcgggctctacgtctactggtcatgttacctctctgccctcctccggatctaatcaagaggccaacatcccactcctcccacatatgtctatccccaatcacccaggaggcatgggcattactgtgttcggaaataagtcacaaaaaccttacaagatagattcaaagcaggcctcacttcttggtgacgctaacattcacgggcacaccgagtctatgatttccgctgaactgtag

SEQ ID NO: 338063 - DNA, 1167 bp, Artificial Sequence
  derived and/or modified sequence
atgctgtttgagtacatcaaccagggcgacctgcacgagttcctgatcatgaggagcccccacagtgatgtgggctgcagcagtgatgaagatggcaccgtgaagagcagcctggaccacggggacttcctgcacatcgccatccagattgctgctggcatggagtacctgagcagccacttctttgtgcacaaggacctggccgccaggaacatcctgattggagagcagctgcacgtgaagatcagtgacctgggcctgagccgggagatctacagcgctgactactacagagtgcagagcaagagcctgctgcccatccgctggatgcctcctgaggccatcatgtatggcaagttcagcagtgacagcgacatctggagctttggagtggtgctgtgggagatcttctcctttggcctgcagccctactacggcttcagcaaccaggaggtgattgagatggtgaggaagaggcagctgctgccctgcagcgaggactgcccccccaggatgtacagcctgatgacagagtgctggaatgagatccccagccggcggccccgcttcaaggacatccacgtgcggctgcgctcctgggagggcctgagcagccacaccagcagcaccaccccatctggaggaaatgccaccacccagaccaccagcctgagcgccagccctgtgagcaacctgagcaacccccgctaccccaactacatgttccccagccagggcatcaccccccagggccagattgctggcttcatcggcccccccatcccccagaaccagcgcttcatccccatcaatggctaccccatccccccaggctacgccgccttccctgctgcccactaccagcccaccggcccccccagggtcatccagcactgccccccacccaagagccgcagccccagcagcgccagcggcagcaccagcacaggccacgtgaccagcctgcccagcagcggcagcaaccaggaggccaacatccccctgctgccccacatgagcatccccaaccaccctgggggcatgggcatcaccgtgtttggaaacaagagccagaagccctacaagattgacagcaagcaggccagcctgctgggagatgccaacatccacggccacacagagagcatgatctctgctgagctgtag

SEQ ID NO: 338064 - DNA, 1167 bp, Artificial Sequence
  derived and/or modified sequence
atgctgttcgagtacatcaaccagggcgacctgcacgagttcctgataatgcgctcaccacattcggatgtcggatgttccagcgacgaagacggtaccgttaaaagtagcctcgatcatggtgactttcttcacattgcaattcagatagctgccggaatggagtacttgagttctcatttctttgttcacaaggacctcgcagctcgaaacatcctaattggcgaacaactgcacgttaaaatttcggatctgggcctgtcccgagagatatacagtgcagactattatcgagtccagagtaaaagcctcctcccaattagatggatgccgccagaggctatcatgtacggcaagttctcctcagatagtgacatctggtcatttggcgtcgttctctgggagatcttttccttcggcttgcaaccctattatggattttccaaccaggaggtcatcgagatggtgagaaagcgccagctgctgccctgctccgaggactgccctccgagaatgtactctctcatgaccgagtgttggaacgagatccccagtcgccgcccacgattcaaagatatccatgtgaggttgcgctcctgggaaggactttccagccacacttccagtaccaccccctccgggggaaacgcgactactcagaccacttcattaagtgcttctccagttagcaatctcagcaatccccgatatccgaattatatgttccccagccagggcatcactccgcaaggacagatcgcagggttcattggaccacctattccccagaaccagcggttcatccccatcaacgggtacccaataccaccaggatatgcagcattcccggccgcacactaccagcccacaggaccccccagagtaattcagcactgcccgcctcccaaatccaggtcaccctcgtctgcatccggaagtacctccacggggcatgtcacgagcctacccagcagtgggtcaaatcaagaagccaacatccctctgctaccccatatgtcgatcccaaatcatccaggtggaatgggaatcactgtgttcggcaataagtcacagaagccctacaagatcgactccaagcaagcctctcttcttggggacgcgaatatccacggtcataccgaatctatgattagcgcagagctctag

SEQ ID NO: 338065 - DNA, 1167 bp, Artificial Sequence
  derived and/or modified sequence
atgctgttcgagtacattaaccaaggagatctccacgagttcctaatcatgcgcagtccccacagcgacgtgggttgctcctcagatgaagatgggacggttaagagctctttagaccacggagacttcctccatattgctatacagattgctgcaggcatggagtacctgtccagccatttcttcgtgcacaaggacctagccgctcggaatattcttatcggcgaacagcttcatgtcaagatttccgacctgggtttgagccgcgagatttattcagccgattactatagagtgcagtcaaagtcacttttgcccatcagatggatgcccccagaggcaatcatgtatggaaagttcagctcggacagtgatatatggtcttttggagtcgtcctatgggagatctttagttttggactccagccctattacggctttagcaaccaagaggttattgagatggtgcgaaagcgccagctattgccttgttcagaagactgcccccctcgcatgtactctctgatgaccgagtgctggaacgaaatcccctctaggagaccacgttttaaagacatccacgtgcgcctccgtagctgggaaggcctgagcagccacacatcaagtaccactccctccggcggtaacgccaccacccagaccactagtctgtccgcaagtccagtcagcaatctctcgaatccacggtacccaaactatatgtttccttcgcagggcattaccccccaaggacaaattgccggtttcattggaccacctatcccacagaatcaaagatttatacctattaatgggtaccccattcctcctgggtatgcggctttccccgcagcccactatcaacccaccggtcccccaagggtgatccagcactgtccgcctcctaagagcagaagccccagttccgcatccggatccactagcacgggacatgtgacctcacttcccagttcaggctcgaaccaggaagcaaatatcccccttctgcctcacatgagcatccccaaccatcctgggggtatgggtatcactgtgtttgggaacaaatcccaaaaaccttacaagattgactctaagcaggctagtctactgggtgatgctaacatacatggccacaccgaaagcatgatttccgccgagctgtag

SEQ ID NO: 338066 - DNA, 1167 bp, Artificial Sequence
  derived and/or modified sequence
atgctgttcgagtacatcaaccagggcgacctgcacgagttcctgatcatgagaagcccccacagcgacgtgggctgcagcagcgacgaggacggcaccgtgaagagcagcctggaccacggcgacttcctgcacatcgccatccagatcgccgccggcatggagtacctgagcagccacttcttcgtgcacaaggacctggccgccagaaacatcctgatcggcgagcagctgcacgtgaagatcagcgacctgggcctgagcagagagatctacagcgccgactactacagagtgcagagcaagagcctgctgcccatcagatggatgccccccgaggccatcatgtacggcaagttcagcagcgacagcgacatctggagcttcggcgtggtgctgtgggagatcttcagcttcggcctgcagccctactacggcttcagcaaccaggaggtgatcgagatggtgagaaagagacagctgctgccctgcagcgaggactgcccccccagaatgtacagcctgatgaccgagtgctggaacgagatccccagcagaagacccagattcaaggacatccacgtgagactgagaagctgggagggcctgagcagccacaccagcagcaccacccccagcggcggcaacgccaccacccagaccaccagcctgagcgccagccccgtgagcaacctgagcaaccccagataccccaactacatgttccccagccagggcatcaccccccagggccagatcgccggcttcatcggcccccccatcccccagaaccagagattcatccccatcaacggctaccccatcccccccggctacgccgccttccccgccgcccactaccagcccaccggcccccccagagtgatccagcactgccccccccccaagagcagaagccccagcagcgccagcggcagcaccagcaccggccacgtgaccagcctgcccagcagcggcagcaaccaggaggccaacatccccctgctgccccacatgagcatccccaaccaccccggcggcatgggcatcaccgtgttcggcaacaagagccagaagccctacaagatcgacagcaagcaggccagcctgctgggcgacgccaacatccacggccacaccgagagcatgatcagcgccgagctgtag

SEQ ID NO: 338067 - protein, 392 aa, Artificial Sequence
  derived and/or modified sequence
MGVNQSVGFPPVTGPHLVGCGDVMEGQNLQGSFFRLFYPCQKAEETMEQPLWIPRYEYCTGLAEYLQFNKRCGGLLFNLAVGSCRLPVSWNGPFKTKDSGYPLIIFSHGLGAFRTLYSAFCMELASRGFVVAVPEHRDRSAATTYFCKQAPEENQPTNESLQEEWIPFRRVEEGEKEFHVRNPQVHQRVSECLRVLKILQEVTAGQTVFNILPGGLDLMTLKGNIDMSRVAVMGHSFGGATAILALAKETQFRCAVALDAWMFPLERDFYPKARGPVFFINTEKFQTMESVNLMKKICAQHEQSRIITVLGSVHRSQTDFAFVTGNLIGKFFSTETRGSLDPYEGQEVMVRAMLAFLQKHLDLKEDYNQWNNLIEGIGPSLTPGAPHHLSSL

SEQ ID NO: 338068 - protein, 186 aa, Artificial Sequence [sequence omitted]

SEQ ID NO: 338069 - protein, 165 aa, Artificial Sequence
  derived and/or modified sequence
MGVNQSVGFPPVTGPHLVGCGDVMEGQNLQGSFFRLFYPCQKAEETMEQPLWIPRYEYCTGLAEYLQFNKRCGGLLFNLAVGSCRLPVSWNGPFKTKDSGYPLIIFSHGLGAFRTLYSAFCMELASRGFVVAVPEHRDRSAATTYFCKQAPEENQPTNESLQEEW

SEQ ID NO: 338070 - DNA, 3581 bp, Artificial Sequence
  derived and/or modified sequence
cgagaagtgcttccaagcgtccattttgagccttggaaactacgacgaccaaagggccacgggttcatgggtcgtttctcatttccgtcgagttaaacgtctggggctgcttctgaggaatcagcttgactggccagcaagttcagctccggcaagtcatttgattcacccggtgatgaaatgggggtcaaccagtctgtgggctttccacctgtcacaggaccccacctcgtaggctgtggggatgtgatggagggtcagaatctccaggggagcttctttcgactcttctacccctgccaaaaggcagaggagaccatggagcagcccctgtggattccccgctatgagtactgcactggcctggccgagtacctgcagtttaataagcgctgcgggggcttgctgttcaacctggcggtgggatcttgtcgcctgcctgttagctggaatggcccctttaagacaaaggactctggataccccttgatcatcttctcccatggcctaggagccttcaggactttgtattcagccttctgcatggagctggcctcacgtggctttgtggttgctgtgccagagcacagggaccggtcagcggcaaccacctatttctgcaagcaggccccagaagagaaccagcccaccaatgaatcgctgcaggaggaatggatccctttccgtcgagttgaggaaggggagaaggaatttcatgttcggaatccccaggtgcatcagcgggtaagcgagtgtttacgggtgttgaagatcctgcaagaggtcactgctgggcagactgtcttcaacatcttgcctggtggcttggatctgatgactttgaagggcaacattgacatgagccgtgtggctgtgatgggacattcatttggaggggccacagctattctggctttggccaaggagacccaatttcggtgtgcggtggctctggatgcttggatgtttcctctggaacgtgacttttaccccaaggcccgaggacctgtgttctttatcaatactgagaaattccagacaatggagagtgtcaatttgatgaagaagatatgtgcccagcatgaacagtctaggatcataaccgttcttggttctgttcatcggagtcaaactgactttgcttttgtgactggcaacttgattggtaaattcttctccactgaaacccgtgggagcctggacccctatgaagggcaggaggttatggtacgggccatgttggccttcctgcagaagcacctcgacctgaaagaagactataatcaatggaacaaccttattgaaggcattggaccgtcgctcaccccaggggccccccaccatctgtccagcctgtaggcacaactggccatttgtaaagtcacttcagccaagttttcatttgggagctacccaagggcacccatgagctcctatcaagaagtgatcaacgtgaccccttttcacagattgaaaggtgtaatcacactgctgcttggataactgggtactttgatcttagatttgatcttaaaatcactttgggactgggatcccttgctgattgacaaacagactttctgggaccttgatggagtggggaacaagcagtagagtgggactgggggagacccaggccccgggctgagcactgtgaggcctggatgtgaagactcagcccagcgaagctcattcccttacccccggccagtgctgctgcttcagtggaagagatgaagccaaaggacagaatgaaaatccctaccttcagagactctagcccagcccaacaccatctcttcctacctctcagccttctccctccccagggccacttgttgaagtctgagcactttatgtaaatttctaggtgtgagccgtgatcacattttctatttatttccaagtcttctcattgtatggaacatagtactacttatacttacagtagtaagttatacttgtgagcccacagagtggcagacagcatggctctcacagcacagggagaaaaactgaggtacacagaggtacctcagaagctctggatgtctttgggggttttgctaagtgtatcttgataggaaacaacaaaagcaggttgagatggggaagatgacagaacaacagtgttaaatggccatttgcacaggcctttgccacaacagagaagtagtttggtcagctaaaactcagctgcagcctggacagtagagcgagaccccatcttaaaaataaagaaggctgggcgtggtggctcatgcctgtaatcccaacactttgggaggccaaggcaggcagatcacttaaggccaggagttcaagaccacctggccaacatggtgaaaccccgtctctactaaaaatacaaaaaattagcctggcgtaatggcaggcgcctataatcccagctactcaggaggctgaagcagaagaatcacttgaacctaggaggcggaggttgcagtgagtcaagatcgcgccactgcactccagcctgggtgacagagcaagactctgtcttaaaaaaaaaaaaaagaaaaagaaaaatttaaaataaataaaatttaaaaacgcagaaggccactcccagagaggcctaggagtaccttggtcattttttcttgcctcaaatattataaacctccaacttgctcagaatcagggtgcttttattgtctgttttctggctctgaggcccttgccccaaatttaagtcagatacagactgaatttccattctgttctgtttataatatgaatgatattaatactcttgtttgcttaatgttatgttggaattttctgtttaatctgcagtagagcaagatggagagccatctggaattgacttccttctgtctttcttctgtgttcgcttactacttgggcccatgtgggaaaaaaactttaaaaggaaggaagtcttcttagggatccagttcaaagctatttgggggcatcaaactgaaactctcttctccactactcaagacttcgtgcctcagtccaagtaggtaagagcaaaagggaaatgcatctctacacaatggcccatggtcagggccaccagagcaagctgggcctagatctccacctgtcagtgactggccattctaagaggtgaaacagcagatcgttgaggctgtgagggaggatctttgaattcccatgagacatagcataagaagggtatcattaaagccctgggctctaaagttacagagcctggttttgagtcctggctccaccactgccaactgggtaaatttgagcaaatggtattctctttcttatctcagctcctgcgtttctaaaatgagggtctgcgttatgaatagttaggaggattaagtgagaggatgtataacccatgggttacttaaaagtatatttcctaccttccaaacatgagatttttctagttatagtttcttttctagcttgattgctttgtggtcagagaaaatgacccatatggtttccatccttcaaaatttgttgaaacttggttgttggcctagtatgagatcaatgttgtaaatgtgccatgtatgtttaaaaagactatatattctgaa

SEQ ID NO: 338071 - DNA, 2523 bp, Artificial Sequence
  derived and/or modified sequence
tgaggaatcagcttgactggcaacaggaagccgagaggaaaccagcaagcggctgctgttctgtgttcccccatccagccagcaagttcagctccggcaagtcatttgattcacccggtgatgaaatgggggtcaaccagtctgtgggctttccacctgtcacaggaccccacctcgtaggctgtggggatgtgatggagggtcagaatctccaggggagcttctttcgactcttctacccctgccaaaaggcagaggagaccatggagcagcccctgtggattccccgctatgagtactgcactggcctggccgagtacctgcagtttaataagcgctgcgggggcttgctgttcaacctggcggtgggatcttgtcgcctgcctgttagctggaatggcccctttaagacaaaggactctggataccccttgatcatcttctcccatggcctaggagccttcaggactttgtattcagccttctgcatggagctggcctcacgtggctttgtggttgctgtgccagagcacagggaccggtcagcggcaaccacctatttctgcaagcaggccccagaagagaaccagcccaccaatgaatcgctgcaggaggaatggatccctttccgtcgagttgaggaaggggagaaggaatttcatgttcggaatccccaggtgcatcagcgggtaagcgagtgtttacgggtgttgaagatcctgcaagaggtcactgctgggcagactgtcttcaacatcttgcctggtggcttggatctgatgactttgaagggcaacattgacatgagccgtgtggctgtgatgggacattcatttggaggggccacagctattctggctttggccaaggagacccaatttcggtgtgcggtggctctggatgcttggatgtttcctctggaacgtgacttttaccccaaggcccgaggacctgtgttctttatcaatactgagaaattccagacaatggagagtgtcaatttgatgaagaagatatgtgcccagcatgaacagtctaggatcataaccgttcttggttctgttcatcggagtcaaactgactttgcttttgtgactggcaacttgattggtaaattcttctccactgaaacccgtgggagcctggacccctatgaagggcaggaggttatggtacgggccatgttggccttcctgcagaagcacctcgacctgaaagaagactataatcaatggaacaaccttattgaaggcattggaccgtcgctcaccccaggggccccccaccatctgtccagcctgtaggcacaactggccatttgtaaagtcacttcagccaagttttcatttgggagctacccaagggcacccatgagctcctatcaagaagtgatcaacgtgaccccttttcacagattgaaaggtgtaatcacactgctgcttggataactgggtactttgatcttagatttgatcttaaaatcactttgggactgggatcccttgctgattgacaaacagactttctgggaccttgatggagtggggaacaagcagtagagtgggactgggggagacccaggccccgggctgagcactgtgaggcctggatgtgaagactcagcccagcgaagctcattcccttacccccggccagtgctgctgcttcagtggaagagatgaagccaaaggacagaatgaaaatccctaccttcagagactctagcccagcccaacaccatctcttcctacctctcagccttctccctccccagggccacttgttgaagtctgagcactttatgtaaatttctaggtgtgagccgtgatcacattttctatttatttccaagtcttctcattgtatggaacatagtactacttatacttacagtagtaagttatacttgtgagcccacagagtggcagacagcatggctctcacagcacagggagaaaaactgaggtacacagaggtacctcagaagctctggatgtctttgggggttttgctaagtgtatcttgataggaaacaacaaaagcaggttgagatggggaagatgacagaacaacagtgttaaatggccatttgcacaggcctttgccacaacagagaagtagtttggtcagctaaaactcagctgcagcctggacagtagagcgagaccccatcttaaaaataaagaaggctgggcgtggtggctcatgcctgtaatcccaacactttgggaggccaaggcaggcagatcacttaaggccaggagttcaagaccacctggccaacatggtgaaaccccgtctctactaaaaatacaaaaaattagcctggcgtaatggcaggcgcctataatcccagctactcaggaggctgaagcagaagaatcacttgaacctaggaggcggaggttgcagtgagtcaagatcgcgccactgcactccagcctgggtgacagagcaagactctgtcttaaaaaaaaaaaaaagaaaaagaaaaatttaaaataaataaaatttaaaaacgca

SEQ ID NO: 338072 - DNA, 787 bp, Artificial Sequence
  derived and/or modified sequence
cttgactggaagggtccccattccttctttccgatccgcgattaccctggactcgaagtcagcagacccggttctaggccagctctgcctctcaccctctgtgaccttgggcaaatcatacaactctgggactcagtttcttcctctctaaaacggagatgactgttgctccatcagtctcagccagcaagttcagctccggcaagtcatttgattcacccggtgatgaaatgggggtcaaccagtctgtgggctttccacctgtcacaggaccccacctcgtaggctgtggggatgtgatggagggtcagaatctccaggggagcttctttcgactcttctacccctgccaaaaggcagaggagaccatggagcagcccctgtggattccccgctatgagtactgcactggcctggccgagtacctgcagtttaataagcgctgcgggggcttgctgttcaacctggcggtgggatcttgtcgcctgcctgttagctggaatggcccctttaagacaaaggactctggataccccttgatcatcttctcccatggcctaggagccttcaggactttgtattcagccttctgcatggagctggcctcacgtggctttgtggttgctgtgccagagcacagatgtgtgtatttcagggaccggtcagcggcaaccacctatttctgcaagcaggccccagaagagaaccagcccaccaatgaatcgctgcaggaggaatggatccctttccgtcgagttgaggaaggggagaaggaatttcatgttcg

SEQ ID NO: 338073 - DNA, 748 bp, Artificial Sequence
  derived and/or modified sequence
ggggctgcttctgaggaatcagcttgactggaagggtccccattccttctttccgatccgcgattaccctggactcgaagtcagcagacccggttctaggccagctctgcctctcaccctctgtgaccttgggcaaatcatacaactctgggactcagtttcttcctctctaaaacggagatgactgttgctccatcagtctcagccagcaagttcagctccggcaagtcatttgattcacccggtgatgaaatgggggtcaaccagtctgtgggctttccacctgtcacaggaccccacctcgtaggctgtggggatgtgatggagggtcagaatctccaggggagcttctttcgactcttctacccctgccaaaaggcagaggagaccatggagcagcccctgtggattccccgctatgagtactgcactggcctggccgagtacctgcagtttaataagcgctgcgggggcttgctgttcaacctggcggtgggatcttgtcgcctgcctgttagctggaatggcccctttaagacaaaggactctggataccccttgatcatcttctcccatggcctaggagccttcaggactttgtattcagccttctgcatggagctggcctcacgtggctttgtggttgctgtgccagagcacagggaccggtcagcggcaaccacctatttctgcaagcaggccccagaagagaaccagcccaccaatgaatcgctgcaggaggaatgga

SEQ ID NO: 338074 - protein, 253 aa, Artificial Sequence
  derived and/or modified sequence
KKDEKDQSKEKEKKVKKTIPSWATLSASQLARAQKQTPMASSPRPKMDAILTEAIKACFQKSGASVVAIRKYIIHKYPSLELERRGYLLKQALKRELNRGVIKQNRSSAVDPEPQVKLEDVLPLAFTRLCEPKEASYSLIRKYVSQYYPKLRVDIRPQLLKNALQRAVERGQLEQITGKGASGTFQLKKSGEKPLLGGSLMEYAILSAIAAMNEPKTCSTTALKKYVLENHPGTNSNYQMHLLKKTLQKCEKN

SEQ ID NO: 338075 - protein, 278 aa, Artificial Sequence
  derived and/or modified sequence
MPIRRTVNSTRETPPKSKLAEGEEEKPEPDISSEESVSTVEEQENETPPATSSEAEQPKGEPENEEKEENKSSEETKKDEKDQSKEKEKKVKKTIPSWATLSASQLARAQKQTPMASSPRPKMDAILTEAIKACFQKSGASVVAIRKYIIHKYPSLELERRGYLLKQALKRELNRGVIKQVKGKGASGSFVVVQKSRKTPQKSRNRKNRSSAVDPEPQVKLEDVLPLAFTRLCEPKEASYSLIRKYVSQYYPKLRVDIRPQLLKNALQRAVERGQLEQ

SEQ ID NO: 338076 - DNA, 1206 bp, Artificial Sequence
  derived and/or modified sequence
atggcttctagcccccggcccaagatggatgctattctcactgaggcaattaaggcgtgcttccagaaatctggtgcctctgtagtggccatccgcaagtacattatacacaagtaccccagcttggagctggagagacgggggtatttgctgaagcaggctcttaagagggaactgaacagaggcgtcattaaacaggtgaagggcaaaggtgccagcgggagcttcgtggttgtgcaaaagagtaggaaaactccacagaaaagtcgcaatcggaagaatagatcctctgctgtagacccggagcctcaggtgaagctcgaggacgtgttgcccctggcctttactagactgtgtgaaccaaaggaggcaagctattcactgatccgaaagtacgtgtcccagtactatccgaagctgcgggtggatatacggccccagctgttaaaaaatgctcttcagcgtgccgtggagcggggacagctagagcaaatcacaggtaaaggcgcctcggggacatttcagttaaaaaagtctggcgagaaaccactccttggcggttccctgatggagtatgctattcttagtgcaatagccgccatgaacgaacctaaaacatgtagcacaactgccctgaaaaaatacgtgctggaaaatcatcccggaactaattccaattaccagatgcacctgcttaaaaaaactctgcagaaatgcgaaaaaaacgggtggatggaacaaatatccggcaaaggtttctctggtacctttcagttatgttttccgtattatccgtcacccggtgttctttttcctaagaaggaacctgacgatagtagagacgaagacgaggatgaggacgagtctagcgaggaagactccgaagacgaagagcccccccccaaacggaggctacaaaagaagaccccagcaaaatctcccgggaaagccgcgtcggtaaaacagcgcggctcgaaacccgcacctaaggtgagtgccgctcagagaggaaaagcccgacctttacctaagaaggctccccccaaggccaagactccagcaaaaaaaactagacccagcagtacagttataaagaagccatcggggggttcatctaagaagccagctaccagcgcccggaaggaagtgaagttgccggggaaaggcaagagcacgatgaagaaatcattccgcgtgaaaaagtag

SEQ ID NO: 338077 - DNA, 1548 bp, Artificial Sequence
  derived and/or modified sequence
atgcctattaggcgcaccgtgaatagcacacgcgaaactcccccaaagagtaagctcgccgaaggagaggaggagaaacccgaaccagacattagcagcgaagagtctgtgtccacagtcgaagaacaggagaacgagacaccacccgctacctcgagcgaggccgagcagcccaagggcgagcccgagaatgaagaaaaggaggaaaacaagtctagcgaagagacgaaaaaagacgagaaggaccagtcaaaggaaaaggaaaagaaagtcaaaaagaccattccgtcttgggccaccttatcagcatctcagttggccagagcccagaagcaaactccgatggcttctagtccacgacccaaaatggatgccatccttaccgaggccataaaagcttgcttccagaagagcggagcatccgttgtggccataaggaaatacataatccacaaataccctagcttggaactggaacgtcggggttatttgctgaagcaggctctgaaaagggaacttaatcgcggggttatcaaacaggtcaaggggaaaggtgccagtgggagttttgtagtggtacagaagagtcgtaagactcctcagaagtccagaaacaggaagaataggagtagcgctgttgaccccgaacctcaagttaagttagaggacgtgctacctctggcctttacccgattgtgtgaacccaaagaggccagttatagcttgattcggaaatatgtctctcagtactatcccaaactgcgagtggacatccggccccagctgcttaagaacgctctccaaagggccgtggagcgtgggcagctagagcaaataaccggcaaaggagcatcaggaacatttcagctcaaaaaatctggggaaaaaccactcctggggggaagcctgatggagtacgctatcctatcagccatcgccgccatgaacgagccaaaaacctgttctactactgccctgaagaagtatgtcttggagaaccatcctggcacaaatagtaattaccagatgcatctgcttaaaaaaaccctgcagaagtgtgagaagaacgggtggatggagcaaatatctgggaagggattttcaggtacttttcagctctgttttccttactaccccagtcctggcgtcctgttccccaaaaaggaacccgacgattccagagacgaagacgaggacgaggatgagtcaagtgaagaggattcagaggacgaggagccccctccgaaacgaaggcttcagaaaaaaacccccgcaaagtctccaggaaaggccgctagtgtgaagcaacggggctccaagccagcgcccaaggtgagtgctgcccagagaggcaaggcgcgccctctacccaagaaggccccccccaaggccaagacacctgccaaaaaaactcgtccctcatccactgtcatcaagaagccctccgggggatcctccaagaaacccgcaacttctgctaggaaggaagtgaagctgcctgggaaaggcaaatccactatgaagaaatccttcagggttaagaaatag

SEQ ID NO: 338078 - DNA, 762 bp, Artificial Sequence
  derived and/or modified sequence
aaaaaagacgagaaagaccagtccaaggaaaaggagaagaaggttaagaaaactattccgagttgggcaactctgtctgccagccagctggccagggcccagaaacaaacgcccatggcttcttccccacgccctaaaatggacgcgatcctgaccgaagctatcaaggcctgcttccaaaagtctggtgcgtcagtggtcgccatacgcaagtatatcatacacaagtacccttcgctggagctggagcgacggggatacctcctgaaacaggcccttaagcgggaactcaaccggggggtgattaaacagaaccgctcctctgcagttgacccagaaccacaggtcaagctagaggatgtgctgcccctggcttttactaggctttgcgagcccaaggaagcctcctactcactgattagaaagtacgtgtctcaatactaccctaagctgagagtggatatccgcccacagctgctcaagaacgcgctgcaacgtgccgtcgagcggggtcagctggagcagatcaccggaaagggggccagcggaacctttcagctgaaaaaaagcggcgagaagccccttctggggggcagcctgatggagtacgccatactgtctgccattgcagccatgaacgagcccaagacatgctccaccactgccctgaaaaaatacgtgctcgaaaatcacccgggcacgaatagtaattatcagatgcacttgctgaagaaaacgttgcagaaatgcgaaaaaaattag

SEQ ID NO: 338079 - DNA, 1206 bp, Artificial Sequence
  derived and/or modified sequence
atggccagcagcccccggcccaagatggatgccatcctgacagaggccatcaaggcctgcttccagaagagcggggcctctgtggtggccatcaggaagtacatcatccacaagtaccccagcctggagctggagcggcggggctacctgctgaagcaggccctgaagcgggagctgaacagaggagtcatcaagcaggtgaagggcaagggggccagcggcagctttgtggtggtgcagaagagcaggaagaccccccagaagagcaggaacaggaagaacagaagcagcgctgtggaccctgagccccaggtgaagctggaggatgtgctgcccctggccttcacccggctgtgtgagcccaaggaggccagctacagcctcatcagaaaatatgtgtcccagtactaccccaagctgcgggtggacatccggccccagctgctgaagaatgccctgcagagagctgtggagcggggccagctggagcagatcaccgggaagggggccagcggcaccttccagctgaagaagtctggagagaagcccctgctgggcggcagcctgatggagtatgccatcctgagcgccatcgccgccatgaatgagcccaagacctgcagcaccacagccctgaagaagtatgtgctggagaaccaccctggcaccaacagcaactaccagatgcacctgctgaagaagaccctgcagaagtgtgagaagaatggctggatggagcagatcagcggcaagggcttcagcggcaccttccagctgtgcttcccctactaccccagccctggggtgctcttccccaagaaggagccagatgacagcagagatgaagatgaagatgaagatgagagcagcgaggaggacagtgaagatgaggagcccccacccaagaggcggctgcagaagaagaccccagccaagagccctgggaaggccgcctctgtgaagcagaggggcagcaagccagcccccaaggtgtctgctgcccagaggggcaaggcccggcccctgcccaagaaggccccacccaaggccaagaccccagccaagaagacccggcccagcagcaccgtcatcaagaagcccagcggcggcagcagcaagaagccagccaccagcgccaggaaggaggtgaagctgcccgggaagggcaagagcaccatgaagaagagcttccgggtgaagaagtag

SEQ ID NO: 338080 - DNA, 1548 bp, Artificial Sequence
  derived and/or modified sequence
atgcccatccggaggacagtgaacagcacccgggagaccccacccaagagcaagctggccgagggggaggaggagaagccagagccagacatcagcagcgaggagagcgtgtccacagtggaggagcaggagaatgagaccccaccagccaccagcagcgaggccgagcagcccaagggggagccagaaaatgaggagaaggaggagaacaagagcagcgaggagaccaagaaggatgagaaggaccagagcaaggagaaggagaagaaggtgaagaagaccatccccagctgggccaccctgagcgccagccagctggcccgggcccagaagcagacccccatggccagcagcccccggcccaagatggatgccatcctgacagaggccatcaaggcctgcttccagaagagcggggcctctgtggtggccatcaggaagtacatcatccacaagtaccccagcctggagctggagcggcggggctacctgctgaagcaggccctgaagcgggagctgaacagaggagtcatcaagcaggtgaagggcaagggggccagcggcagctttgtggtggtgcagaagagcaggaagaccccccagaagagcaggaacaggaagaacagaagcagcgctgtggaccctgagccccaggtgaagctggaggatgtgctgcccctggccttcacccggctgtgtgagcccaaggaggccagctacagcctcatcagaaaatatgtgtcccagtactaccccaagctgcgggtggacatccggccccagctgctgaagaatgccctgcagagagctgtggagcggggccagctggagcagatcaccgggaagggggccagcggcaccttccagctgaagaagtctggagagaagcccctgctgggcggcagcctgatggagtatgccatcctgagcgccatcgccgccatgaatgagcccaagacctgcagcaccacagccctgaagaagtatgtgctggagaaccaccctggcaccaacagcaactaccagatgcacctgctgaagaagaccctgcagaagtgtgagaagaatggctggatggagcagatcagcggcaagggcttcagcggcaccttccagctgtgcttcccctactaccccagccctggggtgctcttccccaagaaggagccagatgacagcagagatgaagatgaagatgaagatgagagcagcgaggaggacagtgaagatgaggagcccccacccaagaggcggctgcagaagaagaccccagccaagagccctgggaaggccgcctctgtgaagcagaggggcagcaagccagcccccaaggtgtctgctgcccagaggggcaaggcccggcccctgcccaagaaggccccacccaaggccaagaccccagccaagaagacccggcccagcagcaccgtcatcaagaagcccagcggcggcagcagcaagaagccagccaccagcgccaggaaggaggtgaagctgcccgggaagggcaagagcaccatgaagaagagcttccgggtgaagaagtag

SEQ ID NO: 338081 - DNA, 762 bp, Artificial Sequence
  derived and/or modified sequence
aagaaggatgagaaggaccagagcaaggagaaggagaagaaggtgaagaagaccatccccagctgggccaccctgagcgccagccagctggcccgggcccagaagcagacccccatggccagcagcccccggcccaagatggatgccatcctgacagaggccatcaaggcctgcttccagaagagcggggcctctgtggtggccatcaggaagtacatcatccacaagtaccccagcctggagctggagcggcggggctacctgctgaagcaggccctgaagcgggagctgaacagaggagtcatcaagcagaacagaagcagcgctgtggaccctgagccccaggtgaagctggaggatgtgctgcccctggccttcacccggctgtgtgagcccaaggaggccagctacagcctcatcagaaaatatgtgtcccagtactaccccaagctgcgggtggacatccggccccagctgctgaagaatgccctgcagagagctgtggagcggggccagctggagcagatcactggaaaaggagccagcggcaccttccagctgaagaagagcggggagaagcccctgctgggcggcagcctgatggagtatgccatcctgagcgccatcgccgccatgaatgagcccaagacctgcagcaccacagccctgaagaagtatgtgctggagaaccaccctggcaccaacagcaactaccagatgcacctgctgaagaagaccctgcagaagtgtgagaagaactag

SEQ ID NO: 338082 - DNA, 1206 bp, Artificial Sequence
  derived and/or modified sequence
atggccagcagcccccggcccaagatggacgccatcctgaccgaggcaattaaagcgtgcttccagaagtcaggggcaagtgttgtagccattcggaagtacatcattcataaatatccctctttggagctggagagacgtggttaccttctcaaacaagccctgaagcgggagctcaaccgcggggtcataaaacaggtgaaaggcaagggcgccagcggatcattcgttgtggttcaaaaaagtcgcaaaaccccccagaagtccaggaacaggaaaaaccgtagttccgctgttgatcccgaacctcaggtcaagctggaggacgtcttgcccctggcgttcactcggttgtgtgagccgaaagaggcctcttacagtctgattaggaaatacgtgtcccagtattatccgaaactgcgggtagatatccgccctcagctgctgaagaacgccttgcagcgggctgtggagcgtgggcagctggaacagatcacgggcaagggcgcatctggcactttccagctcaaaaagagcggagagaagccactgctgggtgggtctctgatggaatacgccatactgtccgccatcgctgccatgaacgaaccaaagacttgctcgacgactgcactgaaaaaatacgtgttggaaaatcatcctgggacaaactctaattaccagatgcacctgctgaagaaaacactgcagaaatgcgagaagaacgggtggatggagcagatatccgggaagggcttctccggtaccttccagctctgcttcccgtactatcctagccccggagtgctgttcccgaaaaaggagcccgatgatagcagggatgaggacgaagatgaagatgagtcctctgaagaagattctgaagacgaggagccacctcccaagcggaggctgcagaaaaaaactccagccaaaagtcccggcaaagcagcaagcgtcaaacagcgcggcagcaagcccgccccaaaggtcagcgccgcacagcgtgggaaggccagacctctgccaaaaaaggcgcctcctaaagctaagacacccgccaaaaaaaccagaccctcaagcaccgtcatcaagaaaccaagcgggggcagctccaagaaaccagcaacatctgcccggaaggaggtgaagcttcctggcaaaggcaagagcactatgaagaagtcatttagagttaagaaatag

SEQ ID NO: 338083 - DNA, 1548 bp, Artificial Sequence
  derived and/or modified sequence
atgcccatccggcggaccgtgaacagcacccgggagaccccccccaaaagtaagctggccgaaggcgaggaggagaagccggaaccagatatttcatccgaagagagtgttagtacggtggaagaacaggaaaacgaaacgcctccggccacaagctctgaggccgagcagcctaaaggagagcctgagaacgaggagaaggaggaaaataagtcttcagaggaaacaaaaaaagatgagaaggaccaatcgaaagagaaggagaagaaagtgaagaaaactatacccagctgggccacactgagtgcctctcagctcgctagagcgcagaaacagacccctatggctagtagccctcgaccaaagatggatgccatactgactgaagctatcaaagcttgtttccaaaaatcaggcgcctccgtggtggctattcggaaatatatcatccataaatatccatcgctggagctcgaaaggaggggttaccttctcaagcaggcgctaaaaagggaactgaatagaggggtcatcaaacaggtgaagggcaagggcgcatccgggagcttcgtggtggttcaaaaatcgagaaagacaccgcaaaagagcagaaaccgcaaaaaccggagtagtgcagtggacccagagccccaagtgaaactcgaagacgtcttgccgctggccttcacgagattatgtgagccaaaagaggcctcatactctctgatccgaaagtatgtgagccagtattaccccaaactgcgggtcgacatcagacctcagctgttaaaaaatgccttacagagggccgtggagcggggacaactggaacaaataactggcaagggcgcatcgggcacgttccagctgaaaaagagtggggaaaaacccctcttaggaggcagtctgatggaatacgctattctgagcgctattgcagccatgaatgagccaaaaacttgtagcactacagccctgaaaaagtacgttctggaaaatcacccaggcacaaatagcaattaccagatgcacctgctgaaaaaaacgctgcagaaatgcgagaaaaatggctggatggagcagatatcaggtaagggattttccggcacctttcagctatgcttcccatactatccttctcccggcgtattgttcccaaagaaggagcctgacgactctagggacgaagacgaggacgaagacgagagttccgaagaggattctgaagacgaggagccaccccctaagcgaaggctgcagaagaaaactccagcaaagtcgcccggaaaggctgcaagtgtgaaacagagaggttccaaaccagccccaaaggtgtcagctgcccagaggggcaaggcccggcccctgccgaagaaggcgccaccaaaagctaaaactccagctaaaaaaacccgcccttcttcgaccgtgatcaaaaaacccagtggcggaagttctaaaaaaccagccacctcggcgcggaaggaggtgaaactgcctggcaagggcaagtccaccatgaagaagtcatttcgtgtgaagaagtag

SEQ ID NO: 338084 - DNA, 762 bp, Artificial Sequence
  derived and/or modified sequence
aagaaggacgagaaggaccagagcaaggagaaggagaagaaggtgaaaaaaacaataccctcttgggccacgctcagtgcctcccagcttgctagggcacagaagcagacccctatggcgtcttcccctcgacccaagatggatgccattctgactgaggctatcaaggcctgttttcagaagtcaggcgcgagtgtggttgcaatcagaaagtacattatccataagtatccttctttggaactcgagcgcaggggctacttgttaaaacaggccctgaaacgcgagctcaatcggggagtgatcaagcagaacaggtcatccgccgttgatcctgaacctcaggtcaaactagaagatgtgctgccgctggcttttaccagactctgtgaacctaaggaagcctcctatagcctgatccgaaagtatgtgtctcagtattatcctaagctaagagtcgatatcagaccccaactgctgaagaacgcattgcagagggcggtagagagggggcaactagagcagattactgggaaaggcgccagcgggaccttccagctgaagaagtcgggggagaaacccttactaggcggatcactcatggagtatgcgatcctgtctgccatcgccgccatgaacgagccgaagacatgtagtaccacagctctgaagaagtatgtgttggagaatcaccctggaaccaactccaattaccagatgcacctgctcaagaagaccctccagaagtgcgagaagaattag

SEQ ID NO: 338085 - DNA, 1206 bp, Artificial Sequence
  derived and/or modified sequence
atggcatccagtccgcgtcccaagatggatgcaattttgacagaggccatcaaagcgtgctttcagaagagcggggcttcagtcgtggcaattcgcaagtatattatacataagtacccatctttggagctggaaagaaggggctaccttctcaagcaggctctgaagcgggagttaaatcgaggggtgataaaacaggtgaaggggaaaggagcaagcgggtccttcgtggtagtgcaaaaatcccggaaaaccccccagaagtcaagaaacaggaagaatcggtcttctgcagtggaccctgagcctcaagtcaaactagaggatgttctccccctcgcctttacccgactatgtgaaccgaaggaggcctcctatagcctcattagaaagtatgtcagccaatactaccccaaactgagagtggatattcgaccgcagctgctgaagaacgccctccagagggctgtggaaagaggccagctcgaacagatcacaggcaaaggcgcatccggcacgttccaactgaagaaaagcggcgagaagcccctgctgggcggaagcctcatggaatatgccattctttcagctattgctgccatgaacgaacccaaaacctgttccactaccgcccttaaaaaatatgtgttggagaatcacccaggaaccaatagtaattatcagatgcacctgctaaagaagaccttgcaaaagtgtgaaaagaacggatggatggagcagatctccggcaaggggttctctggtacatttcagctgtgtttcccctattaccccagtccaggggtgctgtttccgaagaaggaacccgacgatagccgggacgaagacgaggacgaggacgagtccagtgaggaggacagtgaagatgaggagccgccacccaaacggagactgcaaaagaagacaccagccaaaagcccaggcaaggcagcctcagtgaagcaacgcggatcgaagccagcccctaaagtttctgccgctcaacgagggaaagccagacccctgccaaagaaggcaccaccgaaggcaaaaacgcccgcaaaaaaaacccgcccatcctccacagtcataaagaagccatccggcggatctagtaagaagcccgcaaccagcgcgcgaaaggaggtgaagctgcccggaaagggaaaatccaccatgaagaagtcttttcgggtcaaaaagtag

SEQ ID NO: 338086 - DNA, 1548 bp, Artificial Sequence
  derived and/or modified sequence
atgcccatccgcaggacagttaattcaacccgtgagacaccacctaaaagtaagttagcggaaggagaagaagagaaaccagagcccgatattagcagtgaagagtctgtgtctacagttgaagaacaggagaatgaaaccccacctgcgaccagcagtgaagctgagcagccaaaaggcgagccagaaaatgaggaaaaagaggaaaataagagctcagaagaaaccaaaaaggacgagaaagatcagagtaaggagaaagagaaaaaagtgaagaaaactataccctcctgggcaacacttagcgcctctcagctggctagggcacagaaacagactcctatggcctcttcccctagacccaaaatggacgccatccttacggaagctattaaggcgtgctttcagaagagcggggcttcggtggtggccattcgtaagtacataatccataagtaccccagccttgagctcgagcgcagagggtatctgttgaaacaagccctcaagcgagagctgaatcgcggagtcattaagcaggtaaaggggaagggagcgagcggcagcttcgtggtcgtgcagaaaagccggaagacccctcaaaagtccaggaaccgcaagaaccgtagctcggccgttgatccagagccacaggtgaaactggaagatgtcctgcctctagcgtttacacgcttatgcgagcccaaggaagcctcatacagcctaatccgaaagtatgtcagtcagtactatcccaagctccgcgtggatatccgaccccagctgctgaaaaacgcacttcagcgggctgttgaacgaggccagctggaacaaataactgggaagggcgctagcggtacattccagcttaaaaagtctggtgaaaagcccttactgggtgggtcgcttatggaatacgccatcttgtcagccatcgccgctatgaacgagccgaagacctgttctacaaccgctctcaagaaatacgttctggaaaatcatccaggcacgaattccaactatcagatgcaccttctgaaaaaaacgctgcagaagtgcgaaaaaaacggctggatggagcaaatatcagggaagggcttcagtggtacctttcaattgtgtttcccgtactacccctcaccgggagtgttatttcctaaaaaggaaccagacgatagtcgggatgaggacgaagacgaggatgagtccagcgaggaagactccgaggacgaggagcccccaccgaagcgcagactgcagaagaagacccctgctaagtctcccggtaaggctgcttccgtgaaacaaagaggaagcaagcccgcaccaaaagtttctgccgcacagagagggaaggcgagacctttacctaaaaaggctcctccaaaagccaaaacacccgctaagaagactcggcctagctctactgtgattaagaagcccagcggtggatcctcaaagaaacccgcaacatccgctaggaaggaggtgaaattgccaggaaagggaaaatctaccatgaaaaagtccttcagagtgaaaaaatag

SEQ ID NO: 338087 - DNA, 762 bp, Artificial Sequence
  derived and/or modified sequence
aaaaaagatgagaaagaccagtcaaaagaaaaagagaagaaagttaaaaaaacgattcccagttgggctactctgagcgcaagtcagctggccagagcacagaaacagacaccgatggctagctcccccaggccaaaaatggacgccatcctcacagaagctattaaggcttgtttccaaaaaagcggtgccagtgttgtggccataaggaaatatattattcataagtatccttccctggagctggagagacggggttatttgcttaagcaggctctaaaacgggaactgaaccgtggcgtcattaaacagaatcgtagctcagccgtcgacccagagccacaggtcaaactcgaagatgtgctgccgctggcttttactcgcctctgcgaaccaaaggaggcatcttattccttgattagaaagtacgtttcacagtactatccaaagctccgcgtggatatcagacctcagctgctgaagaacgcgctccagagggctgtcgagcgtgggcaactggagcagataactggtaaaggcgcatctggaactttccaactgaaaaagagtggtgagaaacctctgcttggcggttctctgatggagtatgctatcttgagcgccatcgccgctatgaacgagccgaagacctgctccacgacggcccttaaaaaatatgttctagaaaaccatccagggacgaactctaattatcagatgcatctgcttaagaagacactccagaagtgtgagaagaactag

SEQ ID NO: 338088 - DNA, 1206 bp, Artificial Sequence
  derived and/or modified sequence
atggccagcagccccagacccaagatggacgccatcctgaccgaggccatcaaggcctgcttccagaagagcggcgccagcgtggtggccatcagaaagtacatcatccacaagtaccccagcctggagctggagagaagaggctacctgctgaagcaggccctgaagagagagctgaacagaggcgtgatcaagcaggtgaagggcaagggcgccagcggcagcttcgtggtggtgcagaagagcagaaagaccccccagaagagcagaaacagaaagaacagaagcagcgccgtggaccccgagccccaggtgaagctggaggacgtgctgcccctggccttcaccagactgtgcgagcccaaggaggccagctacagcctgatcagaaagtacgtgagccagtactaccccaagctgagagtggacatcagaccccagctgctgaagaacgccctgcagagagccgtggagagaggccagctggagcagatcaccggcaagggcgccagcggcaccttccagctgaagaagagcggcgagaagcccctgctgggcggcagcctgatggagtacgccatcctgagcgccatcgccgccatgaacgagcccaagacctgcagcaccaccgccctgaagaagtacgtgctggagaaccaccccggcaccaacagcaactaccagatgcacctgctgaagaagaccctgcagaagtgcgagaagaacggctggatggagcagatcagcggcaagggcttcagcggcaccttccagctgtgcttcccctactaccccagccccggcgtgctgttccccaagaaggagcccgacgacagcagagacgaggacgaggacgaggacgagagcagcgaggaggacagcgaggacgaggagcccccccccaagagaagactgcagaagaagacccccgccaagagccccggcaaggccgccagcgtgaagcagagaggcagcaagcccgcccccaaggtgagcgccgcccagagaggcaaggccagacccctgcccaagaaggccccccccaaggccaagacccccgccaagaagaccagacccagcagcaccgtgatcaagaagcccagcggcggcagcagcaagaagcccgccaccagcgccagaaaggaggtgaagctgcccggcaagggcaagagcaccatgaagaagagcttcagagtgaagaagtag

SEQ ID NO: 338089 - DNA, 1548 bp, Artificial Sequence
  derived and/or modified sequence
atgcccatcagaagaaccgtgaacagcaccagagagaccccccccaagagcaagctggccgagggcgaggaggagaagcccgagcccgacatcagcagcgaggagagcgtgagcaccgtggaggagcaggagaacgagaccccccccgccaccagcagcgaggccgagcagcccaagggcgagcccgagaacgaggagaaggaggagaacaagagcagcgaggagaccaagaaggacgagaaggaccagagcaaggagaaggagaagaaggtgaagaagaccatccccagctgggccaccctgagcgccagccagctggccagagcccagaagcagacccccatggccagcagccccagacccaagatggacgccatcctgaccgaggccatcaaggcctgcttccagaagagcggcgccagcgtggtggccatcagaaagtacatcatccacaagtaccccagcctggagctggagagaagaggctacctgctgaagcaggccctgaagagagagctgaacagaggcgtgatcaagcaggtgaagggcaagggcgccagcggcagcttcgtggtggtgcagaagagcagaaagaccccccagaagagcagaaacagaaagaacagaagcagcgccgtggaccccgagccccaggtgaagctggaggacgtgctgcccctggccttcaccagactgtgcgagcccaaggaggccagctacagcctgatcagaaagtacgtgagccagtactaccccaagctgagagtggacatcagaccccagctgctgaagaacgccctgcagagagccgtggagagaggccagctggagcagatcaccggcaagggcgccagcggcaccttccagctgaagaagagcggcgagaagcccctgctgggcggcagcctgatggagtacgccatcctgagcgccatcgccgccatgaacgagcccaagacctgcagcaccaccgccctgaagaagtacgtgctggagaaccaccccggcaccaacagcaactaccagatgcacctgctgaagaagaccctgcagaagtgcgagaagaacggctggatggagcagatcagcggcaagggcttcagcggcaccttccagctgtgcttcccctactaccccagccccggcgtgctgttccccaagaaggagcccgacgacagcagagacgaggacgaggacgaggacgagagcagcgaggaggacagcgaggacgaggagcccccccccaagagaagactgcagaagaagacccccgccaagagccccggcaaggccgccagcgtgaagcagagaggcagcaagcccgcccccaaggtgagcgccgcccagagaggcaaggccagacccctgcccaagaaggccccccccaaggccaagacccccgccaagaagaccagacccagcagcaccgtgatcaagaagcccagcggcggcagcagcaagaagcccgccaccagcgccagaaaggaggtgaagctgcccggcaagggcaagagcaccatgaagaagagcttcagagtgaagaagtag

SEQ ID NO: 338090 - DNA, 762 bp, Artificial Sequence
  derived and/or modified sequence
aagaaggacgagaaggaccagagcaaggagaaggagaagaaggtgaagaagaccatccccagctgggccaccctgagcgccagccagctggccagagcccagaagcagacccccatggccagcagccccagacccaagatggacgccatcctgaccgaggccatcaaggcctgcttccagaagagcggcgccagcgtggtggccatcagaaagtacatcatccacaagtaccccagcctggagctggagagaagaggctacctgctgaagcaggccctgaagagagagctgaacagaggcgtgatcaagcagaacagaagcagcgccgtggaccccgagccccaggtgaagctggaggacgtgctgcccctggccttcaccagactgtgcgagcccaaggaggccagctacagcctgatcagaaagtacgtgagccagtactaccccaagctgagagtggacatcagaccccagctgctgaagaacgccctgcagagagccgtggagagaggccagctggagcagatcaccggcaagggcgccagcggcaccttccagctgaagaagagcggcgagaagcccctgctgggcggcagcctgatggagtacgccatcctgagcgccatcgccgccatgaacgagcccaagacctgcagcaccaccgccctgaagaagtacgtgctggagaaccaccccggcaccaacagcaactaccagatgcacctgctgaagaagaccctgcagaagtgcgagaagaactag

SEQ ID NO: 338091 - DNA, 4822 bp, Artificial Sequence
  derived and/or modified sequence
tttttttttttttttgagatggagtcttactctgtcacccaggttggagtgtggagtgcagtggcgcgatctgggctcactgcaacctccacctcccaggttcaagcgattctcctgcctcaacctgccaagtagctgggactacaggcgtgcacctccacacctagctaatttttgtattttcaggagagacgggggtttcaccatgttggccaggatggtctcaatcttttgaccttgtgatccgcccaccttggcctcccaaagtgctgggattacaggcatgagtcaccgcgcccagccaatatgctatatttttgtatgactggcagcactgtaggtttgtttacaccaatgtcaccacaaacaagtgagtaacgtgctgcgctgtgatattaccacagctatcatgttaaccaggtaataggaggttttcagttccattataatcttaagggaccaccattgtatatgtggtctgttgaccaaatattgttacacagcacatgaccataaaagaataacttagtaataactataccttctagctataatcttcagggtattctttatctgagtttcataagtatagctaaggtctgtggaatttatagcaactatcgtgtgtgggtgtgggtgtgtttgtgtgtgtgtgtgtgtgtttaatggagatggcgtctcactatgttggctaggttgggcttgaactcctggcctcaagctgtcctccctcctcagcctcctaaattgctgggattacaggcatgagccactgcacccagcctatcgtctgttgttaaatgttctaatgcacctattaggtgcacagagtactgttatatactcagaataaaatttacataatgctttaaatctcacaaaattgttttgataaacatactcttataattcttgcaacaccttgggaaatagttggttctatattactgttttatagctgaggagaaagactcacatcatttactaagatcatatagctagctagtaaatgtttgagtgaaaatacaaacaaaggttttctgactttaagagcttgagttttttccactataccatattgcatctgttgtaattgttaactaatgtgcattttaaaattctcatttgtcttatgtactgagcccttataccagtgctaatttatgtgactcctttctcctgcagctaagagaaaaatacctttttaattcatttatagtacccagtttttaaagaagatttattttgtaaaattttgcttatggtacatgtcatcttagcctgtaaataaattaaagcattaatttttatccctccctggtcttttcctccttctgactttatacgtctttctagagagcttatcttctataataacaattctttgttttaaagtgagaaagatcagtctaaagaaaaggagaagaaagtgaaaaaaacaattccttcctgggctaccctttctgccagccagctagccagggcccagaaacaaacaccgatggcttcttccccacgtcccaagatggatgcaatcttaactgaggccattaaggcatgcttccagaagagtggtgcatcagtggttgctattcgaaaatacatcatccataagtatccttctctggagctggagagaaggggttatctccttaaacaagcactgaaaagagaattaaatagaggagtcatcaaacaggttaaaggaaaaggtgcttctggaagttttgttgtggttcagaaatcaagaaaaacacctcagaaatccagaaacagaaagaataggagctctgcagtggatccagaaccacaagtaaaattggaggatgtcctcccactggcctttactcgcctttgtgaacctaaagaagcttcctacagtctcatcaggaaatatgtgtctcagtattatcctaagcttagagtggacatcaggcctcagctgttgaagaacgctctgcagagagcagtagagaggggccagttagaacagataactggcaaaggtgcttcggggacattccagctgaagaaatcaggggagaaacccctgcttggtggaagcctgatggaatatgcaatcttgtctgccattgctgccatgaatgagccgaagacctgctctaccactgctctgaagaagtatgtcctagagaatcacccaggaaccaattctaactatcaaatgcatttgctgaaaaaaaccctgcagaaatgcgaaaagaatgggtggatggaacagatctctgggaaagggttcagtggcaccttccagctctgttttccctattatcccagcccaggagttctgtttccgaagaaagagccagatgattctagagatgaggatgaagatgaagatgagtcatcagaagaagactctgaggatgaagagccgccacctaagagaaggttgcagaagaaaaccccagccaagtccccagggaaggccgcatctgtgaagcagagagggtccaaacctgcacctaaagtctcagctgcccagcgggggaaagctaggcccttgcctaagaaagcacctcctaaggccaaaacgcctgccaagaagaccagaccctcatccacagtcatcaagaaacctagtggtggctcctcaaagaagcctgcaaccagtgcaagaaaggaagtaaaattgccgggcaagggcaaatccaccatgaagaagtctttcagagtgaaaaagtaaattttataggaaaaaagggtatcatgatgaaattcaaaatcttattttctaaggtcagtgtgcatttgtttagttttgatgcttttcaaattacattattttcctcccctatgaacattgtggggagggactctaaataaaccagtttaggcatttgctagctttaggtgcttttattggtgcctgcccttttccttgttcattttaatttctgcaataatcctggactttcctaaactatgtaatgtatacttgtcctttttctctgcctcccccaaccccctgttgtttttatggtcagctttgccttttttttttcttccaattttatctaaacagttgcagagatttttatatttgtagaaagcatcaagaacggtatgccagtcaggtcctggaagtaaaatggaggcacaatatagcactgactgagttgtaaagcctcctgcctggagacttcagttatagctgtaataattaatcttatttataaaagccactccactaaccttttctctccaactgtaaacacagagacagctttgggaataagccaaaaacagggtgatctcattagattttgaagatatatgactcctttgggctacatttcatattgatcaatttctaggtatttttcactggcccaaagtattgcattcccttaacagcaagcacaagttctctatatcacttgttttttgttgttgttgttgttgtcgtcgttgttttgagacggagtcttgctcaggtgccccggagtgcagtggtgcaatctcagctcactgcaacctccacctcctgggttcaagcaattctcctgcttcagcctcccgagtagctgggattacaggtgtgtaccaccacgcctggcaatttttttgtatttttagtagagatggggtttcgccgtgttggtcaggctggtctcgaactcctgacctcaggtgatccgcctgcctcggcctcccaaagtgctgggattacaggagtgagccactgtgcctggcctatcccacttggtttttgactgaaggggaagtgtagaaatatattgatttgtgatttctggtgtcacctgtgttaccaaaaatcaaaacaaatcttttttattttttattattattattatttttgagacagagtctcgctctgtcgcccagtgtggagtgcagtggtgtgatcttggctcactgcaaactccgcctcccaggttcaagcgattctcccacctcagcctcctgagttgggtcctacaggcgcacacgaccacgcccagctaattttttgtatttttagtagagttggggtttcaccatgttagccaggatggtctcgatctcctgacctcgtgatccactcacctcagcctcccaaaatcctggggttacagatgtgagctaccactcacggcccaaatcttcttgatcatatgtttaaatatattttttaatatttggagcatgagttgtcacttcttgtttgccttttttataaggaaatgttggagagttacatcattgctaatgtagaaatgttaagtggaaaaatatacagtttggtaaaataaactagattctacatttatttgtgggtttttttcccctcctttctttccacagcacttttgatatcaagcaagtggcttcctttttgagatattaaaaaaaaaaagaaaaggaaaaaagtaaatgaagcccaactacctaaccctttcttatttgtatttgttttagtattgtgaagttgtgttaaatagtactagctagaaatacaaatttctggttatcatttctcttccctgtggcacttgacattttaattgtcttaaagtttttgaagtacatcttctggccccttgagtactgccagaggcaaaagatgtttgtttcttattcattccacttttgtctcctgggatcccttctgtagcctaaagtatggctgggaaatggacttgagaagattggcttgaattagatcataatcatgtgtgatcccatcatgaattcattggaatttgtgttgcatgtaaggcaatctttcctgttgtaaatcttccttttttaatgtacatatattttgaaaaatatgaataaacatgaaattttaaaa

SEQ ID NO: 338092 - DNA, 759 bp, Artificial Sequence
  derived and/or modified sequence
aaaaaggatgagaaagatcagtctaaagaaaaggagaagaaagtgaaaaaaacaattccttcctgggctaccctttctgccagccagctagccagggcccagaaacaaacaccgatggcttcttccccacgtcccaagatggatgcaatcttaactgaggccattaaggcatgcttccagaagagtggtgcatcagtggttgctattcgaaaatacatcatccataagtatccttctctggagctggagagaaggggttatctccttaaacaagcactgaaaagagaattaaatagaggagtcatcaaacagaataggagctctgcagtggatccagaaccacaagtaaaattggaggatgtcctcccactggcctttactcgcctttgtgaacctaaagaagcttcctacagtctcatcaggaaatatgtgtctcagtattatcctaagcttagagtggacatcaggcctcagctgttgaagaacgctctgcagagagcagtagagaggggccagttagaacagataactggcaaaggtgcttcggggacattccagctgaagaaatcaggggagaaacccctgcttggtggaagcctgatggaatatgcaatcttgtctgccattgctgccatgaatgagccgaagacctgctctaccactgctctgaagaagtatgtcctagagaatcacccaggaaccaattctaactatcaaatgcatttgctgaaaaaaaccctgcagaaatgcgaaaagaat

SEQ ID NO: 338093 - protein, 76 aa, Artificial Sequence
  derived and/or modified sequence
MATDTSQGELVHPKALPLIVGAQLIHADKLGEKVEDSTMPIRRTVNSTRETPPKSKLAEGEEEKPEPDISSEESVS

SEQ ID NO: 338094 - protein, 124 aa, Artificial Sequence
  derived and/or modified sequence
MATDTSQGELVHPKALPLIVGAQLIHADKLGEKVEDSTMPIRRTVNSTRETPPKSKLAEGEEEKPEPDISSEESVSTVEEQENETPPATSSEAEQPKGEPENEEKEENKSSEETKKDEKDQSKE

SEQ ID NO: 338095 - protein, 40 aa, Artificial Sequence
  derived and/or modified sequence
MPIRRTVNSTRETPPKSKLAEGEEEKPEPDISSEESVSTV

SEQ ID NO: 338096 - protein, 327 aa, Artificial Sequence
  derived and/or modified sequence
MATDTSQGELVHPKALPLIVGAQLIHADKLGEKVEDSTMPIRRTVNSTRETPPKSKLAEGEEEKPEPDISSEESVSTVEEQENETPPATSSEAEQPKGEPENEEKEENKSSEETKKDEKDQSKEKEKKVKKTIPSWATLSASQLARAQKQTPMASSPRPKMDAILTEAIKACFQKSGASVVAIRKYIIHKYPSLELERRGYLLKQALKRELNRGVIKQVKGKGASGSFVVVQKSRKTPQKSRNRKNRSSAVDPEPQVKLEDVLPLAFTRLCEPKEASYSLIRKYVSQYYPKLRVDIRPQLLKNALQRAVERGQLEQITGKGASGTFQ

SEQ ID NO: 338097 - protein, 19 aa, Artificial Sequence
  derived and/or modified sequence
MPIRRTVNSTRETPPKSKL

SEQ ID NO: 338098 - DNA, 402 bp, Artificial Sequence
  derived and/or modified sequence
atggctactgatacctcccagggggaattggtgcacccgaaggcgctgccgttaatcgtgggagcccagctcattcatgcagataaattgggggagaaggtcgaggattccaccatgcccatcagacgcacggttaactccacacgagagaccccccccaaatcaaagctcgctgagggggaggaagagaagcccgagcccgatatctcctcagaagagagcgtgagcacagtggaggagcaggaaaacgaaacaccacccgccacttctagtgaggcggagcaacccaaaggcgaacctgaaaatgaagagaaggaagaaaataaatctagcgaggagacgaagaaagagagggcagacagcatccatagtaccctgtttatcatcggccaaaactcatag

SEQ ID NO: 338099 - DNA, 231 bp, Artificial Sequence
  derived and/or modified sequence
atggcgaccgacacatcacagggcgagctggtacatccaaaggccctgcctctgatcgtgggcgcacaactgattcacgccgacaagttaggagaaaaagtcgaggactcaacgatgcctatcaggcggaccgtaaatagcacgcgcgagaccccaccaaaaagcaaattggcggagggcgaagaagagaagccagaacctgacatttcctcagaggaaagtgtaagctag

SEQ ID NO: 338100 - DNA, 375 bp, Artificial Sequence
  derived and/or modified sequence
atggccaccgataccagtcaaggggagctagtgcatccaaaagccctgcccctgatcgtcggcgcgcagttgatccacgccgacaaattgggagagaaggtggaagattcaacaatgcctataaggcgcacagtgaacagcactagagagacgcctccgaaatccaaactggctgagggcgaggaggagaagccggagccggacatttctagtgaagaaagtgtttcaacagtggaggagcaggagaacgaaacaccaccggctactagctcagaggctgaacagcccaagggtgaaccggaaaatgaggaaaaggaggagaacaagagctctgaggaaacgaaaaaggacgagaaggaccaaagtaaagaatag

SEQ ID NO: 338101 - DNA, 123 bp, Artificial Sequence
  derived and/or modified sequence
atgcctatccgtcgaaccgtcaatagcacccgcgaaactcctccaaaatctaagctggccgaaggagaggaggagaaacctgagcctgacatttctagcgaagagagcgtgagtaccgtgtag

SEQ ID NO: 338102 - DNA, 837 bp, Artificial Sequence
  derived and/or modified sequence
atgcccataagacgcaccgtgaacagcacaagagagactccccccaaatcgaagctcgctgagggagaggaggagaagcctgagcctgatatttccagcgaggaaagtgtttctaccgtcgaagaacaggagaacgaaaccccccccgcaacctctagtgaggccgaacagccaaaaggggagccggagaacgaggagaaggaggagaataaaagctcagaagagactaaaaaagatgaaaaggatcagtctaaggaaaaagagaagaaagtaaagaagaccataccatcctgggctaccttgagcgctagtcagttagcaagggcccagaagcagaccccaatggcatcatctcctaggccaaagatggacgcaattctgacagaagctattaaagcctgctttcagaagagcggggcttcagtggtcgctattcggaaatatattatccataagtatccctcccttgagctcgaaaggcgcgggtatttgctgaagcaggccctcaagcgtgaattgaaccggggggtcatcaaacaggtgaaagggaagggcgcatccggcagttttgttgttgtacagaagagtaggaaaactccacagaaatcgagaaaccggaagaataggagtagcgctgtggatccagaaccacaggttaagctcgaggacgttcttccactcgcatttacgcggttatgcgagccaaaagaagctagttacagcttgattcgcaagtatgttagtcagtattatccaaaactcagagttgatatccggccccaactgctgaaaaacgccctgcagagagcagttgagagagggcaactcgaacaatag

SEQ ID NO: 338103 - DNA, 138 bp, Artificial Sequence
  derived and/or modified sequence
atgccgatccgtagaacggtcaactctacgagggagacgcctcccaaatcaaaactcgctgagggggaagaggaaaagccagaacccgatatcagcagcgaagagtctgtgtctactgtggaggagcaggaaaattag

SEQ ID NO: 338104 - DNA, 984 bp, Artificial Sequence
  derived and/or modified sequence
atggcaaccgataccagccagggtgagctcgtccaccctaaagcactgccattaattgtgggcgctcagctcattcacgcagataagctgggcgaaaaagtggaagacagcactatgcccattaggcgtactgtcaactcaacaagagagactcctcccaaaagcaagcttgcagagggagaggaagagaagcccgaaccagatatttcctccgaagagtccgtcagcaccgtcgaagagcaggaaaacgagacgccgccggccacatcatccgaggccgagcagccgaagggagagccagagaacgaggaaaaggaggaaaataagagcagcgaggagactaagaaggacgagaaggaccaatccaaagagaaggagaaaaaggtgaagaagaccataccaagttgggcaactttgagcgcttctcagctagcacgcgcccagaaacagacaccaatggccagtagtcccaggcccaagatggacgcaatcctaacggaggccattaaggcttgtttccagaagagcggggcctccgtggtggccataagaaagtatatcatacataagtatccttcactcgaattagaaaggcgaggttacctgctcaagcaggcactcaaacgcgaactgaatcggggggtaattaaacaagtcaagggcaagggcgctagcgggtccttcgtggtcgtgcagaagtctcgcaaaacaccgcagaagtcacggaatcgcaaaaatcgaagttcagccgtggaccccgaaccccaggtaaaacttgaggacgttctgccccttgcttttacacggctgtgcgagcctaaagaggccagctactccctcatccgcaagtacgtgagtcagtactacccgaaactccgggtcgatatccgtcctcagttgctgaaaaacgctttacagcgagccgttgagagggggcagctggaacagattactgggaagggggccagcggcaccttccagtag

SEQ ID NO: 338105 - DNA, 402 bp, Artificial Sequence
  derived and/or modified sequence
atggccacagacaccagccagggcgagctggtgcaccccaaggccctgcccctgattgtgggcgcccagctgattcatgctgacaagctgggggagaaggtggaggacagcaccatgcccatccggaggacagtgaacagcacccgggagaccccacccaagagcaagctggccgagggggaggaggagaagccagagccagacatcagcagcgaggagagcgtgtccacagtggaggagcaggagaatgagaccccaccagccaccagcagcgaggccgagcagcccaagggggagccagaaaatgaggagaaggaggagaacaagagcagcgaggagaccaagaaggagagagctgacagcatccacagcaccctcttcatcatcggccagaacagctag

SEQ ID NO: 338106 - DNA, 231 bp, Artificial Sequence
  derived and/or modified sequence
atggccacagacaccagccagggcgagctggtgcaccccaaggccctgcccctgattgtgggcgcccagctgattcatgctgacaagctgggggagaaggtggaggacagcaccatgcccatccggaggacagtgaacagcacccgggagaccccacccaagagcaagctggccgagggggaggaggagaagccagagccagacatcagcagcgaggagagcgtgtcctag

SEQ ID NO: 338107 - DNA, 375 bp, Artificial Sequence
  derived and/or modified sequence
atggccacagacaccagccagggcgagctggtgcaccccaaggccctgcccctgattgtgggcgcccagctgattcatgctgacaagctgggggagaaggtggaggacagcaccatgcccatccggaggacagtgaacagcacccgggagaccccacccaagagcaagctggccgagggggaggaggagaagccagagccagacatcagcagcgaggagagcgtgtccacagtggaggagcaggagaatgagaccccaccagccaccagcagcgaggccgagcagcccaagggggagccagaaaatgaggagaaggaggagaacaagagcagcgaggagaccaagaaggatgagaaggaccagagcaaggagtag

SEQ ID NO: 338108 - DNA, 123 bp, Artificial Sequence
  derived and/or modified sequence
atgcccatccggaggacagtgaacagcacccgggagaccccacccaagagcaagctggccgagggggaggaggagaagccagagccagacatcagcagcgaggagagcgtgtccacagtgtag

SEQ ID NO: 338109 - DNA, 837 bp, Artificial Sequence
  derived and/or modified sequence
atgcccatccggaggacagtgaacagcacccgggagaccccacccaagagcaagctggccgagggggaggaggagaagccagagccagacatcagcagcgaggagagcgtgtccacagtggaggagcaggagaatgagaccccaccagccaccagcagcgaggccgagcagcccaagggggagccagaaaatgaggagaaggaggagaacaagagcagcgaggagaccaagaaggatgagaaggaccagagcaaggagaaggagaagaaggtgaagaagaccatccccagctgggccaccctgagcgccagccagctggcccgggcccagaagcagacccccatggccagcagcccccggcccaagatggatgccatcctgacagaggccatcaaggcctgcttccagaagagcggggcctctgtggtggccatcaggaagtacatcatccacaagtaccccagcctggagctggagcggcggggctacctgctgaagcaggccctgaagcgggagctgaacagaggagtcatcaagcaggtgaagggcaagggggccagcggcagctttgtggtggtgcagaagagcaggaagaccccccagaagagcaggaacaggaagaacagaagcagcgctgtggaccctgagccccaggtgaagctggaggatgtgctgcccctggccttcacccggctgtgtgagcccaaggaggccagctacagcctcatcagaaaatatgtgtcccagtactaccccaagctgcgggtggacatccggccccagctgctgaagaatgccctgcagagagctgtggagcggggccagctggagcagtag

SEQ ID NO: 338110 - DNA, 138 bp, Artificial Sequence
  derived and/or modified sequence
atgcccatccggaggacagtgaacagcacccgggagaccccacccaagagcaagctggccgagggggaggaggagaagccagagccagacatcagcagcgaggagagcgtgtccacagtggaggagcaggagaactag

SEQ ID NO: 338111 - DNA, 984 bp, Artificial Sequence
  derived and/or modified sequence
atggccacagacaccagccagggcgagctggtgcaccccaaggccctgcccctgattgtgggcgcccagctgattcatgctgacaagctgggggagaaggtggaggacagcaccatgcccatccggaggacagtgaacagcacccgggagaccccacccaagagcaagctggccgagggggaggaggagaagccagagccagacatcagcagcgaggagagcgtgtccacagtggaggagcaggagaatgagaccccaccagccaccagcagcgaggccgagcagcccaagggggagccagaaaatgaggagaaggaggagaacaagagcagcgaggagaccaagaaggatgagaaggaccagagcaaggagaaggagaagaaggtgaagaagaccatccccagctgggccaccctgagcgccagccagctggcccgggcccagaagcagacccccatggccagcagcccccggcccaagatggatgccatcctgacagaggccatcaaggcctgcttccagaagagcggggcctctgtggtggccatcaggaagtacatcatccacaagtaccccagcctggagctggagcggcggggctacctgctgaagcaggccctgaagcgggagctgaacagaggagtcatcaagcaggtgaagggcaagggggccagcggcagctttgtggtggtgcagaagagcaggaagaccccccagaagagcaggaacaggaagaacagaagcagcgctgtggaccctgagccccaggtgaagctggaggatgtgctgcccctggccttcacccggctgtgtgagcccaaggaggccagctacagcctcatcagaaaatatgtgtcccagtactaccccaagctgcgggtggacatccggccccagctgctgaagaatgccctgcagagagctgtggagcggggccagctggagcagatcaccgggaagggggccagcggcaccttccagtag

SEQ ID NO: 338112 - DNA, 402 bp, Artificial Sequence
  derived and/or modified sequence
atggccaccgacaccagccagggcgagctggtgcaccccaaggccctgcctctaatcgtgggcgcgcagctcatccatgccgacaaattgggcgagaaagtggaggatagcaccatgccaatccgtagaaccgtaaacagcacgcgagagactcccccaaagtccaaactggcagagggagaagaagaaaaacccgaacctgatatatcctccgaagagagtgtgagtacagtggaagaacaagagaatgagacgccacctgccacctccagtgaggccgagcagcctaagggagaacccgaaaacgaagaaaaggaagaaaacaagtcgtctgaagaaactaagaaggaaagggccgattctatacattccacattgttcatcattgggcagaattcatag

SEQ ID NO: 338113 - DNA, 231 bp, Artificial Sequence
  derived and/or modified sequence
atggccaccgacaccagccagggcgagctggtgcaccccaaggccttgcccttgatcgtgggcgcacagctgatccatgcagataaactgggagaaaaggtcgaggattccaccatgccaatccggcgcaccgttaattcaacaagagagacaccccctaagagtaagctggcagagggggaggaagagaaaccagagcccgacatctcctctgaggaatcagtttcctag

SEQ ID NO: 338114 - DNA, 375 bp, Artificial Sequence
  derived and/or modified sequence
atggccaccgacaccagccagggcgagctggtgcaccccaaggccctgccccttattgtgggcgcccagctcatccacgcagacaaactgggggaaaaggtggaggatagcacgatgccaatcaggagaacggttaatagcactagagagacccctcctaaatctaaactggcagagggtgaggaggagaagcctgaacccgacatatccagtgaagagtctgtctccacggtggaagaacaagaaaatgaaactccacctgctacttcttcagaggcggagcaacccaagggggagcccgagaatgaggagaaggaggaaaataagagctcagaggagacaaagaaagatgaaaaggaccaatccaaagaatag

SEQ ID NO: 338115 - DNA, 123 bp, Artificial Sequence
  derived and/or modified sequence
atgcccatccggcggaccgtgaacagcacccgggagaccccccccaagtccaagttagctgagggggaagaagaaaagcccgagccagatatttcctctgaggaaagtgtctccactgtgtag

SEQ ID NO: 338116 - DNA, 837 bp, Artificial Sequence
  derived and/or modified sequence
atgcccatccggcggaccgtgaacagcacccgggagaccccccccaagagcaagttagctgagggcgaggaggagaaaccagagcctgatataagttctgaagagtctgtgtctaccgtggaggaacaagagaatgaaaccccaccggcaacctcttccgaggctgaacagcccaaaggcgagccagaaaacgaggaaaaggaggagaataaatccagtgaggaaactaaaaaggacgagaaagatcagtccaaggagaaagagaaaaaagtgaagaagacaataccgtcatgggcaaccttgtcagccagccagttagcccgcgcccagaagcagactcccatggcgtcctctccccgaccaaaaatggacgcaatcttgactgaggctataaaggcttgttttcagaaatccggtgcatctgttgtggctattaggaaatatattattcacaaatacccatctttggaactcgagcgccggggctacctcctaaagcaggccctcaaaagagaactgaatcgcggagttattaagcaggtgaaggggaaaggagcctcaggctcattcgttgtagtccagaaaagcagaaaaaccccacagaagagcaggaatcggaaaaaccgctctagtgcggttgaccccgagccacaggtcaaactggaagacgtgttgcctctggccttcactagactgtgtgagcccaaagaggctagctactctctcattagaaagtacgtgtctcagtactatccgaagctgcgcgtggacataagaccccagctgctgaaaaacgccctgcagcgcgctgtggaaagaggccagctggagcaatag

SEQ ID NO: 338117 - DNA, 138 bp, Artificial Sequence
  derived and/or modified sequence
atgcccatccggcggaccgtgaacagcacccgggagaccccccccaagagcaaactcgccgaaggagaagaggagaagcctgagcctgacataagttctgaggaatcagtcagtaccgtggaagaacaagagaattag

SEQ ID NO: 338118 - DNA, 984 bp, Artificial Sequence
  derived and/or modified sequence
atggccaccgacaccagccagggcgagctggtgcaccccaaggcccttcctctgatcgttggtgcacagctgattcatgccgacaagctgggagagaaggtcgaagattccaccatgcctatacgacgaaccgtaaatagcactcgcgagacaccacccaagtctaagctggccgagggcgaagaagagaagcccgagcctgacatttcaagcgaagaaagtgtatcgactgttgaggagcaggagaacgaaactccgcctgctaccagctctgaagctgaacagccaaagggtgagcctgagaacgaggagaaagaagaaaacaagtctagcgaagagacgaagaaagatgaaaaggaccagtcaaaagagaaagagaagaaagttaagaaaactatcccatcttgggccacactgtcggctagccagctggcgagagctcagaagcaaactcctatggccagctcccctcggccaaaaatggatgccatcctgacagaggctatcaaggcctgtttccagaaaagcggcgcatccgtggtggcaatcagaaagtacatcattcacaaatatccatctctcgaactcgaaagacgcggctacctattgaaacaggctcttaaaagagagctgaaccggggcgtcatcaaacaggtgaagggcaaaggagctagtggatctttcgtggtggtgcagaagagcaggaaaaccccccagaagagtcgcaaccgtaagaatagatcttccgcagttgatccagagcctcaggtcaagctggaggatgttctgccattggcctttacccgcctctgcgagcctaaggaggcttcatatagccttatacgtaagtatgtgtcccagtattacccgaagttgcgggtggacatccggccccagctcctgaagaacgctctgcagagggccgtggagcgcggtcagttagagcagattaccggtaagggagccagtgggacctttcaatag

SEQ ID NO: 338119 - DNA, 402 bp, Artificial Sequence
  derived and/or modified sequence
atggccacagacacctctcagggagagctggtgcatccgaaagcccttccccttatcgtcggagcccaactgatacatgccgataagctaggcgaaaaagtggaggattcaacaatgcccattagacgcacagtaaatagtacaagagagacacctccaaagtccaagttggccgagggggaagaagaaaaacccgagcccgatatctcctctgaagaaagcgtttccacggtggaagaacaggagaacgagactccaccagccacaagctccgaagcagagcagcccaagggcgaacccgagaacgaggagaaggaagagaacaagtcctcagaagagacgaaaaaagagcgggcagattccatacattccaccttattcataattggacagaacagctag

SEQ ID NO: 338120 - DNA, 231 bp, Artificial Sequence
  derived and/or modified sequence
atggccacagatacgtcccagggtgaactggttcacccgaaagctctgcccctgatcgttggcgctcagctgattcacgccgataagctgggagagaaggtagaagactccaccatgcccattagaaggactgtgaattctacacgggaaacccccccaaagagtaagcttgctgaaggagaagaagagaagccggagccggatatttcctcagaagaatcggtgtcttag

SEQ ID NO: 338121 - DNA, 375 bp, Artificial Sequence
  derived and/or modified sequence
atggccaccgatacatcccagggcgaactggtccaccccaaggcgctgcccttgatcgtgggtgcgcaactcatccacgccgacaagctgggggaaaaggttgaggacagcacaatgcctatccggagaacggtgaattcaactagagagactccccctaagtcgaaactcgcggagggagaggaggagaagcccgagcccgatatttcatcagaagagagcgtttcaaccgtggaggaacaagaaaatgagaccccgccagccacaagcagcgaagccgagcagcctaagggtgaacctgaaaacgaggagaaggaggagaacaagtcttcggaggagaccaaaaaggacgagaaagatcaatcaaaagagtag

SEQ ID NO: 338122 - DNA, 123 bp, Artificial Sequence
  derived and/or modified sequence
atgcccatcaggagaaccgtgaactcgacaagagagacacccccaaagtccaaactcgcagagggcgaggaagagaaaccagagcccgacatctcgtcggaggagagcgtgtccactgtttag

SEQ ID NO: 338123 - DNA, 837 bp, Artificial Sequence
  derived and/or modified sequence
atgccgatccggaggactgtgaatagcaccagagaaacccctcccaaaagcaaattggcagagggcgaggaagaaaagccggagcctgacattagttctgaggaatctgtctctacggtggaggagcaggagaacgaaacgccccctgccacctcttccgaggcagaacagcctaagggagagccagagaatgaggagaaagaggaaaataagtcctccgaggagacaaaaaaggacgagaaggaccaatcgaaagaaaaggagaagaaggttaagaagaccatcccttcatgggcgaccctgtccgccagccagctggcccgtgctcagaaacagacgccaatggcctctagccctcgccctaagatggacgctattctgactgaggcaattaaagcatgcttccagaagtccggggcaagcgtcgtcgctatcagaaagtacattattcataagtacccgtcactggagctggaaaggagagggtacctgctgaaacaggcgttaaagagagagctgaatagaggtgtgatcaagcaggtgaagggtaagggcgctagtgggagcttcgtcgtcgtgcagaagtcccgaaagaccccacaaaagtcgagaaacaggaaaaatcggtcttcagctgtggacccagaaccacaagttaaactggaggacgtcctgccgctcgcatttacacgactgtgtgaaccaaaagaggcctcatatagcttaattcggaagtacgtatctcagtactaccccaagctaagagttgacatcagacctcaactgttgaaaaacgcattgcagagagccgtagagagaggacagttggaacaatag

SEQ ID NO: 338124 - DNA, 138 bp, Artificial Sequence
  derived and/or modified sequence
atgcccatcagacggaccgttaacagtacccgagagacaccccctaaatctaaactggcagagggcgaagaggagaaacccgagcctgacatttcttcggaggagagcgtgtccacggtcgaggagcaagaaaattag

SEQ ID NO: 338125 - DNA, 984 bp, Artificial Sequence
  derived and/or modified sequence
atggccacagatacatctcagggggagctagtgcacccaaaagccctgccattaattgtgggcgctcagctaatacatgcagataaactgggagagaaagtcgaggacagcacgatgcctataaggcgtaccgtcaattccacgcgggaaactcccccaaaatccaagctggctgaaggcgaagaagagaagcccgagcccgatatctcttctgaagagtccgttagcaccgtggaggaacaggagaacgaaactccacccgcaacatcgagcgaagctgagcagccaaagggtgagcccgagaacgaagaaaaggaagaaaacaaaagttccgaggagacaaaaaaggacgaaaaggaccagtctaaggaaaaagagaaaaaggtgaagaaaaccattccttcgtgggctacgttatccgcaagtcaactcgccagggctcagaaacagacccccatggcatctagtccacgtcctaaaatggatgcaattctgacagaagcaatcaaggcttgctttcagaagtcaggagcaagtgtagttgctattaggaagtacatcatccataagtatccgagccttgagctggaacggagaggctatctactgaaacaggccctcaagagggagcttaatcggggagtaatcaagcaggtcaaaggcaagggcgcttccggcagcttcgtcgtcgttcagaagagtcggaagacaccacagaagagtcgaaataggaagaatcggagctcagccgtcgatcccgaacctcaagtcaaattggaggacgtgttaccactggccttcacccgactgtgtgagccaaaagaagcgtcttactcactcatccgaaaatatgtatcacagtattatccgaaactgagggtcgacatccggcctcaactgcttaagaacgctctccagcgcgctgttgaaaggggccaactggagcagatcacaggcaagggcgcaagcggcacctttcaatag

SEQ ID NO: 338126 - DNA, 402 bp, Artificial Sequence
  derived and/or modified sequence
atggccaccgacaccagccagggcgagctggtgcaccccaaggccctgcccctgatcgtgggcgcccagctgatccacgccgacaagctgggcgagaaggtggaggacagcaccatgcccatcagaagaaccgtgaacagcaccagagagaccccccccaagagcaagctggccgagggcgaggaggagaagcccgagcccgacatcagcagcgaggagagcgtgagcaccgtggaggagcaggagaacgagaccccccccgccaccagcagcgaggccgagcagcccaagggcgagcccgagaacgaggagaaggaggagaacaagagcagcgaggagaccaagaaggagagagccgacagcatccacagcaccctgttcatcatcggccagaacagctag

SEQ ID NO: 338127 - DNA, 231 bp, Artificial Sequence
  derived and/or modified sequence
atggccaccgacaccagccagggcgagctggtgcaccccaaggccctgcccctgatcgtgggcgcccagctgatccacgccgacaagctgggcgagaaggtggaggacagcaccatgcccatcagaagaaccgtgaacagcaccagagagaccccccccaagagcaagctggccgagggcgaggaggagaagcccgagcccgacatcagcagcgaggagagcgtgagctag

SEQ ID NO: 338128 - DNA, 375 bp, Artificial Sequence
  derived and/or modified sequence
atggccaccgacaccagccagggcgagctggtgcaccccaaggccctgcccctgatcgtgggcgcccagctgatccacgccgacaagctgggcgagaaggtggaggacagcaccatgcccatcagaagaaccgtgaacagcaccagagagaccccccccaagagcaagctggccgagggcgaggaggagaagcccgagcccgacatcagcagcgaggagagcgtgagcaccgtggaggagcaggagaacgagaccccccccgccaccagcagcgaggccgagcagcccaagggcgagcccgagaacgaggagaaggaggagaacaagagcagcgaggagaccaagaaggacgagaaggaccagagcaaggagtag

SEQ ID NO: 338129 - DNA, 123 bp, Artificial Sequence
  derived and/or modified sequence
atgcccatcagaagaaccgtgaacagcaccagagagaccccccccaagagcaagctggccgagggcgaggaggagaagcccgagcccgacatcagcagcgaggagagcgtgagcaccgtgtag

SEQ ID NO: 338130 - DNA, 837 bp, Artificial Sequence
  derived and/or modified sequence
atgcccatcagaagaaccgtgaacagcaccagagagaccccccccaagagcaagctggccgagggcgaggaggagaagcccgagcccgacatcagcagcgaggagagcgtgagcaccgtggaggagcaggagaacgagaccccccccgccaccagcagcgaggccgagcagcccaagggcgagcccgagaacgaggagaaggaggagaacaagagcagcgaggagaccaagaaggacgagaaggaccagagcaaggagaaggagaagaaggtgaagaagaccatccccagctgggccaccctgagcgccagccagctggccagagcccagaagcagacccccatggccagcagccccagacccaagatggacgccatcctgaccgaggccatcaaggcctgcttccagaagagcggcgccagcgtggtggccatcagaaagtacatcatccacaagtaccccagcctggagctggagagaagaggctacctgctgaagcaggccctgaagagagagctgaacagaggcgtgatcaagcaggtgaagggcaagggcgccagcggcagcttcgtggtggtgcagaagagcagaaagaccccccagaagagcagaaacagaaagaacagaagcagcgccgtggaccccgagccccaggtgaagctggaggacgtgctgcccctggccttcaccagactgtgcgagcccaaggaggccagctacagcctgatcagaaagtacgtgagccagtactaccccaagctgagagtggacatcagaccccagctgctgaagaacgccctgcagagagccgtggagagaggccagctggagcagtag

SEQ ID NO: 338131 - DNA, 138 bp, Artificial Sequence
  derived and/or modified sequence
atgcccatcagaagaaccgtgaacagcaccagagagaccccccccaagagcaagctggccgagggcgaggaggagaagcccgagcccgacatcagcagcgaggagagcgtgagcaccgtggaggagcaggagaactag

SEQ ID NO: 338132 - DNA, 984 bp, Artificial Sequence
  derived and/or modified sequence
atggccaccgacaccagccagggcgagctggtgcaccccaaggccctgcccctgatcgtgggcgcccagctgatccacgccgacaagctgggcgagaaggtggaggacagcaccatgcccatcagaagaaccgtgaacagcaccagagagaccccccccaagagcaagctggccgagggcgaggaggagaagcccgagcccgacatcagcagcgaggagagcgtgagcaccgtggaggagcaggagaacgagaccccccccgccaccagcagcgaggccgagcagcccaagggcgagcccgagaacgaggagaaggaggagaacaagagcagcgaggagaccaagaaggacgagaaggaccagagcaaggagaaggagaagaaggtgaagaagaccatccccagctgggccaccctgagcgccagccagctggccagagcccagaagcagacccccatggccagcagccccagacccaagatggacgccatcctgaccgaggccatcaaggcctgcttccagaagagcggcgccagcgtggtggccatcagaaagtacatcatccacaagtaccccagcctggagctggagagaagaggctacctgctgaagcaggccctgaagagagagctgaacagaggcgtgatcaagcaggtgaagggcaagggcgccagcggcagcttcgtggtggtgcagaagagcagaaagaccccccagaagagcagaaacagaaagaacagaagcagcgccgtggaccccgagccccaggtgaagctggaggacgtgctgcccctggccttcaccagactgtgcgagcccaaggaggccagctacagcctgatcagaaagtacgtgagccagtactaccccaagctgagagtggacatcagaccccagctgctgaagaacgccctgcagagagccgtggagagaggccagctggagcagatcaccggcaagggcgccagcggcaccttccagtag

SEQ ID NO: 338133 - DNA, 928 bp, Artificial Sequence
  derived and/or modified sequence
gcggagcgccgaggctcgcgttccgccgctgcttccgtcgccggggcgggcgccgcggtgtccctgccgagcgtgagccccgaactgtcaccgcgccgagccccagcctcatccgtcggtgtccgcggttgattcttcaccacactgaaaccattaggaaaaatccttgtggttaacagcagaggcttcagagtgtaacctgtactcgggcctagaaattatttaaaatggcgactgatacgtctcaaggtgaactcgtccatcctaaggcactcccacttatagtaggagctcagctgatccacgcggacaagttaggtgagaaggtagaagatagcaccatgccgattcgtcgaactgtgaattctacccgggaaactcctcccaaaagcaagcttgctgaaggggaggaagaaaagccagaaccagacataagttcagaggaatctgtctccactgtagaagaacaagagaatgaaactccacctgctacttcgagtgaggcagagcagccaaagggggaacctgagaatgaagagaaggaagaaaataagtcttctgaggaaaccaaaaaggagagagctgatagtattcattccactcttttcataattggtcagaacagttagaaattgcttttaactatagtcatgcattgcttaacaatgggtatacattctgagagatacatctttaggcgatttcatcatcgtgccaacatcataaagtgtacttacacaaacctacgtggtacagcctactacatacctaggctttatgggatagtctgttgcttctaggctacaaacctgtacagcatgttactgtactaaatactgtaggcagttataacacaacggtaagtatttgtgtatttaaacatagaaaaggtacagtaaaaatataatataaaagataaaaaatggta

SEQ ID NO: 338134 - DNA, 727 bp, Artificial Sequence
  derived and/or modified sequence
agtggtgagtgtgcggagcgccgaggctcgcgttccgccgctgcttccgtcgccggggcgggcgccgcggtgtccctgccgagcgtgagccccgaactgtcaccgcgccgagccccagcctcatccgtcggtgtccgcggtccgagctttccccgcctcgctggcggcccgcgctctcccccgccgtgcgcgttcgccgctgtggcctgtagctacctcgcctcgctgctttgtctccgctgctcttgccgtccttcccgcggccttctgcgggcggggctgtcggctgtcgctttgctgctccgcgacggcggccttgagtctcgctcccccggtgggaaacgtagaactggttactcgccaccttaggcggtggggtttgaatgagagcggtgcctcggttgattcttcaccacactgaaaccattaggaaaaatccttgtggttaacagcagaggcttcagagtgtaacctgtactcgggcctagaaattatttaaaatggcgactgatacgtctcaaggtgaactcgtccatcctaaggcactcccacttatagtaggagctcagctgatccacgcggacaagttaggtgagaaggtagaagatagcaccatgccgattcgtcgaactgtgaattctacccgggaaactcctcccaaaagcaagcttgctgaaggggaggaagaaaagccagaaccagacataagttcagaggaatctgtctc

SEQ ID NO: 338135 - DNA, 572 bp, Artificial Sequence
  derived and/or modified sequence
gcggtggggtttgaatgagagcggtgcctcggtaggtcgtcagaaagttacagtcgcccatctgagcgtttgtaagagatggaggcaggagtggtgaggttgattcttcaccacactgaaaccattaggaaaaatccttgtggttaacagcagaggcttcagagtgtaacctgtactcgggcctagaaattatttaaaatggcgactgatacgtctcaaggtgaactcgtccatcctaaggcactcccacttatagtaggagctcagctgatccacgcggacaagttaggtgagaaggtagaagatagcaccatgccgattcgtcgaactgtgaattctacccgggaaactcctcccaaaagcaagcttgctgaaggggaggaagaaaagccagaaccagacataagttcagaggaatctgtctccactgtagaagaacaagagaatgaaactccacctgctacttcgagtgaggcagagcagccaaagggggaacctgagaatgaagagaaggaagaaaataagtcttctgaggaaaccaaaaaggatgagaaagatcagtctaaagaaaa

SEQ ID NO: 338136 - DNA, 538 bp, Artificial Sequence
  derived and/or modified sequence
agtggtgagtgtgcggagcgccgaggctcgcgttccgccgctgcttccgtcgccggggcgggcgccgcggtgtccctgccgagcgtgagccccgaactgtcaccgcgccgagccccagcctcatccgtcggtgtccgcggtccgagctttccccgcctcgctggcggcccgcgctctcccccgccgtgcgcgttcgccgctgtggcctgtagctacctcgcctcgctgctttgtctccgctgctcttgccgtccttcccgcggccttctgcgggcggggctgtcggctgtcgctttgctgctccgcgacggcggccttgagtctcgctcccccggtgggaaacgtagaactggttactcgccaccttaggcggtggggtttgaatgagagcggtgcctcgaaggtagaagatagcaccatgccgattcgtcgaactgtgaattctacccgggaaactcctcccaaaagcaagcttgctgaaggggaggaagaaaagccagaaccagacataagttcagaggaatctgtctccactgta

SEQ ID NO: 338137 - DNA, 970 bp, Artificial Sequence
  derived and/or modified sequence
gcggcagagctcggcggctgggactggaggacagcggtggcggaggcgactagcggcggcgggagcggcgccgagaggccgtgcgggacgcgggcgccaggaccggccgaacgcagagaaggtagaagatagcaccatgccgattcgtcgaactgtgaattctacccgggaaactcctcccaaaagcaagcttgctgaaggggaggaagaaaagccagaaccagacataagttcagaggaatctgtctccactgtagaagaacaagagaatgaaactccacctgctacttcgagtgaggcagagcagccaaagggggaacctgagaatgaagagaaggaagaaaataagtcttctgaggaaaccaaaaaggatgagaaagatcagtctaaagaaaaggagaagaaagtgaaaaaaacaattccttcctgggctaccctttctgccagccagctagccagggcccagaaacaaacaccgatggcttcttccccacgtcccaagatggatgcaatcttaactgaggccattaaggcatgcttccagaagagtggtgcatcagtggttgctattcgaaaatacatcatccataagtatccttctctggagctggagagaaggggttatctccttaaacaagcactgaaaagagaattaaatagaggagtcatcaaacaggttaaaggaaaaggtgcttctggaagttttgttgtggttcagaaatcaagaaaaacacctcagaaatccagaaacagaaagaataggagctctgcagtggatccagaaccacaagtaaaattggaggatgtcctcccactggcctttactcgcctttgtgaacctaaagaagcttcctacagtctcatcaggaaatatgtgtctcagtattatcctaagcttagagtggacatcaggcctcagctgttgaagaacgctctgcagagagcagtagagaggggccagttagaacag

SEQ ID NO: 338138 - DNA, 1159 bp, Artificial Sequence
  derived and/or modified sequence
cggaggcgactagcggcggcgggagcggcgccgagaggccgtgcgggacgcgggcgccaggaccggccgaacgcagaggttgattcttcaccacactgaaaccattaggaaaaatccttgtggttaacagcagaggcttcagagtgtaacctgtactcgggcctagaaattatttaaaatggcgactgatacgtctcaaggtgaactcgtccatcctaaggcactcccacttatagtaggagctcagctgatccacgcggacaagttaggtgagaaggtagaagatagcaccatgccgattcgtcgaactgtgaattctacccgggaaactcctcccaaaagcaagcttgctgaaggggaggaagaaaagccagaaccagacataagttcagaggaatctgtctccactgtagaagaacaagagaatgaaactccacctgctacttcgagtgaggcagagcagccaaagggggaacctgagaatgaagagaaggaagaaaataagtcttctgaggaaaccaaaaaggatgagaaagatcagtctaaagaaaaggagaagaaagtgaaaaaaacaattccttcctgggctaccctttctgccagccagctagccagggcccagaaacaaacaccgatggcttcttccccacgtcccaagatggatgcaatcttaactgaggccattaaggcatgcttccagaagagtggtgcatcagtggttgctattcgaaaatacatcatccataagtatccttctctggagctggagagaaggggttatctccttaaacaagcactgaaaagagaattaaatagaggagtcatcaaacaggttaaaggaaaaggtgcttctggaagttttgttgtggttcagaaatcaagaaaaacacctcagaaatccagaaacagaaagaataggagctctgcagtggatccagaaccacaagtaaaattggaggatgtcctcccactggcctttactcgcctttgtgaacctaaagaagcttcctacagtctcatcaggaaatatgtgtctcagtattatcctaagcttagagtggacatcaggcctcagctgttgaagaacgctctgcagagagcagtagagaggggccagttagaacagataactggcaaaggtgcttcggggacattccag

SEQ ID NO: 338139 - DNA, 557 bp, Artificial Sequence
  derived and/or modified sequence
attacggagctcccagtggtgagtgtgcggagcgccgaggctcgcgttccgccgctgcttccgtcgccggggcgggcgccgcggtgtccctgccgagcgtgagccccgaactgtcaccgcgccgagccccagcctcatccgtcggtgtccgcggtccgagctttccccgcctcgctggcggcccgcgctctcccccgccgtgcgcgttcgccgctgtggcctgtagctacctcgcctcgctgctttgtctccgctgctcttgccgtccttcccgcggccttctgcgggcggggctgtcggctgtcgctttgctgctccgcgacggcggccttgagtctcgctcccccggtgggaaacgtagaactggttactcgccaccttaggcggtggggtttgaatgagagcggtgcctcggtaggtcgtcagaaagttacagtcgcccatctgagcgtttgtaagagatggaggcaggagtggtgagaaggtagaagatagcaccatgccgattcgtcgaactgtgaattctacccgggaaactcctcccaaaagcaagcttg

SEQ ID NO: 338140 - protein, 202 aa, Artificial Sequence
  derived and/or modified sequence
MVWPWVAMASRWGPLIGLAPCCLWLLGAVLLMDASARPANHSSTRERVANREENEILPPDHLNGVKLEMDGHLNRGFHQEVFLGKDLGGFDEDAEPRRSRRKLMVIFSKVDVNTDRKISAKEMQRWIMEKTAEHFQEAMEESKTHFRAVDPDGDGHVSWDEYKVKFLASKGHSEKEVADAIRLNEELKVDEERHGPPGPRAL

SEQ ID NO: 338141 - DNA, 609 bp, Artificial Sequence
  derived and/or modified sequence
atggtgtggccctgggtggccatggccagcagatggggccccctgatcggcctggccccctgctgcctgtggctgctgggcgccgtgctgctgatggacgccagcgccagacccgccaaccacagcagcaccagagagagagtggccaacagagaggagaacgagatcctgccccccgaccacctgaacggcgtgaagctggagatggacggccacctgaacagaggcttccaccaggaggtgttcctgggcaaggacctgggcggcttcgacgaggacgccgagcccagaagaagcagaagaaagctgatggtgatcttcagcaaggtggacgtgaacaccgacagaaagatcagcgccaaggagatgcagagatggatcatggagaagaccgccgagcacttccaggaggccatggaggagagcaagacccacttcagagccgtggaccccgacggcgacggccacgtgagctgggacgagtacaaggtgaagttcctggccagcaagggccacagcgagaaggaggtggccgacgccatcagactgaacgaggagctgaaggtggacgaggagagacacggcccccccggccccagagccctgtag

SEQ ID NO: 338142 - DNA, 609 bp, Artificial Sequence
  derived and/or modified sequence
atggtatggccctgggtcgcgatggcgagccgctgggggcccctcattggtttagccccctgctgcctgtggttgctaggcgccgttctcctgatggacgcctccgctagacccgccaatcactcctctacacgagaacgtgtagcaaaccgagaagaaaatgagatactccccccagaccacttgaacggagtgaagctcgaaatggatggccacctcaacagagggtttcaccaggaggtgttcctgggaaaagatcttggcgggttcgacgaagacgccgagccacggcgatccagacgaaaactcatggtgattttcagtaaggtggatgtgaatacagaccggaagatcagtgcaaaggagatgcaaagatggattatggaaaagacagcggagcactttcaagaggccatggaggagagcaagactcacttccgcgccgtcgacccagacggcgacgggcatgtcagctgggatgagtacaaggtgaagtttttggccagcaaggggcatagcgagaaagaagtggccgatgcaatccgattgaatgaggaactgaaggttgacgaagagagacatgggccgcctgggccacgggccttatag

SEQ ID NO: 338143 - DNA, 609 bp, Artificial Sequence
  derived and/or modified sequence
atggtgtggccctgggtggccatggccagccgctggggccccctcatcggcctggccccctgctgcctgtggctgctgggcgctgtgctgctgatggatgccagcgcccggcctgccaaccacagcagcacccgggagcgggtggccaaccgggaggagaatgagatcctgcccccagaccacctgaatggagtgaagctggagatggatggccacctgaacagaggcttccaccaggaggtgttcctgggcaaggacctgggcggctttgatgaagatgctgagcccaggaggagcaggaggaagctgatggtgatcttcagcaaggtggatgtgaacacagacaggaagatcagcgccaaggagatgcagcgctggatcatggagaagacagctgagcacttccaggaggccatggaggagagcaagacccacttccgggctgtggaccctgatggagatggccacgtgtcctgggatgagtacaaggtgaagttcctggccagcaagggccacagcgagaaggaggtggctgatgccatccggctgaatgaggagctgaaggtggatgaggagcggcacggccccccaggcccccgggccctgtag

SEQ ID NO: 338144 - DNA, 609 bp, Artificial Sequence
  derived and/or modified sequence
atggtgtggccctgggtggccatggccagccggtggggccccctgatcgggctcgcaccgtgttgcctttggctgctgggcgccgtgttgttaatggatgccagtgcgaggccggctaaccatagctccacgcgggaacgagtcgccaatagggaagaaaatgaaatcctgccaccagatcacctgaacggcgtgaaacttgaaatggacggccatctgaataggggcttccatcaggaggtgttcttgggcaaagacctcggggggttcgatgaggacgcggagccccggcgctcccgaagaaagctgatggtcattttcagcaaggtcgacgtgaacaccgaccgaaaaatcagtgccaaggagatgcaaagatggattatggaaaaaaccgccgaacacttccaggaggcaatggaagagtctaagacacactttagagcagtggaccctgatggcgatggccacgtgtcctgggatgagtacaaagttaagtttttagctagtaagggacatagtgaaaaagaagtggccgacgctatccgcttgaatgaagaactgaaagttgacgaggagagacatgggccaccgggacctcgggcactgtag

SEQ ID NO: 338145 - DNA, 609 bp, Artificial Sequence
  derived and/or modified sequence
atggtttggccttgggtggcaatggcgagtcggtggggccctctaattggactggcgccatgttgtctttggctcttaggagctgtactgctcatggatgcttccgctagacctgcaaaccatagctccactagggaaagggtggcaaatcgggaggagaacgagattctgcccccagaccacctgaatggagtcaagcttgaaatggatggccacttgaacaggggatttcatcaggaagtttttctgggcaaagacctagggggtttcgacgaggatgcggaacccagaaggtctcgtagaaaacttatggtgatcttctctaaagttgatgtgaacactgaccggaagatctccgcgaaagaaatgcagaggtggattatggaaaagacggcagaacactttcaagaggctatggaagagagcaagacacacttccgggctgtggacccggatggagatggacacgtttcttgggacgaatacaaggtgaagttccttgcctctaagggccacagtgagaaggaagttgccgatgcaattagactcaacgaggagctgaaagtggatgaagagaggcacgggccacctggccctcgcgctctttag

SEQ ID NO: 338146 - DNA, 861 bp, Artificial Sequence
  derived and/or modified sequence
gcccgcaagaaagatggcagtggcctgatccgggcccgttggcggcgtcactgacgcttcgctccggtcctcggatcccgagcgcggggaggcagaccgactgtgagctgcttgtccccatcctgcggccgtcctggggacacagagccctccgtggtgcccggggattggattggagccaggacctcacttcctcctctgcccctgcccctgcccctcccagcacctggcccacaccctgcagcccgccccatggtctggccctgggtggcgatggcgtccaggtggggtcccctcattggcctggctccgtgctgcctctggctcctgggggcagtccttctgatggacgcgtctgcacggcctgccaaccactcgtccactcgagagagagtagccaacagggaggagaatgagatcctgcccccagaccacctgaacggggtgaagctggagatggacgggcacctcaatcgcggcttccaccaggaggtcttcctaggcaaggacctgggtggctttgatgaggacgcggagccgcggcggagccggaggaagctgatggtcatcttttccaaggtggatgtgaacactgaccggaagatcagtgccaaggagatgcagcgctggatcatggagaagacggccgagcacttccaggaggccatggaggagagcaagacacacttccgcgccgtggaccctgacggggacggtcacgtgtcttgggacgagtataaggtgaagtttttggcgagtaaaggccatagcgagaaggaggttgccgacgccatcaggctcaacgaggaactcaaagtggatgaggaaagacatggcccacctggacctagagctctgtga

SEQ ID NO: 338147 - protein, 186 aa, Artificial Sequence
  derived and/or modified sequence
MSLVCLTDFQAHAREQLSKSTRDFIEGGADDSITRDDNIAAFKRIRLRPRYLRDVSEVDTRTTIQGEEISAPICIAPTGFHCLVWPDGEMSTARAPEGLRWFQLYVHPDLQLNKQLIQRVESLGFKALVITLDTPVCGNRRHDIRNQLRRNLTLTDLQSPKKGNAIPYFQMTPISTSLCWNDLSWF

SEQ ID NO: 338148 - DNA, 561 bp, Artificial Sequence
  derived and/or modified sequence
atgtccttagtgtgcttgaccgacttccaggctcacgcacgggagcagctgagcaagagcacccgcgatttcatcgaggggggagcagacgactcaattacccgggatgacaacatcgccgcgttcaagcggatcagactgcgacctagatacttgcgggacgtaagtgaggtcgacactaggacaaccatccagggcgaggaaattagcgccccaatttgcatagcacccactgggttccattgtttggtttggcccgacggcgagatgtctacagccagggcacccgagggcctccgatggttccagctgtatgtacaccccgatctccaactcaacaaacaactgatccaacgcgtggagtctttgggatttaaggccctggtgatcacactggatacacctgtgtgcggtaaccggcgccacgacatcaggaaccagctacgcagaaacctaacattaactgatctccagtcacccaagaagggcaatgcaatcccatatttccagatgactcccatctccaccagtctctgctggaacgatttgtcctggttttag

SEQ ID NO: 338149 - DNA, 691 bp, Artificial Sequence
  derived and/or modified sequence
ttctttagcctgaactgtgggtagtgatgtggtgtgtttcctaacacctccggcagtgagccaggctttgagtggctgcgtctaaacacttctttccctgaggactggaagacattagaataaggtccagaaatgtccttggtgtgtttgacagactttcaggcccatgcgcgagagcagctgtctaagtcaactcgggattttattgaaggtggagcagatgacagcatcacgcgggatgacaacattgcagcatttaaaagaattcgcctccgtccgcggtacctgagagatgtgtctgaggtggacaccagaaccacaatccaaggggaggagatcagtgcccctatttgtatcgcacccacagggttccactgccttgtctggcctgatggggaaatgagcacagcaagagctcccgaaggcctccgatggttccaactctatgtgcatccagacctgcagctgaacaaacagttgatccagagggtagaatccctaggtttcaaagctttggtaataactttggatacacctgtatgtggcaacaggcgacatgacattcgaaaccagttgaggaggaacttaacactaacagatcttcaatcacctaaaaagggaaatgcaataccttatttccagatgactcctatcagcacttctctctgctggaatgatctctcctggtttc

SEQ ID NO: 338150 - DNA, 561 bp, Artificial Sequence
  derived and/or modified sequence
atgagcctggtgtgcctgacagacttccaggcccacgcccgggagcagctgagcaagagcacccgggacttcattgaaggaggagcagatgacagcatcaccagagatgacaacattgctgccttcaagaggatccggctgcggccccgctacctgagagatgtgtctgaggtggacaccaggaccaccatccagggcgaggagatcagcgcccccatctgcatcgcccccaccggcttccactgcctggtgtggccagatggagagatgagcacagcccgggcccctgagggcctgcgctggttccagctgtatgtgcacccagacctgcagctgaacaagcagctgatccagagggtggagagcctgggcttcaaggccctggtgatcaccctggacacccctgtgtgtggcaacagaagacatgacatccggaaccagctgcggaggaacctgaccctgacagacctgcagagccccaagaagggaaatgccatcccctacttccagatgacccccatcagcaccagcctgtgctggaatgacctgtcctggttctag

SEQ ID NO: 338151 - DNA, 561 bp, Artificial Sequence
  derived and/or modified sequence
atgagcctggtgtgcctgaccgacttccaggcccacgcccgggagcagctctcaaagtccactcgcgatttcatcgaaggtggtgccgatgatagtatcacccgggacgacaacatcgccgccttcaagagaatacgattacggcctcggtacttacgcgatgtgagcgaggtagacacacggacgacaatacaaggtgaagagattagcgcgccaatatgcatcgccccaactgggttccattgcctggtgtggccagacggtgaaatgtctactgcccgggctcctgagggcctgcgatggtttcaactttatgtgcacccagatctccaactgaacaagcaacttattcagcgcgtggagagcctggggttcaaagctctcgtcatcacattggatactcctgtgtgtgggaaccggcgccatgacatacggaatcagcttcgccgaaacttaactctgaccgacctccagagccctaaaaaaggcaacgccatcccgtatttccagatgaccccgatcagtaccagcttgtgttggaacgacctgtcatggttttag

SEQ ID NO: 338152 - DNA, 561 bp, Artificial Sequence
  derived and/or modified sequence
atgtcgttggtatgcctcaccgatttccaagctcacgctagggaacagctgtcaaagagcacccgggatttcatcgagggaggagccgacgattctatcacccgcgacgacaatatagcggcttttaaaagaatcagactgcgccctaggtatctccgcgacgtgtccgaagtcgacactagaacaactattcaaggggaagaaatatccgcaccaatctgcatcgccccaactggctttcattgtttggtctggcccgatggggaaatgagcacggccagagcacctgaaggacttaggtggtttcaattatacgtccacccagatcttcaactgaacaaacagctcatacagcgtgtcgagtccctaggctttaaggctctggtgatcacactcgacacccctgtatgcgggaataggcgccacgacattcgaaatcagttacggcgtaatctgaccctaaccgacctgcagtctcctaagaagggtaacgccattccgtatttccaaatgaccccaatttcgacctcactctgctggaacgacctgtcttggttctag

SEQ ID NO: 338153 - DNA, 561 bp, Artificial Sequence
  derived and/or modified sequence
atgagcctggtgtgcctgaccgacttccaggcccacgccagagagcagctgagcaagagcaccagagacttcatcgagggcggcgccgacgacagcatcaccagagacgacaacatcgccgccttcaagagaatcagactgagacccagatacctgagagacgtgagcgaggtggacaccagaaccaccatccagggcgaggagatcagcgcccccatctgcatcgcccccaccggcttccactgcctggtgtggcccgacggcgagatgagcaccgccagagcccccgagggcctgagatggttccagctgtacgtgcaccccgacctgcagctgaacaagcagctgatccagagagtggagagcctgggcttcaaggccctggtgatcaccctggacacccccgtgtgcggcaacagaagacacgacatcagaaaccagctgagaagaaacctgaccctgaccgacctgcagagccccaagaagggcaacgccatcccctacttccagatgacccccatcagcaccagcctgtgctggaacgacctgagctggttctag

SEQ ID NO: 338154 - DNA, 1393 bp, Artificial Sequence
  derived and/or modified sequence
gtcaggcctcagaaagatggcgtcctcggagcaggcagagcagccgagccagccaagctctactccaggaagtgaaaatgtgctgcctcgagagccgctgggctgacagatgaagagattgatatggccttccagcagtcgggcactgctgccgatgagccttcgtccttgggcccagccacacaggtggttcctgtccagccccctcacctcatatctcagccatacagtcccgcaggctcccgatggcgagattacggcgccctggccatcatcatggcaggcattgcatttggctttcaccagctctacaagaaatacctgctccccctcatcctgggcggccgagaggacagaaagcagctggagaggatggaggccggtctctctgagctgagtggcagcgtggcccagacagtgactcagttacagacgaccctcgcctccgtccaggagctgctgattcagcagcagcagaagatccaggagcttgcccacgagctggccgctgccaaggccaccacatccaccaactggatcctggagtcccagaatatcaacgaactcaagtccgaaattaactccttgaaagggcttcttttaaatcggaggcagttccctccatccccatcagccccgaagatcccctcctggcagatcccagtcaagtcaccgtcaccctccagccctgcggccgtgaaccaccacagcagcagcgacatctcacctgtcagcaacgagtccacgtcgtcctcgcctgggaaggagggccacagccccgagggctccacggtcacctaccacttgctgggcccccaggaggaaggcgagggggtggtggacgtcaagggccaggtgcggatggaggtgcaaggcgaggaggagaagagggaggacaaggaggacgaggaggatgaggaggatgatgatgtgagccatgtggacgaggaggactgcctgggggtgcagagggaggaccgccggggcggggatgggcagatcaacgagcaggtggagaagctgcggcggcccgagggcgccagcaacgagagtgagcgggactagggctgcgcctgctgcctccagccctgaggatggcatctagtgtgcccgtgcgtggccataccctgcctccctctctggccctgggagggcagcttggagcccaggtagggggcagagctgtcctcagctgcactgcggcctggtggcagtgtggggagtcacacttctgtccacctggcctcctctcgcctggccgccagccccagccccagccccagccccaggcccagctgcctttggctttgatctcaagtcaggctgaaggcagcgaagcctcggggcccaagcccctccccagccccctctcccggacagacgccttgcccag

SEQ ID NO: 338155 - protein, 319 aa, Artificial Sequence
  derived and/or modified sequence
MIPESSELVVQAGLFHGNEMLCKTVSSSEVSVCSEPVWKQRLEFDINICDLPRMARLCFALYAVIEKAKKARSTKKKSKKADCPIAWANLMLFDYKDQLKTGERCLYMWPSVPDEKGELLNPTGTVRSNPNTDSAAALLICLPEVAPHPVYYPALEKILELGRHSECVHVTEEEQLQLREILERRGSGELYEHEKDLVWKLRHEVQEHFPEALARLLLVTKWNKHEDVAQMLYLLCSWPELPVLSALELLDFSFPDCHVGSFAIKSLRKLTDDELFQYLLQLVQVLKYESYLDCELTKFLLDRALANRKIGHFLFWHLR

SEQ ID NO: 338156 - DNA, 960 bp, Artificial Sequence
  derived and/or modified sequence
atgatccccgagagcagcgagctggtggtgcaggccggcctgttccacggcaacgagatgctgtgcaagaccgtgagcagcagcgaggtgagcgtgtgcagcgagcccgtgtggaagcagagactggagttcgacatcaacatctgcgacctgcccagaatggccagactgtgcttcgccctgtacgccgtgatcgagaaggccaagaaggccagaagcaccaagaagaagagcaagaaggccgactgccccatcgcctgggccaacctgatgctgttcgactacaaggaccagctgaagaccggcgagagatgcctgtacatgtggcccagcgtgcccgacgagaagggcgagctgctgaaccccaccggcaccgtgagaagcaaccccaacaccgacagcgccgccgccctgctgatctgcctgcccgaggtggccccccaccccgtgtactaccccgccctggagaagatcctggagctgggcagacacagcgagtgcgtgcacgtgaccgaggaggagcagctgcagctgagagagatcctggagagaagaggcagcggcgagctgtacgagcacgagaaggacctggtgtggaagctgagacacgaggtgcaggagcacttccccgaggccctggccagactgctgctggtgaccaagtggaacaagcacgaggacgtggcccagatgctgtacctgctgtgcagctggcccgagctgcccgtgctgagcgccctggagctgctggacttcagcttccccgactgccacgtgggcagcttcgccatcaagagcctgagaaagctgaccgacgacgagctgttccagtacctgctgcagctggtgcaggtgctgaagtacgagagctacctggactgcgagctgaccaagttcctgctggacagagccctggccaacagaaagatcggccacttcctgttctggcacctgagatag

SEQ ID NO: 338157 - DNA, 960 bp, Artificial Sequence
  derived and/or modified sequence
atgatccccgagtctagcgaactcgtggtgcaggccggcctatttcacgggaacgagatgctttgtaaaactgtatccagcagtgaggtaagcgtgtgctctgagcctgtgtggaagcagaggctggagttcgatataaacatctgtgacttgcccagaatggcgcgattatgcttcgccttgtacgctgtgattgagaaggctaagaaagccaggtctaccaagaaaaagtccaaaaaggcagactgccctatcgcatgggctaatctgatgcttttcgactacaaggaccagctgaagacaggagaacgctgcctctatatgtggccatccgtccccgatgaaaagggcgagctgctgaatccaacaggaaccgtaagatccaatccaaacactgattctgccgctgcccttctgatctgcctacctgaggtggcgcctcatccagtgtactatccagcactcgagaagatcttggaacttgggcgtcatagtgagtgcgttcacgttacagaggaggagcagctccagctgagggagatcctggagcggcgtggctccggggagctgtacgagcacgaaaaggacttagtctggaaactgcgccacgaggtgcaagaacatttccccgaggccctggctagactgctgctggtcaccaaatggaacaaacatgaagacgtggcccagatgctgtacctcctgtgttcatggcccgagctgcccgttttatctgccttagagctattggacttttcttttcccgattgtcatgtcggtagcttcgccatcaaatcgctcaggaagctcaccgatgatgaactcttccagtaccttcttcagctggtccaggtccttaagtatgaatcctatctcgactgtgagttgactaaattcttgttagatagggccttggcaaaccgtaagatcgggcactttctgttttggcacttaagatag

SEQ ID NO: 338158 - DNA, 960 bp, Artificial Sequence
  derived and/or modified sequence
atgatccctgagagcagcgagctggtggtgcaggccggcctcttccacggcaatgagatgctgtgcaagacagtgagcagcagcgaggtgtctgtgtgcagcgagcctgtgtggaagcagaggctggagtttgacatcaacatctgtgacctgcccaggatggcccggctgtgctttgccctgtatgctgtgattgagaaggccaagaaggcccggagcaccaagaagaagagcaagaaggctgactgccccatcgcctgggccaacctgatgctgtttgactacaaggaccagctgaagacaggagagcgctgcctgtacatgtggcccagcgtgcctgatgagaagggggagctgctgaaccccactggaacagtgcgcagcaaccccaacacagacagcgctgctgccctgctgatctgcctgcctgaggtggccccccaccctgtgtactacccagccctggagaagatcctggagctgggccgccacagtgaatgtgtgcacgtgacagaggaggagcagctgcagctgcgggagatcctggagcggcggggcagcggggagctgtatgaacatgagaaggacctggtgtggaagctgcggcatgaggtgcaggagcacttccctgaggccctggcccggctgctgctggtgaccaagtggaacaagcatgaagatgtggcccagatgctgtacctgctgtgctcctggccagagctgcctgtgctgagcgccctggagctgctggacttctccttcccagactgccacgtgggcagctttgccatcaagagcctgaggaagctgacagatgatgagctgttccagtacctgctgcagctggtgcaggtgctgaagtatgagagctacctggactgtgagctgaccaagttcctgctggaccgggccctggccaacaggaagattggccacttcctgttctggcacctgaggtag

SEQ ID NO: 338159 - DNA, 960 bp, Artificial Sequence
  derived and/or modified sequence
atgatccccgagagcagcgagctggtggtgcaggccggcctgttccacgggaacgaaatgctgtgtaaaaccgtttctagtagcgaagtgtcagtctgtagcgagccagtgtggaagcaacggttggagtttgatatcaatatttgcgacctgcctaggatggctaggctctgtttcgcgttatatgccgtaatcgagaaggctaagaaggcacgtagcacgaaaaaaaaaagcaaaaaggctgactgtccaattgcgtgggcgaacctcatgctgtttgactataaggaccaactgaaaacaggtgaaagatgcctctacatgtggccgagcgtgccggacgaaaaaggtgagttgctcaaccccactggaaccgtgcgctccaatcctaatactgattcagcggccgcccttttgatttgcctccccgaagtagctcctcaccctgtttattacccggctctagagaagatacttgaactaggcaggcattcagagtgtgtgcacgtgaccgaagaggaacagttacaactgcgcgagattctggagaggcgcgggagcggggaactctacgagcatgaaaaagatctggtgtggaagcttagacacgaagtccaggagcactttcctgaagccctcgcccgtcttctgcttgttaccaagtggaataagcacgaggacgtcgctcaaatgctctacctgttgtgctcctggcctgagctccctgtgctgagcgcgttggagcttcttgattttagcttcccagattgccatgtgggcagttttgcaattaaaagtctccgcaagcttactgacgacgagctgtttcagtatcttttgcagctcgtgcaggtactgaagtacgagtcatacctggactgcgagctgacgaagtttcttctggacagagccctggccaaccggaagatcggacattttcttttctggcatctgcgatag

SEQ ID NO: 338160 - DNA, 960 bp, Artificial Sequence
  derived and/or modified sequence
atgatccccgagtccagtgaactggttgtccaggctgggctgttccatgggaatgaaatgctctgcaagactgtaagttcatcagaggtgtcggtctgctcggagcccgtgtggaaacagcggctggagttcgacattaatatctgtgaccttccaaggatggcccgactatgctttgccctctacgccgtgattgaaaaggccaagaaagccaggtccactaagaagaaatctaagaaagctgactgtcctattgcctgggctaatctcatgctcttcgactacaaggaccaactgaaaaccggcgagcgctgcctctacatgtggccatctgtacctgacgaaaagggtgaactcctgaaccctacagggacagtcaggtcgaaccccaatactgattcagcggctgctctattgatttgcttacccgaggtggccccacatccagtatactaccccgctcttgaaaagattctggagctaggtcgccatagcgaatgcgtacacgtaacagaagaggaacaactgcagttgcgggagatcctggaacggagagggagtggagagctctatgagcacgagaaggacctggtgtggaagttgagacacgaggtccaagaacactttcccgaggccctggctaggctgctgttagtcactaagtggaataagcatgaggacgtagcccaaatgctctacctgctctgtagttggccggaactgcccgtcctcagcgccctggaacttttggacttctccttcccagattgccacgtaggttcttttgccataaagtctcttaggaagctaaccgatgatgagctcttccagtatctactccagctggttcaggttctaaagtacgaatcttacctcgactgtgaactgacaaagtttctcttagatcgagcgcttgccaacaggaagatcgggcattttttgttctggcatctccgctag

SEQ ID NO: 338161 - DNA, 1458 bp, Artificial Sequence
  derived and/or modified sequence
tcttaacactttcacacgctccatcgcaacagcctgcagtcatgggctttattgtcctgtttgctggacatgatacctgagtcctcagagctggtggtgcaggccgggcttttccacggcaacgagatgctgtgcaagacggtgtccagctcggaggtgagcgtgtgctcggagcccgtgtggaagcagcggctggagttcgacatcaacatctgcgacctgccccgcatggcccgtctctgctttgcgctgtacgccgtgatcgagaaagccaagaaggctcgctccaccaagaagaagtccaagaaggcggactgccccattgcctgggccaacctcatgctgtttgactacaaggaccagcttaagaccggggaacgctgcctctacatgtggccctccgtcccagatgagaagggcgagctgctgaaccccacgggcactgtgcgcagtaaccccaacacggatagcgccgctgccctgctcatctgcctgcccgaggtggccccgcaccccgtgtactaccccgccctggagaagatcttggagctggggcgacacagcgagtgtgtgcatgtcaccgaggaggagcagctgcagctgcgggaaatcctggagcggcgggggtctggggagctgtatgagcacgagaaggacctggtgtggaagctgcggcatgaagtccaggagcacttcccggaggcgctagcccggctgctgctggtcaccaagtggaacaagcatgaggatgtggcccagatgctctacctgctgtgctcctggccggagctgcccgtcctgagcgccctggagctgctagacttcagcttccccgattgccacgtaggctccttcgccatcaagtcgctgcggaaactgacggacgatgagctgttccagtacctgctgcagctggtgcaggtgctcaagtacgagtcctacctggactgcgagctgaccaaattcctgctggaccgggccctggccaaccgcaagatcggccacttccttttctggcacctccggtagcgggacttgccccagccgttctgtgggaatcccagcccctgagtctccctggaaggccactggggacgtttccagcaggcctgggtgtcctggcctcgctaggtcctgctgggcgggaggggctgcgtggtgctgcctggtgaggctcagccctcccttcaccttccagctccgagatgcacgtgccgtcggtggccctgcgcttcggcctcatcctggaggcctactgcaggggcagcacccaccacatgaaggtgctgatgaagcagggggaagcactgagcaaactgaaggccctgaatgacttcgtcaagctgagctctcagaagacccccaagccccagaccaaggagctgatgcacttgtgcatgcggcaggaggcctacctagaggccctctcccacctgcagtccccactcgaccccagca

SEQ ID NO: 338162 - protein, 138 aa, Artificial Sequence
  derived and/or modified sequence
MKGLLPLAWFLACSVPAVQGGLLDLKSMIEKVTGKNALTNYGFYGCYCGWGGRGTPKDGTDWCCWAHDHCYGRLEEKGCNIRTQSYKYRFAWGVVTCEPGPFCHVNLCACDRKLVYCLKRNLRSYNPQYQYFPNILCS

SEQ ID NO: 338163 - DNA, 1161 bp, Artificial Sequence
  derived and/or modified sequence
cagggttctacccggctgggtccaggcagaagtttttcctccccacctccgggtttgtcctcatcatcggtcactcccattcacagctttaagattctggaggccaagaatttgactccccccggatccatggtctgtggataccaatgttccgactggagacggggagcccgcgagacccgggtctccagggtctgcccaaggaagttgctcatgggagcagacctctagagcaggatttgaggccaggccaaagagaaccccagagatgaaaggcctcctcccactggcttggttcctggcttgtagtgtgcctgctgtgcaaggaggcttgctggacctaaaatcaatgatcgagaaggtgacagggaagaacgccctgacaaactacggcttctacggctgttactgcggctggggcggccgaggaacccccaaggatggcaccgattggtgctgttgggcgcatgaccactgctatgggcggctggaggagaagggctgcaacattcgcacacagtcctacaaatacagattcgcgtggggcgtggtcacctgcgagcccgggcccttctgccatgtgaacctctgtgcctgtgaccggaagctcgtctactgcctcaagagaaacctacggagctacaacccacagtaccaatactttcccaacatcctctgctcctaggcctccccagcgagctcctcccagaccaagacttttgttctgtttttctacaacacagagtactgactctgcctggttcctgagagaggctcctaagtcacagacctcagtctttctcgaagcttggcggacccccagggccacactgtaccctccagcgagtcccaggagagtgactctggtcataggacttggtagggtcccagggtccctaggcctccacttctgagggcagcccctctggtgccaagagctctcctccaactcagggttggctgtgtctcttttcttctctgaagacagcgtcctggctccagttggaacactttcctgagatgcacttacttctcagcttctgcgatcagattatcatcaccaccaccctccagagaatttttacgcaagaagagccaaattgactctctaaatctggtgtatgggtattaaataaaattcattctcaaggctaataaaaa

SEQ ID NO: 338164 - DNA, 1162 bp, Artificial Sequence
  derived and/or modified sequence
gagaaaacggaggctcagagtcaagaccctgctgcctggggcgcgcccagaccttgtggctagccagaagcgaggtttcggattcccacagtctcgggccactgtcccaagctgcccaaagctggggaggccccgtccagctcccggaaggctgtagggaggtacctggccaagctgtcgtcggtggggagcatctcagaggaggagacgtgcgagaaactcaagggcctgatccagaggcaggtgcagatgtgcaagcggaacctggaagtcatggactcggtgcgccgcggtgcccagctggccattgaggagtgccagtaccagttccggaaccggcgctggaactgctccacactcgactccttgcccgtcttcggcaaggtggtgacgcaagggactcgggaggcggccttcgtgtacgccatctcttcggcaggtgtggcctttgcagtgacgcgggcgtgcagcagtggggagctggagaagtgcggctgtgacaggacagtgcatggggtcagcccacagggcttccagtggtcaggatgctctgacaacatcgcctacggtgtggccttctcacagtcgtttgtggatgtgcgggagagaagcaagggggcctcgtccagcagagccctcatgaacctccacaacaatgaggccggcaggaaggccatcctgacacacatgcgggtggaatgcaagtgccacggggtgtcaggctcctgtgaggtaaagacgtgctggcgagccgtgccgcccttccgccaggtgggtcacgcactgaaggagaagtttgatggtgccactgaggtggagccacgccgcgtgggctcctccagggcactggtgccacgcaacgcacagttcaagccgcacacagatgaggacctggtgtacttggagcctagccccgacttctgtgagcaggacatgcgcagcggcgtgctgggcacgaggggccgcacatgcaacaagacgtccaaggccatcgacggctgtgagctgctgtgctgtggccgcggcttccacacggcgcaggtggagctggctgaacgctgcagctgcaaattccactggtgctgcttcgtcaagtgccggcagtgccagcggctcgtggagttgcacacgtgccgatgaccgcctgcctagccctgcgccg

SEQ ID NO: 338165 - DNA, 891 bp, Artificial Sequence
  derived and/or modified sequence
atgtgcaagagaaacctggaggtgatggacagcgtgagaagaggcgcccagctggccatcgaggagtgccagtaccagttcagaaacagaagatggaactgcagcaccctggacagcctgcccgtgttcggcaaggtggtgacccagggcaccagagaggccgccttcgtgtacgccatcagcagcgccggcgtggccttcgccgtgaccagagcctgcagcagcggcgagctggagaagtgcggctgcgacagaaccgtgcacggcgtgagcccccagggcttccagtggagcggctgcagcgacaacatcgcctacggcgtggccttcagccagagcttcgtggacgtgagagagagaagcaagggcgccagcagcagcagagccctgatgaacctgcacaacaacgaggccggcagaaaggccatcctgacccacatgagagtggagtgcaagtgccacggcgtgagcggcagctgcgaggtgaagacctgctggagagccgtgccccccttcagacaggtgggccacgccctgaaggagaagttcgacggcgccaccgaggtggagcccagaagagtgggcagcagcagagccctggtgcccagaaacgcccagttcaagccccacaccgacgaggacctggtgtacctggagcccagccccgacttctgcgagcaggacatgagaagcggcgtgctgggcaccagaggcagaacctgcaacaagaccagcaaggccatcgacggctgcgagctgctgtgctgcggcagaggcttccacaccgcccaggtggagctggccgagagatgcagctgcaagttccactggtgctgcttcgtgaagtgcagacagtgccagagactggtggagctgcacacctgcagatag

SEQ ID NO: 338166 - DNA, 891 bp, Artificial Sequence
  derived and/or modified sequence
atgtgcaagaggaatcttgaggtcatggattctgttcgcagaggcgcacagctggctatagaggagtgtcagtaccagtttcggaaccgcaggtggaattgctctactctggatagtctgccagtgttcgggaaggtagtaacacagggaacccgggaagcagcatttgtttacgctattagcagcgcaggggtagcgttcgctgtaacacgagcctgcagctcaggcgagctcgaaaagtgcggttgcgaccgcactgtccacggggtgtctccacaagggttccagtggagcgggtgcagtgataacattgcctacggggttgcattttcccaaagtttcgttgacgttcgcgaacgctccaagggggcgtcttccagcagggctcttatgaacctgcacaataatgaggcaggaaggaaggcgatcttgactcacatgcgcgtggagtgtaaatgtcacggcgtgtctggctcgtgcgaagtaaaaacatgttggagagcggtccctccctttcgccaggttggtcacgccctcaaggagaaattcgacggggctaccgaagtggagccacgccgagtagggagcagtagagctcttgtcccacggaatgcccagtttaagcctcacaccgatgaagacctcgtgtacctcgagccctcccccgatttctgtgaacaggatatgcgaagcggggtcctgggaacccgaggaagaacgtgtaacaaaacatccaaagctatcgacggatgtgagctgctgtgctgtggacggggttttcacaccgctcaggttgaattggcagagcgctgctcttgcaaattccattggtgttgtttcgtaaagtgtcggcagtgccagagattagtggagcttcatacgtgtcgatag

SEQ ID NO: 338167 - DNA, 891 bp, Artificial Sequence
  derived and/or modified sequence
atgtgcaagaggaacctggaggtgatggattctgtgagaagaggagcccagctggccatcgaggagtgccagtaccagttcaggaacagacgctggaactgcagcaccctggacagcctgcctgtgtttgggaaggtggtgacccagggcacccgggaggccgcctttgtgtatgccatcagcagcgctggggtggcctttgctgtgacccgggcctgcagcagtggagagctggagaagtgtggctgtgacagaacagtgcacggcgtgagcccccagggcttccagtggagcggctgcagcgacaacatcgcctacggcgtggccttcagccagagctttgtggatgtgcgggagaggagcaagggggccagcagcagccgggccctgatgaacctgcacaacaatgaggccggcaggaaggccatcctgacccacatgagggtggagtgcaagtgccacggcgtgtctggcagctgtgaggtgaagacctgctggagggctgtgccccccttccggcaggtgggccacgccctgaaggagaagtttgatggagccacagaggtggagccccggcgggtgggcagcagccgggccctggtgcccagaaatgcccagttcaagccccacacagatgaggacctggtgtacctggagcccagcccagacttctgtgagcaggacatgaggtctggagtgctgggcacccggggccgcacctgcaacaagaccagcaaggccattgatggctgtgagctgctgtgctgcggccggggcttccacacagcccaggtggagctggccgagcgctgcagctgcaagttccactggtgctgctttgtgaagtgccggcagtgccagaggctggtggagctgcacacctgcaggtag

SEQ ID NO: 338168 - DNA, 891 bp, Artificial Sequence
  derived and/or modified sequence
atgtgcaagcggaacctggaggtgatggacagcgtgcggcggggcgcacagttggccattgaagagtgtcagtaccagttcagaaaccgtagatggaactgttccacattggattccctgccggtcttcgggaaagttgtgacccagggcacaagagaagccgccttcgtgtatgctatctcctcagcaggagtcgcctttgctgtgactcgcgcttgctccagtggtgagctggagaagtgtgggtgtgacagaaccgtccatggcgtgtcaccccaaggcttccagtggtctggatgttcagataatattgcttatggtgtggccttctcccagagcttcgttgacgtcagggagcgctcaaagggggcctcctcctcccgcgcgttaatgaacttgcacaataatgaggctggccggaaggctattctaacccatatgagagtagagtgtaagtgtcatggggtgtctggtagctgcgaggtgaagacctgctggcgggcggttccacccttccggcaggtcggacatgccttgaaagagaaatttgatggagccaccgaagtagagcctcggcgggtgggaagctctcgagcactggtcccacggaatgcccaatttaagccacacacggacgaagacctggtgtacctggaaccaagtccggacttttgtgaacaagacatgagatctggggtgttggggacccgcggtcgaacatgcaacaagacatccaaagccatcgatggctgtgaactcttgtgctgtggaagaggattccacactgcccaggtcgagttagccgagcgatgctcatgtaagttccattggtgctgcttcgtgaagtgccggcaatgccaacgactcgttgagctgcacacttgtaggtag

SEQ ID NO: 338169 - DNA, 891 bp, Artificial Sequence
  derived and/or modified sequence
atgtgtaagagaaacttagaagtcatggactcagtgcgccgaggcgcacagttggctatcgaggaatgccagtatcaatttcgtaaccgtagatggaattgttctaccttagattcactgccagtcttcggcaaggtcgtgacgcagggaacacgggaagctgcgtttgtttacgctatttcttccgcaggcgtggcgttcgctgtcacacgcgcatgttcttctggcgaactagaaaaatgcggatgcgatcgaactgtacacggcgtgtctccacagggattccagtggtctggctgcagcgataatatagcgtacggcgttgccttctctcaatcctttgtggatgtgagagagcgttctaaaggtgctagttctagcagggccctaatgaatctccataacaacgaggccggacgaaaagctatcttaacccacatgcgagtcgagtgcaagtgccatggcgtctctggaagctgcgaggtcaaaacttgctggcgggctgtcccccctttcaggcaggtggggcacgctctcaaggaaaagttcgatggtgcaacagaagtcgagccgcgaagagtgggaagttcccgagccctggtgcccaggaacgctcagttcaagcctcatactgacgaagacctcgtctacctggagccgtccccagatttctgtgagcaggacatgcgcagcggagtccttggcaccagaggtagaacatgcaacaagacgtccaaggcaattgacggctgtgaactgctgtgctgcggtagagggtttcatacagcccaggtggagctcgcagagcggtgctcttgcaagtttcattggtgctgctttgttaagtgcagacagtgccagcgcctggtggagcttcacacctgtcgctag

SEQ ID NO: 338170 - protein, 175 aa, Artificial Sequence
  derived and/or modified sequence
MSPRSCLRSLRLLVFAVFSAAASNWLYLAKLSSVGSISEEETCEKLKGLIQRQVQMCKRNLEVMDSVRRGAQLAIEECQYQFRNRRWNCSTLDSLPVFGKVVTQGGKAWHGGDSGCHLLTESRSGERTQRRKEGGSLGQCWPEAIVGTQDPMRSPPYLWGRNQGGTHTGSASEGH

SEQ ID NO: 338171 - protein, 150 aa, Artificial Sequence
  derived and/or modified sequence
  misc_feature (1)..(1): Xaa can be any naturally occurring amino acid
XYLAKLSSVGSISEEETCEKLKGLIQRQVQMCKRNLEVMDSVRRGAQLAIEECQYQFRNRRWNCSTLDSLPVFGKVVTQGGKAWHGGDSGCHLLTESRSGERTQRRKEGGSLGQCWPEAIVGTQDPMRSPPYLWGRNQGGTHTGSASEGH

SEQ ID NO: 338172 - protein, 52 aa, Artificial Sequence
  derived and/or modified sequence
MCKRNLEVMDSVRRGAQLAIEECQYQFRNRRWNCSTLDSLPVFGKVVTQGGK

SEQ ID NO: 338173 - DNA, 528 bp, Artificial Sequence
  derived and/or modified sequence
atgagccccagaagctgcctgagaagcctgagactgctggtgttcgccgtgttcagcgccgccgccagcaactggctgtacctggccaagctgagcagcgtgggcagcatcagcgaggaggagacctgcgagaagctgaagggcctgatccagagacaggtgcagatgtgcaagagaaacctggaggtgatggacagcgtgagaagaggcgcccagctggccatcgaggagtgccagtaccagttcagaaacagaagatggaactgcagcaccctggacagcctgcccgtgttcggcaaggtggtgacccagggcggcaaggcctggcacggcggcgacagcggctgccacctgctgaccgagagcagaagcggcgagagaacccagagaagaaaggagggcggcagcctgggccagtgctggcccgaggccatcgtgggcacccaggaccccatgagaagccccccctacctgtggggcagaaaccagggcggcacccacaccggcagcgccagcgagggccactag

SEQ ID NO: 338174 - DNA, 453 bp, Artificial Sequence
  derived and/or modified sequence
tgatacctggccaagctgagcagcgtgggcagcatcagcgaggaggagacctgcgagaagctgaagggcctgatccagagacaggtgcagatgtgcaagagaaacctggaggtgatggacagcgtgagaagaggcgcccagctggccatcgaggagtgccagtaccagttcagaaacagaagatggaactgcagcaccctggacagcctgcccgtgttcggcaaggtggtgacccagggcggcaaggcctggcacggcggcgacagcggctgccacctgctgaccgagagcagaagcggcgagagaacccagagaagaaaggagggcggcagcctgggccagtgctggcccgaggccatcgtgggcacccaggaccccatgagaagccccccctacctgtggggcagaaaccagggcggcacccacaccggcagcgccagcgagggccactag

SEQ ID NO: 338175 - DNA, 159 bp, Artificial Sequence
  derived and/or modified sequence
atgtgcaagagaaacctggaggtgatggacagcgtgagaagaggcgcccagctggccatcgaggagtgccagtaccagttcagaaacagaagatggaactgcagcaccctggacagcctgcccgtgttcggcaaggtggtgacccagggcggcaagtag

SEQ ID NO: 338176 - DNA, 528 bp, Artificial Sequence
  derived and/or modified sequence
atgagccccaggtcttgcctaagatcccttagactgctggtgttcgcagttttttcagcggccgccagtaattggttgtatctagccaaactgtcctcagtgggctccattagtgaggaggaaacatgcgagaaattgaaagggttgatccagcgacaggtgcagatgtgcaaacgcaatctggaggtcatggattccgtccgtcgcggcgcacagctcgccatagaggaatgccagtaccaatttagaaatagaaggtggaactgctcaaccttagatagcctgcccgtttttgggaaggtggtcacacaaggtggcaaagcttggcatgggggagatagtggttgtcatctgctgactgagagcagaagcggggaacgcacacagcgcaggaaggagggcggttcgttgggccagtgctggcccgaggccatcgtgggaacgcaggatcctatgagatcaccaccttatctttggggcagaaatcaggggggaacccacacagggagcgcttctgaaggccattag

SEQ ID NO: 338177 - DNA, 453 bp, Artificial Sequence
  derived and/or modified sequence
tgatacttggcaaaattatcatccgtgggctccataagcgaagaggagacttgtgagaagctcaaggggctgatacagcgacaggtgcagatgtgtaagcgcaacctggaagtgatggatagcgtcagacggggcgctcagctggccatagaggagtgccagtaccagttccgtaaccgtcgttggaactgttctaccctggatagtttgcccgtgttcgggaaggtcgtgactcagggaggtaaggcctggcacggaggggattctggttgtcacttactgaccgagtccaggagcggcgaaagaacacaaagacggaaagaagggggatccctggggcagtgttggcccgaggccatcgtgggaacccaggacccgatgagatcccccccttatttatgggggagaaatcaaggaggaacccataccgggagtgcaagtgaggggcattag

SEQ ID NO: 338178 - DNA, 159 bp, Artificial Sequence
  derived and/or modified sequence
atgtgcaaacgcaaccttgaggtcatggattcagtccggagaggagcacagttggctattgaagaatgtcagtatcaatttaggaacagaagatggaactgttcaacgttagactcactgccagtgtttggaaaagtggtcactcaagggggaaagtag

SEQ ID NO: 338179 - DNA, 528 bp, Artificial Sequence
  derived and/or modified sequence
atgagccccaggagctgcctgcggagcctgcggctgctggtgtttgctgtgttttctgctgctgccagcaactggctgtacctggccaagctgagctctgtgggcagcatcagcgaggaggagacctgtgagaagctgaagggcctcatccagaggcaggtgcagatgtgcaagaggaacctggaggtgatggacagcgtgcggcggggggcccagctggccatcgaggagtgccagtaccagttcaggaacagacgctggaactgcagcaccctggacagcctgcctgtgtttgggaaggtggtgacccagggcggcaaggcctggcacggcggggacagcggctgccacctgctgacagagagccgcagcggggagaggacccagaggaggaaggagggcggcagcctgggccagtgctggccagaggccatcgtgggcacccaggaccccatgaggagccccccctacctgtggggcaggaaccagggcggcacccacacaggcagcgccagcgagggccactag

SEQ ID NO: 338180 - DNA, 453 bp, Artificial Sequence
  derived and/or modified sequence
tgatacctggccaagctgagctctgtgggcagcatcagcgaggaggagacctgtgagaagctgaagggcctcatccagaggcaggtgcagatgtgcaagaggaacctggaggtgatggattctgtgagaagaggagcccagctggccatcgaggagtgccagtaccagttcaggaacagacgctggaactgcagcaccctggacagcctgcctgtgtttgggaaggtggtgacccagggcggcaaggcctggcatggaggagacagcggctgccacctgctgacagagagccgctctggagagaggacccagaggaggaaggagggcggcagcctgggccagtgctggccagaggccatcgtgggcacccaggaccccatgaggagccccccctacctgtggggcaggaaccagggcggcacccacactggaagtgccagcgagggccactag

SEQ ID NO: 338181 - DNA, 159 bp, Artificial Sequence
  derived and/or modified sequence
atgtgcaagaggaacctggaggtgatggattctgtgagaagaggagcccagctggccatcgaggagtgccagtaccagttcaggaacagacgctggaactgcagcaccctggacagcctgcctgtgtttgggaaggtggtgacccagggcggcaagtag

SEQ ID NO: 338182 - DNA, 528 bp, Artificial Sequence
  derived and/or modified sequence
atgagcccccggagctgcctgcggagcctgcggctgctggtgttcgctgtgttttcggcggccgcaagcaattggctgtatctggccaagctgagtagtgtgggttcgatctccgaagaagaaacatgcgagaagctcaaggggctgattcagagacaggttcagatgtgcaaaagaaacctggaagttatggattccgttagacgtggcgcacagctcgctattgaagagtgccagtaccagttccgcaatcggaggtggaactgctcaacactggactctctcccagtcttcggtaaagtagtgacacagggaggaaaggcttggcatgggggagactctggatgccatcttcttaccgaatcccggtctggtgaaaggacccagaggaggaaggagggcggctccctgggtcagtgttggcccgaggctatagtggggacccaggaccccatgaggagccccccctatttgtggggtcggaaccagggaggcacccacaccggaagtgcatccgaggggcactag

SEQ ID NO: 338183 - DNA, 453 bp, Artificial Sequence
  derived and/or modified sequence
tgatacctggccaagctgagcagcgtgggcagcatcagcgaggaggagacgtgtgagaagctgaaaggcctgattcagcggcaggtacagatgtgcaaaagaaacttggaagtgatggatagcgtgagacgcggcgcccagctggccatcgaagagtgtcaataccagtttcgcaatcggagatggaactgcagcacccttgacagtctacccgtgttcggaaaagttgtgacacaggggggaaaagcctggcacgggggcgactccggatgccatctgctgacagagtcacgcagcggagagagaacccagcgaaggaaagaagggggaagtctgggccaatgctggccagaggcaattgtgggcacccaggaccccatgaggtctccaccctacttgtggggacggaatcagggaggcactcacacagggtccgctagtgagggccactag

SEQ ID NO: 338184 - DNA, 159 bp, Artificial Sequence
  derived and/or modified sequence
atgtgcaagcggaacctggaggtgatggacagcgtgcggcggggcgcccagcttgccattgaggagtgccagtaccagtttcgcaacagaaggtggaactgttcaacacttgactctctgccagtcttcggaaaggtggtcacccaaggcggaaagtag

SEQ ID NO: 338185 - DNA, 528 bp, Artificial Sequence
  derived and/or modified sequence
atgtcaccaaggtcatgcctcagatccctcagactgctggtatttgcagtgtttagtgctgccgcatccaattggctatacctggcaaagcttagttctgtgggtagtatttcggaggaggaaacctgtgagaagctaaaggggctgatccaaaggcaggtccagatgtgtaagcgaaatctggaagtgatggactcagtgagaaggggggctcaactcgctatagaggagtgtcaatatcagttccggaaccgcagatggaactgctctacattagacagcttgcccgtgttcgggaaggtggtgacacaaggtggcaaggcctggcacgggggagactccgggtgccatttgctgactgaatcccggtcgggggagcggacccagagaagaaaggagggcggaagcctcggccaatgctggcccgaggccatcgtgggcactcaggatccaatgaggagccctccgtatctctggggacgaaaccaaggcggtacacacaccgggagtgcgagcgaaggccactag

SEQ ID NO: 338186 - DNA, 453 bp, Artificial Sequence
  derived and/or modified sequence
tgatacctggcgaaattgagcagcgtggggagcatttccgaggaagagacatgcgagaagctcaaggggctcattcagcgacaggtacagatgtgtaaaagaaacttagaggttatggacagcgtgcggagaggcgcacagttagccatagaagaatgccagtatcaatttcgcaatcgcagatggaactgcagcactcttgactctctaccggtgttcggaaaggtcgtcacccaagggggtaaagcttggcatggcggtgactccggatgccacttactgaccgaatccagaagtggcgaacgcacccaaaggcgaaaggaagggggaagtttaggccagtgttggccagaggccatcgttggcacccaggatccgatgcggtcgccaccatacctatggggcagaaatcaagggggtacgcacacgggatccgccagtgaggggcattag

SEQ ID NO: 338187 - DNA, 159 bp, Artificial Sequence
  derived and/or modified sequence
atgtgcaagaggaacctggaggtgatggattctgtccgtagaggcgctcagctggctatcgaggaatgccagtaccagttccgaaacaggaggtggaactgctccacactcgactcccttcccgtcttcgggaaagtggtgacacaggggggaaagtag

SEQ ID NO: 338188 - DNA, 632 bp, Artificial Sequence
  derived and/or modified sequence
gccgcgcgcgccccggcccgcccgcgggcgcccacctgcagccccgacgggaggccccccgcggccgcagccgctgccccgggccgggcgcccgcggcggcaccatgagtccccgctcgtgcctgcgttcgctgcgcctcctcgtcttcgccgtcttctcagccgccgcgagcaactggctgtacctggccaagctgtcgtcggtggggagcatctcagaggaggagacgtgcgagaaactcaagggcctgatccagaggcaggtgcagatgtgcaagcggaacctggaagtcatggactcggtgcgccgcggtgcccagctggccattgaggagtgccagtaccagttccggaaccggcgctggaactgctccacactcgactccttgcccgtcttcggcaaggtggtgacgcaaggtggcaaagcctggcatggaggagacagtggatgtcatctactgacagaaagcaggtcaggggagaggactcaaaggcgcaaggaaggaggtagcctggggcaatgctggcctgaagccatcgtgggtactcaggaccccatgagaagccctccttacctttgggggaggaaccaagggggcacccacaccggctcagcatctgagggacactga

SEQ ID NO: 338189 - DNA, 680 bp, Artificial Sequence
  derived and/or modified sequence
gtacctggccaagctgtcgtcggtggggagcatctcagaggaggagacgtgcgagaaactcaagggcctgatccagaggcaggtgcagatgtgcaagcggaacctggaagtcatggactcggtgcgccgcggtgcccagctggccattgaggagtgccagtaccagttccggaaccggcgctggaactgctccacactcgactccttgcccgtcttcggcaaggtggtgacgcaaggtggcaaagcctggcatggaggagacagtggatgtcatctactgacagaaagcaggtcaggggagaggactcaaaggcgcaaggaaggaggtagcctggggcaatgctggcctgaagccatcgtgggtactcaggaccccatgagaagccctccttacctttgggggaggaaccaagggggcacccacaccggctcagcatctgagggacactgagattcctactaggcctgggtggtacctgctctggactaaagtctgactggtggagtcgaacgtccaatcccctttggagagggacatgtcaaggtgccgagactaagccagtcacactcggcaggtgccagtcacacctggagaaggaggctgagctctgcccactcatcaaactcctcccttttacgtttttggttttcttccctagtaaaattcctcttggaaactt

SEQ ID NO: 338190 - DNA, 482 bp, Artificial Sequence
  derived and/or modified sequence
tggtgagtgagccaagagagcttccctaaactcctcctgtcctcccaatcacagcgtcttaagcccacttcccggatgagaaaacggaggctcagagtcaagaccctgctgcctggggcgcgcccagaccttgtggctagccagaagcgaggtttcggattcccacagtctcgggccactgtcccaagctgcccaaagctggggaggccccgtccagctcccggaaggctgtagggaggtacctggccaagctgtcgtcggtggggagcatctcagaggaggagacgtgcgagaaactcaagggcctgatccagaggcaggtgcagatgtgcaagcggaacctggaagtcatggactcggtgcgccgcggtgcccagctggccattgaggagtgccagtaccagttccggaaccggcgctggaactgctccacactcgactccttgcccgtcttcggcaaggtggtgacgcaaggtggcaaa

SEQ ID NO: 338191 - protein, 123 aa, Artificial Sequence
  derived and/or modified sequence
MWRNSKVMNIVSYSFLEIVCVYGYSLFIYIPTAILWIIPQKAVRWILVMIALGISGSLLAMTFWPAVREDNRRVALATIVTIVLLHMLLSVGCLAYFFDAPEMDHLPTTTATPNQTVAAAKSS

SEQ ID NO: 338192 - DNA, 372 bp, Artificial Sequence
  derived and/or modified sequence
atgtggagaaacagcaaggtgatgaacatcgtgagctacagcttcctggagatcgtgtgcgtgtacggctacagcctgttcatctacatccccaccgccatcctgtggatcatcccccagaaggccgtgagatggatcctggtgatgatcgccctgggcatcagcggcagcctgctggccatgaccttctggcccgccgtgagagaggacaacagaagagtggccctggccaccatcgtgaccatcgtgctgctgcacatgctgctgagcgtgggctgcctggcctacttcttcgacgcccccgagatggaccacctgcccaccaccaccgccacccccaaccagaccgtggccgccgccaagagcagctag

SEQ ID NO: 338193 - DNA, 372 bp, Artificial Sequence
  derived and/or modified sequence
atgtggcgaaatagcaaagtcatgaacatagtaagctattctttcttggaaattgtctgtgtgtacgggtattccttattcatctacatacctacagccattttgtggatcattccacagaaggcagtgcgctggatcttggttatgatcgcgttgggcatttccggttcgctgctagcgatgacattctggccagccgtgagagaggacaatcgacgcgtcgcactggcgactatcgtaaccatcgtattgcttcatatgttgctgtcagtcggatgcctggcctacttcttcgatgcaccagaaatggatcacctgccgactacgactgcgacaccaaaccagacggtggctgcggcaaagtcgtcatag

SEQ ID NO: 338194 - DNA, 372 bp, Artificial Sequence
  derived and/or modified sequence
atgtggaggaacagcaaggtgatgaacatcgtgtcctacagcttcctggagatcgtgtgtgtgtatggctacagcctcttcatctacatccccacagccatcctgtggatcatcccccagaaggctgtgcgctggatcctggtgatgattgccctgggcatcagcggcagcctgctggccatgaccttctggccagctgtgcgggaggacaacagaagagtggccctggccaccatcgtgaccatcgtgctgctgcacatgctgctgtctgtgggctgcctggcctacttctttgatgcccctgagatggaccacctgcccaccaccacagccacccccaaccagacagtggccgccgccaagagcagctag

SEQ ID NO: 338195 - DNA, 372 bp, Artificial Sequence
  derived and/or modified sequence
atgtggcggaacagcaaggtgatgaacatcgtgagctacagcttccttgaaatcgtatgtgtgtatggatatagtctcttcatctacattcccaccgctattctgtggatcatccctcagaaagccgttcgttggattcttgtgatgattgcgctggggatatccggtagcctgctcgcaatgactttctggcctgccgttagagaggacaataggagagtggcactcgcaacgattgtcacaatcgtactgttgcatatgctcttgtcggtgggctgccttgcctacttcttcgatgcccctgaaatggaccatctgccaacgacaacagcaactcctaatcaaaccgtggctgcggccaaaagcagctag

SEQ ID NO: 338196 - DNA, 372 bp, Artificial Sequence
  derived and/or modified sequence
atgtggagaaactctaaggtgatgaatatcgtaagctacagtttcctagagattgtgtgtgtttacgggtattccctgtttatctatatacctacagctattctatggatcataccgcagaaggcggtgagatggatactcgtgatgatagcactgggtatctctggcagcctcctggcgatgaccttctggcctgctgtccgcgaagataatcgaagagtggcgctggctaccattgtgactatcgtccttctacatatgctgttgagtgtgggctgcctggcctatttcttcgacgccccagaaatggaccacctgcctacaacgacagctactcccaaccagacggtagctgccgcaaagtcaagttag

SEQ ID NO: 338197 - protein, 173 aa, Artificial Sequence
  derived and/or modified sequence
MGLPRRAGDAAELRKSLKPLLEKRRRARINQSLSQLKGLILPLLGRENSNCSKLEKADVLEMTVRFLQELPASSWPTAAPLPCDSYREGYSACVARLARVLPACRVLEPAVSARLLEHLWRRAASATLDGGRAGDSSGPSAPAPAPASAPEPASAPVPSPPSPPCGPGLWRPW

SEQ ID NO: 338198 - protein, 76 aa, Artificial Sequence
  derived and/or modified sequence
MGLPRRAGDAAELRKSLKPLLEKRRRARINQSLSQLKGLILPLLGREDASGWHTWLPLHAQNCFLLYIQAPEQPPA
